United States Patent Application Publication US 2017/0114356 A1 - sequence listing, part 83

SEQ ID NO: 129832 - DNA, 3277 bp, Zea Mays
agtaagacacgggcgacttgtcgctgaatcaatcacgcttgtagtatgtagcaatagcagtcccggcactgcactggcagttcgctggtgttgtcctcttgttcatggcacgtagcgcgtgtccgggcactctctggagttggactctcacgcgtgttgggcctttcgtgtgcgatgcgagggagagggattcaagtccgctgcaacgagcagtgttgccttgccgccggttcacccaagagcgccggcgcttcttgcttcacgcggtataacccgagcctcctgttcgtccttgccgggctcacgcatttctggctccagctcctctgcttctggtggttgactggttcgctctcatagccgcagctccctcctcctcctccttcctcccaagtttgccggttttggagtagtagagctttgcaagcaaatcgtgatgggtttccttccattcattggcaactaattagcaggggcggggggttttttagaccacgcacaagaaattcgtttgatattttggtgtttcttttagctttaacgtgtgctatgaatttacagaaactgctgcaagaaatatctagtccggagcatgttcacattaatccgttttatgtttattattaaagcatgctgcagctctgtcaggaaaacacttactaaacaggtgctttcaacaataaaaaaacaaacttgatctgacagcctacaaacaagatgagtttgtgtatgattgagtttattctttaaatttggtggtgattaatcaacccattttattctacaaacgaaacaaaaaaattgaggggtaaaaaaaataatggactaacataatcctcaaatcaaacaccccgttaattcctcgatcattgatcatattcaatttggaagcgccaacacatggcacggccgacgagcagccaagccggtcctcgatcctgacatgttggctgcaatgctcacgacgcgcaggtccggaggcgcctcgtcccgctcctacgccgccacaggatggcgctgctcacggcgccggcggtggccgcgctgctgctcttcttctggtccgcggccgcgcagggcgtgccgccgtacaaggacgccagcaaggacgtggaggtccgcgtcagggacctcctggcccggatgacgctggccgagaaggtcggccagatgacgcagatcgagcggctcgttgcgtcgccgcaggtgctcagggactactacatcggcagcctgctgagcggcggcgggagcgtgccgcggaagcaggccacggcggcggagtgggtcgccatggtcggcgacttccagagggcctgcctgtccacgcgcctcggcatcccgatgatctacggcatagacgccgtgcacggccacaacaacgtgtacggcgccaccatcttcccccacaacgtcggcctcggagccaccaggcaagcgcattctccagctccagctcgcgttgccaaggccatcttgcgtagcctgcctgctacgttgactgatgaactccattgaacaactgcgcatcgtgcagggatcctaatctggtgaagaggatcggcgccgccaccgcgcttgaagtgagggccaccggcatccagtacgcgttcgctccttgcattgctgtgtgccgtgatccgaggtggggccggtgctacgagagctacagcgaggaccgccgtctcgtgcagaacatgactgagctcatcccgggactgcagggcgacgtcccgcagaatttcaccagcggcatgcccttcgccgccggaaagaacaaggtggcggcgtgcgccaagcacttcgtcggcgacggtggcacccacgacggcatcaacgagaacaacaccatcatcgaccgcaagggcctgatgagcatccatatgccggcctacctggacgcgctccgcaagggcgtctccacggtcatgatctcctactccagctggaacgggctcaagatgcacgccaaccacaacctcatcacaggcttcctcaagggcgagcacaagttccagggcttcacgatctcggactgggaaggcatcgacaggatcaccagccctccaggggcgaactactcctactctgtgcaggcttcaattcttgctggcattgacatgatcatggtgccaaacaactaccaagacttcatcaccatcctgaccggtcacgtgaacagcggcctgatcccgatgagcaggatcgacgacgccgtgacgaggattctgcgcgtcaagttcaccatgggcctgttcgagaaccccatgccggaccctagcctcgccgaccagctggggaagcaggagcacagggacctggcgcgggaggcggtgaggaagtcgctggtgctcctcaagaacggcaagcctggcgacgcgccgctgctgcccctgcccaagaaggccgccaagatcctggtcgccgggagccacgccgacaacctggggtaccagtgcggcgggtggacgatcgagtggcagggcgacacgggccgcatcaccgtcggcaccacgctcctggacgccgtgaaggcggccgtggacccgtcgacggcggtggtgttcgcggagaaccccgacgcgggcttcgtcaggaacggcggcttctcgtacgccatcgtggccgtgggcgagcacccgtacacggagaccaagggcgatagcatgaacctgacgatcccggagcccgggccgagcaccatccagacggtgtgcggcgccgtgccctgcgcgaccgtgctcatcagcggccgccccgtggtgatacagccgttccttggcaccgtgcacgcgctcgtggcggcctggctgccgggaagcgaaggccagggcatcaccgacgtgctcttcggggactacggcttcacggggacgctgccgcggacgtggttcaagtcggtggaccagctgccgatgaactacggcgacgagcactacgacccgctgttcccgctcgggttcgggctcaccacacagggcaagaaggggtgctagaagaagacggggtggggggtggtacttggtagagataggaaattggattaaacagtgctctggcgaggggacatgaactggggagttcttgtttccttgttttatgtcgattaattttgttgtatgctcctcacttgcgctaataagttttttttttggttatataccggagttcaaattatttaccgccgtgttatccgaattagaaacatttcaatcctcttaaacatatcttgacaagtgtatgagcaaaagtcgagtttttgagcaaaagaacaaaa

SEQ ID NO: 129833 - DNA, 3078 bp, Zea Mays
tttttctattagatattcagaaaattatcggatcagctcacccaacggtgatagcttggaaaactagatcgtacagtattttttttgtcttgtatagaagtattaaaaaaagattagcaacgtctatctcgcgttgcatctgccattgtgtcctactactgaccgttggctgcctcgccgaaaagccgccgaccactgaaaagaaaaacgaggcagcagcgcgacatggcgctcacgttgtctcccatccccacctaaccccgttgccggacggatcccggccgtcggttcctcgacgggcggcgggacgcgtcccccgattcgaacgttggggggtttattggtattctattcaacgagccgccctggcgcacactctgctctgctcagctgctcccgcttgtccgttgccgcggccgtccccggagccggagcccgcccgttccttcgtctccggctataaaatcactgcgtccgccatggcgtctcccaccaccacctgctgcagcgctctcctccccctccgcttcttcgtcttcctcggtcctccgtccgccattgttgcttgcgcaagcaggtgcggcgttgcttctgcgcccacacactgacaagttggggtggccggagggagcagggataagcttgtcagttggcggcgctgcagatagctagggctttgattagatttaggtgggagacagaggagtgttctcgctgccgtcaaggaacagtgcgcgcggcgggcgtcgctttcgaccgacggggtcccctgctctgccgcggccaccaccagcccatcacccatcatcgcgtggattggttctcgtcttgagcgagacgactacccctagctaggcagctagcctcatccgatcctgtccggaggcgcctcgtcccgctcctacgccgccacaggatggcgctgctcacggcgccggcggtggccgcgctgctgctcttcttctggtccgcggccgcgcagggcgtgccgccgtacaaggacgccagcaaggacgtggaggtccgcgtcagggacctcctggcccggatgacgctggccgagaaggtcggccagatgacgcagatcgagcggctcgttgcgtcgccgcaggtgctcagggactactacatcggcagcctgctgagcggcggcgggagcgtgccgcggaagcaggccacggcggcggagtgggtcgccatggtcggcgacttccagagggcctgcctgtccacgcgcctcggcatcccgatgatctacggcatagacgccgtgcacggccacaacaacgtgtacggcgccaccatcttcccccacaacgtcggcctcggagccaccagggatcctaatctggtgaagaggatcggcgccgccaccgcgcttgaagtgagggccaccggcatccagtacgcgttcgctccttgcattgctgtgtgccgtgatccgaggtggggccggtgctacgagagctacagcgaggaccgccgtctcgtgcagaacatgactgagctcatcccgggactgcagggcgacgtcccgcagaatttcaccagcggcatgcccttcgccgccggaaagaacaaggtggcggcgtgcgccaagcacttcgtcggcgacggtggcacccacgacggcatcaacgagaacaacaccatcatcgaccgcaagggcctgatgagcatccatatgccggcctacctggacgcgctccgcaagggcgtctccacggtcatgatctcctactccagctggaacgggctcaagatgcacgccaaccacaacctcatcacaggcttcctcaagggcgagcacaagttccagggcttcacgatctcggactgggaaggcatcgacaggatcaccagccctccaggggcgaactactcctactctgtgcaggcttcaattcttgctggcattgacatgatcatggtgccaaacaactaccaagacttcatcaccatcctgaccggtcacgtgaacagcggcctgatcccgatgagcaggatcgacgacgccgtgacgaggattctgcgcgtcaagttcaccatgggcctgttcgagaaccccatgccggaccctagcctcgccgaccagctggggaagcaggagcacagggacctggcgcgggaggcggtgaggaagtcgctggtgctcctcaagaacggcaagcctggcgacgcgccgctgctgcccctgcccaagaaggccgccaagatcctggtcgccgggagccacgccgacaacctggggtaccagtgcggcgggtggacgatcgagtggcagggcgacacgggccgcatcaccgtcggcaccacgctcctggacgccgtgaaggcggccgtggacccgtcgacggcggtggtgttcgcggagaaccccgacgcgggcttcgtcaggaacggcggcttctcgtacgccatcgtggccgtgggcgagcacccgtacacggagaccaagggcgatagcatgaacctgacgatcccggagcccgggccgagcaccatccagacggtgtgcggcgccgtgccctgcgcgaccgtgctcatcagcggccgccccgtggtgatacagccgttccttggcaccgtgcacgcgctcgtggcggcctggctgccgggaagcgaaggccagggcatcaccgacgtgctcttcggggactacggcttcacggggacgctgccgcggacgtggttcaagtcggtggaccagctgccgatgaactacggcgacgagcactacgacccgctgttcccgctcgggttcgggctcaccacacagggcaagaaggggtgctagaagaagacggggtggggggtggtacttggtagagataggaaattggattaaacagtgctctggcgaggggacatgaactggggagttcttgtttccttgttttatgtcgattaattttgttgtatgctcctcacttgcgctaataagttttttttttggttatataccggagttcaaattatttaccgccgtgttatccgaattagaaacatttcaatcctcttaaacatatcttgacaagtgtatgagcaaaagtcgagtttttgagcaaaagaacaaaa

SEQ ID NO: 129834 - DNA, 77 bp, Zea Mays
agcacgatctccgcaatcgcatctagccggagactccagtcgtctatctgtggctatatttgtctcctccgtcattg

SEQ ID NO: 129835 - DNA, 2449 bp, Zea Mays
atgacgacggtgtcgtcggcggccgcgtgcctggtcctcgctgtcctcctcctgccgtcggcggcgcagtacgtcaagtacaaggacgcgaagcagcccatcaatgagcgcgttcaggacctcctcggccggatgacgctcgaggagaagatcgggcagatgtcgcagatcgagagggccaacgcgaccgccgaggtcatcgagaagtacttcgtcggtcagtactcgatcaccgccggtcgtcgatcggccggctggcgcgcagtgatagaatccttgtctcttgtcttgccgtgatatataagtatagcactcactcactcactgatgcgcatgcatgtgcctcgatcgatcggtgcgcgtgcaggtagcgtgctcagcggcggcggcagcgtgccggcggagaaggcgtcggcgtcggtgtggcagaagatggtgaccaggatgcagaaggcggcgctcaagacccggctgggcatccccatcatctacggcatcgacgccgtgcacggcaacaacgacgtctacaacgccaccatcttcccccacaacgtcggcctcggcgccaccagggacccccgcctcgtcaagcgggtcggggaggccacggcgcacgagaccagggccaccggcatcccctacactttcgcgccatgcgtagcggtacgtacgtcgtcactggagccccaacgaccgatccatcatcatcgtcgtcgtcatcgtcatcggccgggtctgttgtgcatgcaggtctgccgtgacccgaggtggggtcggtgctacgagagcttcagcgaggacacgaggctggtgcagctcatgacctccaacatggtggccggcctgcagggcgacgtcccagcgaagcaccccaagggcgttcccttcgtcggcggggccaagaaggtggccgggtgcgccaagcacttcgtcggcgacggcggcaccaccaggggcatcaacgagaacaacacggtgctgagcttccacgacctcatgcggatccacatgccgccctacgacaacgccgtcatcaacggcatatcctccgtcatgatctcctactccagctggaacggggtcaagatgcacgagaacaagttcctcatcaccgacacgctcaagaacaagttgaacttcagggtcagtactgtagtggttgtcatcagattgataggcaggcagctagaacgaacactcgtgtccctgcatgtcagtgcatttaatttgctgtacttaacaacctgtgtgcagggcttcgtgatcacggactggcaggccgtggaccgcatcacgaacccgccgcaccagcactactaccactccatcaaggagacgatccacgccggcatcgacatggtgatgatcccctacgactacccggagttcgtcgccgacctggccaagcaggtcaagcagggccagatcaagctggagcgcatcgacgacgccgtcagccggatcctccgggtcaagttcgccatgggcctcttcgaggacccgctcccggacccgcgcctcaccaaggagctcggcgcgcaggagcaccgggcgctggcgcgggaggccgtccgcaagtcgctcgtgctgctcaagaacagcaagaaggggcaggcgaagccgatgctgccgctgcccaagacggccaagaagatcctcgtcgccggcagccatgcccacgacctgggcagccagtgcggcggctggaccatcaagtggcagggggagaggggcaacaacctcaccggcgtcggcaccacgatcctggaggccatcaagaaggcggtggacaagaagacgtcggtggactacgtggagcgcccggacaaggacgacctggccaagagcgccgagggctacgagtacgcggtggtagcggtgggcgaacccccgtacgccgagacggccggcgacaacaagaacctgaccatcccgtcgccggggcccgaggtgatcaaggacgtgtgcgggctcgtcaggtgcgtcgtgctcgtcgtgtccggccgcccgctcgtgctgcagccgtacgtggactacatggacgcgctcgtcgcggcctggctgcccggcacggaggcgcagggaatcaccgacgtgctgttcggggactatgggttcacggggaagctgccgcgcacgtggttcaagtccgtggaccagctgcccatgaactacggcgacaagcggtacgatccgttgttcccgttcggcttcgggctcaccaccaaggctgccgcgagtcacgattagcaattagagttagactctgcttttgctttttcggtgttgatgaaatagttagcgggaacggcaaataagcacttttttttgtagaagatacacagagtttttttttgtaggtgtagttaaaaaaagattgataaaataattgatttaggccttgtccgttttatcttgagatagtgatttagatttttaggaaattgaa

SEQ ID NO: 129836 - DNA, 2120 bp, Zea Mays
ctccatcactctcttctctgctcagccggagatcagccgactgaatccacgacggttgctgtgacggcgatgacgacggtgtcgtcggcggccgcgtgcctggtcctcgctgtcctcctcctgccgtcggcggcgcagtacgtcaagtacaaggacgcgaagcagcccatcaatgagcgcgttcaggacctcctcggccggatgacgctcgaggagaagatcgggcagatgtcgcagatcgagagggccaacgcgaccgccgaggtcatcgagaagtacttcgtcggtagcgtgctcagcggcggcggcagcgtgccggcggagaaggcgtcggcgtcggtgtggcagaagatggtgaccaggatgcagaaggcggcgctcaagacccggctgggcatccccatcatctacggcatcgacgccgtgcacggcaacaacgacgtctacaacgccaccatcttcccccacaacgtcggcctcggcgccaccagggacccccgcctcgtcaagcgggtcggggaggccacggcgcacgagaccagggccaccggcatcccctacactttcgcgccatgcgtagcggtctgccgtgacccgaggtggggtcggtgctacgagagcttcagcgaggacacgaggctggtgcagctcatgacctccaacatggtggccggcctgcagggcgacgtcccagcgaagcaccccaagggcgttcccttcgtcggcggggccaagaaggtggccgggtgcgccaagcacttcgtcggcgacggcggcaccaccaggggcatcaacgagaacaacacggtgctgagcttccacgacctcatgcggatccacatgccgccctacgacaacgccgtcatcaacggcatatcctccgtcatgatctcctactccagctggaacggggtcaagatgcacgagaacaagttcctcatcaccgacacgctcaagaacaagttgaacttcaggggcttcgtgatcacggactggcaggccgtggaccgcatcacgaacccgccgcaccagcactactaccactccatcaaggagacgatccacgccggcatcgacatggtgatgatcccctacgactacccggagttcgtcgccgacctggccaagcaggtcaagcagggccagatcaagctggagcgcatcgacgacgccgtcagccggatcctccgggtcaagttcgccatgggcctcttcgaggacccgctcccggacccgcgcctcaccaaggagctcggcgcgcaggagcaccgggcgctggcgcgggaggccgtccgcaagtcgctcgtgctgctcaagaacagcaagaaggggcaggcgaagccgatgctgccgctgcccaagacggccaagaagatcctcgtcgccggcagccatgcccacgacctgggcagccagtgcggcggctggaccatcaagtggcagggggagaggggcaacaacctcaccggcgtcggcaccacgatcctggaggccatcaagaaggcggtggacaagaagacgtcggtggactacgtggagcgcccggacaaggacgacctggccaagagcgccgagggctacgagtacgcggtggtagcggtgggcgaacccccgtacgccgagacggccggcgacaacaagaacctgaccatcccgtcgccggggcccgaggtgatcaaggacgtgtgcgggctcgtcaggtgcgtcgtgctcgtcgtgtccggccgcccgctcgtgctgcagccgtacgtggactacatggacgcgctcgtcgcggcctggctgcccggcacggaggcgcagggaatcaccgacgtgctgttcggggactatgggttcacggggaagctgccgcgcacgtggttcaagtccgtggaccagctgcccatgaactacggcgacaagcggtacgatccgttgttcccgttcggcttcgggctcaccaccaaggctgccgcgagtcacgattagcaattagagttagactctgcttttgctttttcggtgttgatgaaatagttagcgggaacggcaaataagcacttttttttgtagaagatacacagagtttttttttgtaggtgtagttaaaaaaagattgataaaataattgatttagg

SEQ ID NO: 129837 - DNA, 1395 bp, Zea Mays
atggcgacggaggcagcgccggagtggcttgacaagggcgacaacgcatggcagctggcggcggcgactctggtgggtctgcagagcgtgccggggctggtcatcctctacggcagcatcgtcaagaagaagtgggccgtcaactcggccttcatggcgctctacgccttcgccgccaccttcgtctgctggtgcttctgggccttccgcatgtcgttcggcgaccgcctcctccccttcgtcggccgccccgacctcgccgcgctcgaccaggccttcctcacccagcagggcttcgccggcgcctacccggccgcgacgctcctcttcttccagttcgtcttcgccgccatcacgctcatcctcgccgccggctcgcttcttggccgcgtcaacttccgggcgtggatgctcttcgtgccgctctggctcaccttctcctataccatcggggcgttcagcctctggagccccaacgggttccttttcaaggccggcgttatggacttcgccggcggatacgtcatccacctttcctccggcatcgccggcttcaccgccgcctactgggtgggtccgaggacggccaaggacagggaggcgttcccgccgaacaacatcctcctgacgctcgccggcgcgggtctcgtgtggatgggttggacgggcttcaacggcggcgcgccgtacgccgccaacatcgacgcgtccctcgcggtcgtgaacacgcacctgtgcgcggccaccagcctcctggtctggctctgcctcgactgcctcgtgttcgggcgcccctccgtcatcggcgccgtccagggcatgatcaccggcctggtgtgcatcacccccgccgcggggctggtgcagggctgggccgcgatgctcatgggcgtcgcctccgggagcgtgccgtggtgcaccatgatggtgctgcacaagcgcagccggttcctgaagcgcgtcgacgacacgcttgccgtgctccacacgcacggcgtggcgggcagcctcggcggcgtcctcacgggggtcctcgcggagccgcggctcagccgcctcttcttcggcgacgacccccggtacgtgggcctcgtgtacgccgtcaaggacggccgcactgccgcggggctccggcaggtgggcatgcagctggccgggatcgccttcgtcgcggcgctcaacgtcgccgtgacgagcgcggtgtgcctggtcgtcgggctgctcgtgccgctacggctcagcgaggagcagctggccgccggagacgacgccatccacggggaggacgcgtacgcggtgtggggcgacggcgagacgtacgagcagtctgtgcacggaaaccattcgtatcccatgacgtccaatcccatgtccaaagccgacgagatgatatga

SEQ ID NO: 129838 - DNA, 1424 bp, Zea Mays
ttttcgttattaattttcactcggccaccgaggcagcgaacggctcaagaaaagaaaagtagcggcagcaacccgcggcggcgacgagtaaccaaccaggccacgccattgccaatcgcccgagccgccgagcaccaaggagccctgccttgcccagccacagagccctcctccttccccgtctcccgctgcgggctctctgaattcggcggtggttcatttgtccgcttcttctgagctccttctcggcgccgcgctatggaggagatgggaaagcgggcggtgcggacggtgcgggtgcggaacatctcagatctggcgacggagcgggaggtgcgcgagttcttctccttttctggcgaaatcgagcacgtcgacatcagatttgatacagtgtcgtcggggaggacggcctacgtcacattcaaagatcccaaggcgctcgagattgcgcttctcctgtcgggagcaacaattgtggaccaaattgtgaacataacccctgctgaagattacatctacatccctgttactgaacaacaacttatggtccatgaggtgacaagtagaagttcagcttctaatgcagaattggagtactcctcagaggccaatgtcagtcccaatagccgtgtctatgtgagcaaggcccatgatgtcatgacaaatgtgattgcaaagggttcagcaatgagacaagacgcagtgaacaaggctaaagcatttgatgagaaacatcaatttagggctaatgcatcagcgaggatcaattcctttgataaacgtgttggcctttcggagaagataaacaatgggatatccgttgtcaatgaaagggtgaaatcagtagaccaaagattgcatgtttctgataaaacaatggctgcattgctggctgcagagcgcaagctaaatgatacaggctctgctgtgaaaaccaacaggtatgtgtctgctggaacaagctggctgaatggtgcttttagcaaggtcgccaaggctggtcatgttgctggctcaagaaccagggagaagttccagttggctgtgtcaaatctaacagccaaaggccctgctgttgttgcctgagggggatgctggttatggaagctctctttctgaggaaattctattggaagtccctgtgcaaaagcatttcctttgattgtgtggacagtgtggaaaataactgtgtttcagtgttatcttgtctgtctttccttagttgcaggctgttcggtgattcttttgaggtttggtgtatagatgcgttcagtttttggtattttagaaccccattcttttagtgttgaagttaaattgattataggtgatagtggcattctattgtattgactcaatctatgtggattcttgatcgttgacgcctatgcttcaccgcttctcccaaaactgttgctcca

SEQ ID NO: 129839 - DNA, 688 bp, Zea Mays
ttttcgttattaattttcactcggccaccgaggcagcgaacggctcaagaaaagaaaagtagcggcagcaacccgcggcggcgacgagtaaccaaccaggccacgccattgccaatcgcccgagccgccgagcaccaaggagccctgccttgcccagccacagagccctcctccttccccgtctcccgctgcgggctctctgaattcggcggtggttcatttgtccgcttcttctgagctccttctcggcgccgcgctatggaggagatgggaaagcgggcggtgcggacggtgcgggtgcggaacatctcagatctggcgacggagcgggaggtgcgcgagttcttctccttttctggcgaaatcgagcacgtcgacatcagatttgatacagtgtcgtcggggaggacggcctacgtcacattcaaagatcccaaggcgctcgagattgcgcttctcctgtcggtatggctttgcgcttgcgcatcaattggtctgacatgttgaggggatttttttctgtttatttcgttctggtgtttgtagaattcgtattctattctgaatgtattttctgggccactgtcattatgtctgttacgcttggggttatgcagcatgcaggtgctataagagcatctctaaaagactctttattttttctctctatttgactctttatttgtct

SEQ ID NO: 129840 - DNA, 2149 bp, Zea Mays
gagccgactcctgctcctattatccgcctcgctcctcagggcggagaggaggcaaagaggaaggaagcgccgcgggagcgccagacagacagacgaaccgagcaccaccgccactagaaaaagccagcccaaaaccctagctccggcgcgccaccgcgcagatccagtgctcccgcgcgatgtcggaggcggaagcggcggggtcgttgtcgaggcggcgaatggaggacgaggagggggcggcggcgatggaggcggatgcggcgcacagcgggaggggcgaggcggaggatgaggaggtcgagagcagcgactacacgtcggaggacgagggcaccgaggactaccgtcgtggtggataccatgccgtccgcgtgggagactccttcaagcagggcgcctacgttgtgcagtacaagctcggatggggccacttctccaccgtatggcttgcctgggacacagtccactccagatatgtggcgctgaaggtgcagaagagcgctcaacactacacagaagcagccatggatgaggtcaagatcttgaagcagattgctgatggtgatcctgacgactcaaaatgtgttgttaagcttcttgatcacttcaagcactcggggcctaatggtaaccatgtgtgcatggtttttgagtttctcggtgataacctgttgaccctgataaagtacacggactatcgtggaattccccttccgatggttaaggagatatgccgccatgtgctcattggccttgattacctccaccgtacactttctattattcacactgaccttaaaccagagaacatattgcttgtgtctaccattgatcccacaaaggaccctcggaaatcaggcgtacccctagttccgccttcaatgaggacagacgagccacctcctaaggtgcctgcacaatcaggaaatggtggcctcaccaagaaccagaagaagaagatccggaagaaagctaaacgtgcagttgctgcaacttcagaaggaagtagtgctgtggcatctgcggacacagatgggtcagatgaccgaggagatctgggtacaacaaatgagggtagtcctagacaggatggagctaagaagcgggtgacacgagataggcgcggtagcaaaggggccaagaagatgatggcaatgaaggctgatctaaaatgcaagctggttgactttggaaacgcatgttggacatacaagcagttcacaaacgacattcaaacaaggcagtacagatgtcctgaggttatacttggttccaagtattctacatctgctgacatgtggtcctttgcatgcatttgctttgagcttgccactggggatgtgctattcgatccacatagtggcgataattttgacagagatgaggatcacctcgcgctgatgatggagctgctaggaatgatgcctcgaaagattgcgttgggtggtcggtattcacgtgatttcttcaatcggtatggggatttgcggcacatccgacgcttgcggttctggcctctcaacaaggtgctgatggagaagtacgagttcactgaaataaatgctaatgggatggcagattttcttgtcccaatacttgattttgttcctgagaagcgccctacagctgctcaattgcttcagcatccatggcttgatgttggtcccctccgacagcaacctaaaacacggccagagtcagcacggagtccaggtgatggtgtttcagagaagcaaaagaaagagaaagaagaaagagaggcaatggccgtagagttagggaacattgccatagatggtgcttcttccaggatggcaaatgacccccaatcaagcacaaataaaacaaccgctacctcttctaagaagtgagctgcatttgatttcatgagttaagctgtaaaacttgttttcattcgagaattgctccatgagtgggaaacatatgtttttttttaggtttgagatatgttaggatagctaccgagggaaaagaacagtaggctaaatatttgttgtatggggttgggtggacaaggttagatttgtcggggttgcagtaaccctagcccttttctttgagaacatattcttttgtacaattagaatccgcgatttgtttaatggtagcattgagcaactggaaa

SEQ ID NO: 129841 - DNA, 685 bp, Zea Mays
atgccacaggttgtaggttctgcttcaacattgaagcaagataaacactggaacatccttgttgagagtgccaaggagcgaaactgcttattcaaggtccccaagccattcaccgcattctttgcagagggtaacccgaagactatgaaggtggaaaggcatcgtctgccagagccgaatgctcgagtgctagaagagatcaaccaagaagttgtaaggcaagagaccatgaatgtcgatgatgccgccgaccatgcagacgtaggggacgacgacgatgatggtatggatgccgatgatggaggcgacgatgattgattgtaagattcaaaggcttgggtggcctgggaaagcggttacctagactactaatataaaagaggagttggttttcttgggtagacgtagcagttacttaggattgaaagataaaaaatggaagcgatgattcttttctcttatctaattacggggagaagcgaccatcgcagagcgtatatgggtgacaatgagctctaaattgtacactataagatttaaagttcagattaggatcagttcctatttctatttattttttaaattgaagtttatttaggaccctatcattttgtgaagaattatttgtaccgcgatgtattaccacccctaattattttttgtgaaactgcagaggtgacaaata

SEQ ID NO: 129842 - DNA, 4396 bp, Zea Mays
  misc_feature (3406)..(3413): n is a, c, g, or t
gtgcaggggactccggtgaacatcatcgtcggctcgcacgtgtggctggaggaccccggcgaggcgtgggtcgacggcgtcgtcaccgagatcaaaggcggcgacgccaccatcgccaccaccaacggcaaaacggtcgtggcgagccttggcagcgtataccccaaggacacggaggcgccgccggcaggagtggacgacatgaccaagctagcctacctccacgagccgggcgtcctgcacaacctctcctgccggtacggcctcaacgagatatacacgtacaccgggaacatcttgatcgcggtgaaccccttccagaggctgccgcatctgtacgacgtgcacatgatggagcagtacaagggcgccagcttcggggagctcagccctcatctcttcgccatcgcggacgcctgctacagggcgctcatcaatgaccaggcgagccaagcgatcctggtgagcggcgagagtggcgctggcaagacggagaccaccaagatgctcatgaggtacctcgcattcatgggaggacggtccggcaccgagggacgcaccgttgagcagcaggttctagagtctaacccggtacttgaagcatttggtaacgccaagacagtgaagaacaacaactcaagtcgattcggcaagttcgtggagatccagttcgacaagcatggcaagatatccggggctgccgttcgcacgtatctcctcgagcgatcgcgagtgtgtcaggtctccgatcctgagaggaactaccactgcttctacatgctctgctccgcgccccccgaggacgtgaagaggttcaaggtgggagacccaaggtcgttccattacctgaaccagacgaactgctatgaggtggccaacgtggacgacgcgagagagtacatagaaactagaaacgctatggatatcgttggcatcgatcaagaggaacaggacgcgatcttcagagtagtagcggcgatcctccacctaggaaacatcaacttttccaaagggcaggagatcgactcgtccaagctgagagacgataaatcggtccatcaccttaaaacagttgcggaactgctaatgtgtgacgagaaggccctcgaagactccctctgccagcgtgttattgttacgcctgatgggaacatcacgaagccccttgatccaggctctgcggcgttaagccgtgatgccttggcaaagacagtgtattcacgactgtttgactggatcgtagacaagatcaataactcgattggccaggatccagatgcgaccaatataataggcgtgcttgatatctatggatttgagagcttcaagatcaacagtttcgagcaattatgcatcaatttgacaaacgagaagctgcagcagcacttcaatcagcatgtgtttaagatggagcaagaagaatacacaagggaggaaatagactggagctatgttgaatttgtagacaatcaggatgtgctggacctgattgaaaagaaacctggaggaataattgcactcctggatgaggcatgcatgtttccaaagtctacacatgagacatttgctcaaaagatgtaccaaacgtataaggtccataagcgcttcagcaagcccaagctagctcggacagcctttacgatcaaccattatgcaggggatgtgacgtatcaagcggatcagttccttgataagaacaaagactatgtggtagccgaacaccaggccctactaaattcttcaaggtgcccttttgttgcaaacctcttccctccattacctgaggaaacctctaaacagtccaaattctcttcaattggtactcgctttaagcaacaactgcaatccctcatggaaacactgaatactacagaacctcactacatcagatgtgtcaagcctaatgctgtactcaaacccggcattttcgagaactacaacgtcttgaatcagttgagatgtgggggtgtcctggaagcaattcggatcagctgtgctggttatccaacgaagaggacatttgatgagttcattgatcggtttggaatgcttgcaccggagcttgtcgacagcagcgatgagaaggccgcctgtgcagcgatatgtgatagaatgggtttgaaaggatatcagatagggaaaactaaggtattcctaagagctggtcagatggcagagctggatgctcgaagagcagaaattttggctaatgctgcgcgactaatccaaaggcgtattaagacacatcttatgcgaaaggaattcatcaaattaagaaaagcctcagttcaatctcagaagttctggagagcacgactagctaaaaagatttttgagtatatgaggagagacgctgcttcaattaggatacaaaagcacgtgcgtgcgcattctgccagaaaagcgtacctgcaagtatatgaatcagctacagcaatacaaacaggattacgagcaatggcagctcgcaacgaacacagattccgaagagagaccagggcatccataattatccagactcggtggcgccaacacagagcttatactgcttacaaacagcaacagaaagcttctttgattctccaatgcttgtggagggcacgcattgcaagaaaggaacttcggaaactgagaatggaagcaagagagaccggcgcactgaaagaagcaaaagacaagctagaaaagagagtagaagaactcacatggcggttagacgtcgagaagcgtttgagggctgaccttgaagaagcaaagagccatgaaattgaaaagttgcaatctgcactacaaaaaatgcaagaaaatctcgaggaagcccatgcagcaatagtaaatgagaaagaggctgcaaagttagcgattgaacaggcaccaccaaagatagtagaagtgccggttattgacaatgcgaaacttgaggagttgacaactcaaaataaagaacttgaggatgaactaagtacgtttaaacagaaggctgaggatcttgaaaataagcttattgagttccaaaaacagtctgatgaactgtcacaagagacacaagaacaagcatccaaagttactgaacttcaagagctggtcgaaaggcttgaagcaagtttatccaatatggaatctgaatacccttttctacgacacatactcatgtcctatgagaaagtctcataaactaaaaataataatacatttagcttggaaagcaagatcgccaccttggagtcagagatagagttgctccacagcaattctgcactagctattcaggccgtggttactcctgaaatgaatcagacaacagtaatcgaggaatttgacaagggacaccagcttgaagaagtaaaacggtcaatgtatttgctattatttttacctggcaaacatttatacagtttaagataannnnnnnngcttccacaggaaaaccacgacgccctgattaaaagtatggtagaagacaggagatttgacgacaaaaaatccgctgcagcatgcattgtctacaaatcactcctacactggcattcatttgaagcggagaagactaacatatttgatcgaatcatccaaataattaggtcatcagttgagggagcagaaagttctggagagctagcctattggttgtcgacaacatcaactctcctctacttgttacaaaacactctcaaagctagcagttcattaagtaaaggaacaaatcgcagccggaccacaacaggcagtctgttcagtagaatggtgcagagtgcccggacatcatcaggcttaggcatagctagtggatacagtggaatggtgggaaggcctgacactgatgcatcgatggtagaggcaaaatatccagcacttcggttcaagcaacacttgacagcatatgtcgagaagatatacgggataatcagagataacctgaagaaggaaataagtccgttcttgacaatgtgcatacaggctccaagagctaaccgtgtgaggccatcacggggatcactaaaaagcatacactctaatgcactagctaggcaagcatcaagtctgcattggcaaaacattgtcaagtgcctggatcatacactggaaacgatgaaaaaaaactatgtagctccggtgataatcaggaaaacatttaaccaagtatttgcatacttgaatgtgcaactcttcaacagcttactgcttcgtcgggaatgctgctcttttagcaatggggagttcttaaaggctggtttacaagacctggagcagtggtgctctaggacaactgaagagtatgtagggacgtcctgggatgaactgcaacacattaggcaggcagtcgggttcctggtatgcatgaaaaacatgcagttattttaactgatatactagtttgatctgtctacttattaga

SEQ ID NO: 129843 - DNA, 4671 bp, Zea Mays
atgcccgacaacactgggcttgaaattggccttaaaggctccaagggagccccaatgccaggaacggaaggaagagtggcaaaggatttgaagaaagctcctgcctccttggaggaaagcaatgcttctcgtgatgaggatcctggcggagggcctgccttgactgggaagaaaaggaaggaccggaggggttccgcggatgacaacaggaatgtgacaagaagggtgttgaggtccgacgccatgaagctgcgtgctgaggctgaggcaccatgtggagcgggtgtggaggttagcaaaactgatagtttggagaggaaacactgtgacactactgtggaggctgaggcttgcaaaagtagtgtgctgatggaagttgcctgcaatggtggggaagccaacggattagttaacttggatgcgagcgatgtttcggaagaatcaactaggtgttctgataataatatgggaatgcctggtgttcctgcaacagatttttctcaagatggtggcttagctcaaggtagcattgcagaatcagatgataagacagtcaagtcagatgaggtgtccgctgtaactcattcagagcagaatgactcccaagctggaataaacagttataatgctgatgaggcccaagataacaaagtgagacatgggccttgtcaggatgaggtcatagactcagcaattactaatggtgccaacacaagtacagatttaaccaaaaccagccctaccagtggatcagaatctgttaagcaggatgatagtaagcaggagaataatttggttcatactgaaggagtgatactccacagtggtgatccgaaagttgagaatcattctcaaattgaggacacttgtacagaaactgagatttctttgactgggaatggaagatgtgcagctgataaccacactgatcgaactgggtacactaagcaggaggagaggggcagccctgtgaacgaaaccaatgatatttcggcacatgacattgtttttacaaggagaggtagaaaatcatgtgaggcaaagcaggggacatgtgaagaggagtcacggtttgagaagcgagttacgagatcagctacagttagacagagagaagtttctggaagcttatgcaaaactaccacgaatgagactgcactaggaagcagagggaggaagggagatattattgctcactatacaaggaaagtgagcagtgcagtatctccaaaaggtcaccatgctgagctgggagaatgtaataccagtatggagaatcaaacagtgaaacaaaaggtggttgatcgaagagattcaggtgccactaagaatgataatgatgcgaatgacacaaagaataaggaatcagaaaagacagagatcaatctgaagacgcaaccacctgttggaagtgttagcattgtaaataaaacaactgtaggagctgtttctgtggtgggtcagagtatctctggttcagccatcactgagagaaatgatacagatcatactgattctgatggagttaaatatgaaaatatgactcttgtgcagaaactactactgtctgttggcgcgaagattgttgccagcaagaagagggtattggaagcaggtcctgataaaaccactggaaggtcaccaattgctttgccatccatgaaaaagacaagaaatacgtcttctgatcctgagatagatcaacctgataagtcttctggagagaagcttattggaaataactgtgatttgggcaataaacgtgttttgagggaacggcagcatcagaatcaaacatatttgtcaagcaggtcttctaaccagtctaatcaaaatgctatcaagcagacacaggatcaatctgacgatgatgacatcagcagcgatacttcctacaggagaactcgtagcggacgtcgtcgtggtgctgcccgtcttgccgtgccaaaacaagaggactccagtgattctgaagaagttgttgttgtgaaaaagaatcgacggaaacgtaagaaatctgtgcataaacacagggctggatctaagttgaagcatacttctggtagtcctcccaaaacaggtcgtttgggtagacctccacttgtcaaatctgaatgtggctgcttacctctgcagccaggaaaagggaaaatgaatgtgcctgaaggtacaggagctctacgcgaagaaaaacaaaaaataagtgatcagataaaggccatgcttctagatgctggttggacaattgatttaagacccaggaatggtagaaactacatggattccgtgtatatacatcctagtggcaaagggtcttactggtcagttacaaaagcatattacgtgttccgtgcagatatggaatctgagcagaaggaaagttctaaagaccatattctgtcaaaaaaatctgttggtagccccggcaaaaggcaggtctctagttcttcaggctgtactttaacagatgatatccttagcaaattaaaaagagttgttgtaaacaaacgaacaaccaaagtagagattcaaaggttgagacagaagaaggaaaagaagaatactacaaattcaacaagattgcatttaggcaatgaaagaaaaaagagaggtggctgtgctctactcgttcgtggatcgaacaaggagtctggcagcaccactgatggttttgttccatatgaatggaaacgtacgatcttctcctggctgattgatctgaatgttctatcagtcaatactaagctgaactgtttggatgaaagccactcaaaggttttactagagggttttgtcactagggatgggattaactgcagctgctgtagcgaggtcatttcagtgccagaatttgtgactcatgctggttctgaagtaaataagccatacagaaacatacttgtggatgggctagacattgaccttttgcactgtctcattaatgcatggaatatgcagtctgatgctgaaagacaagatttctttcccgttagcattgagggagatgaccccaatgatgacacctgtggtatttgtggagatggaggcaatttgatctgttgtgatggatgcccctcgacatttcacatgagttgtctaggactggaggcacttcccactgattattggtgttgttccaactgctcatgtaaattttgccatgaacattctagtgatgatgctgaagacactgctgatgttgattcttcattgcatacttgttcccagtgcgaagagcagtgtactgaagcctgctctcctgatattgattccatagctactaatctttctagtcagacaggcaatttattctgccaacaaagctgcagactgctgtttgaggaattgcagaatcttctcgcagtcaagaaggatcttgaaccagaatactcatgcagagttgttcaacgcatccatgaagaggtaccagaagaagtccttgctttggacaaaagagttgagtgtaactccaagattgctgttgcactctcattaatggacgagtgcttccttccgattgttgaccagagaactggcatcaacttgatacgcaatgttgtgtataactgtggatcaaattttgcccgattggatttccgtggattctatataattattttagaacgtggagatgaaataatagctgcagcatctgtccgaatacatggaaccaagttagctgagatgccgttcattggtacccggaatatgtataggcgacaagggatgtgccgccgacttgttgatggaattgaaatgatcctcagctctctcaatattgagaagctgatcattcctgctatcacagaacttgtggacacctggacatctaaatttggatttagtccactggacgattctgagaagcaggaagtgaaatccgttagcatgttagtttttcctggtacaggtcttctccaaaagccattgctgaagacctcaccatcggaagatcaatgctcccaaggagacaaaactgaaaaatcatctgatgtagtcaatgaagattcgctttgctctggtgcaagtgccgaccccctaggttcggtggtcaaagagcatggggacaccagcaaagatgccgatggtacttgcaacggtgatgtttcacagcgatctcctctttcctgatggtaagatttggttgcagctttctgggcccccccaagctttatatggacgaaacctccgtttgtttttgtacctctcgagttttgactcagcagccagcatgacaaccatccgtttggcagaaagaggcttccggttttttgcagattagttgccggggcacccctgtagttgtactcagaatttgaccattgactcgtcggcctgggaaaagaatcagcccgtgcagtactgaaaagcgtttactccaaccaggaaccagctaacttactgtgcagctgaaaagtcagtatgcagaatgtggaggataatatcacttcttttgtttttttttggtcgttaacttagaactccgagggcgagtcgtcgtaaatgttacaccagttgttattttgttaatagctttttttttaaaaatgttttcgctagcgcattcctagaaccttctcatttctgtaagatagttctcgcctctgtaagataaactaatgtatgcgcaagctagaaatagtccgcctgatccgtcacgcggaattggtt

SEQ ID NO: 129844 - DNA, 563 bp, Zea Mays
ttgcagctttatgctgatgggggttaccagctgagaattaggcgtcttgagggtacccctaattatggtccccgacagggataaccagctaacaacatctctcacgggacctggttttgttttaatccagagtttgccattccatcgactctcacaatggattgccagtagatcagtggtgggtccaagtttgagggacaacccaaagttcttcatccaggttgtcatgttcttcttctcggcgtatgttatgattgtgtcatccataattctggcagatattcagatgatccagcaaacttttagtgtattcctagacaggttgtcgaagagttaaagctacctccccaaatgttaatgtagatgtaagagaaggaatttcacaaagaattgttagaaaccgtagccgaaagttcttcatattctttgggtagcagtttagacagagaccaggtttcttggttagggtgtaaagagtaagatagcaaaaccaagttgcacgcacatggcgaatatacagtaacttatcctcatccaaactagtgctctacgttttgaatagt

SEQ ID NO: 129845 - DNA, 1568 bp, Zea Mays
cacccgccgctctagtcccactccccgccgccgccgccacttgctcgcctttgccccttctgtctcccttcgtccgtagcagaccaggaacgcccaaggcgctagcgtctccaagatggtgcgctcactaatccgatacgctgattcacttcggttttgttggttgctcttcgatctaatgatattacgcattctttcttggaaatctgggcaggtgctgcaaaacgacattgacttactcaatccaccggcagagcttgagaagctaaagcacaagaagaagcggctagtccagtcccccaactccttcttcatggtattcctcttcatgcccttttctaattctgcgtggcgaggtgttgcaaatcgtgccgaaaagagacccaacgaatgtaccatttgaatttagtttttttgaaaaatgttgatttggtttggaagagagtattagaaactggattcagtatcaaaaactacataaaaaatagttgcaacaaagcacgttgagctagattctgcagggtatgtataattcatcaaccaagttgtgttcaagtagagctaaaatctgaaaacataaatgaattttgatattgtgtttattaacttgtattaatattaatatctgctcttatgcctgtttggagactgactctaatcatctacttttttcgtttttcttctccctttgtgtccaggatgtcaagtgccagggctgtttcagcataaccactgtgttcagccactcccagactgtggttgtgtgcccaggctgccaaactgttctgtgccaacctaccggtgggaaggccaggctcaccgaggggtgctccttccgtcgcaagggcgattaggtcctgcttctcttaacgtgagaagagataaatttggtgttttgcaactttctcaggatatgtactcggtgaggattttgttaattattatggctgttagcgtggcctgacaatgcttgtgtaaacctgcactttgtttgagcgtagtgacagctaatatggtgctgtttggcttttgctgagggagtggcaatgcaaatgaaatcaactggtggcgttatttgtcagggtttaactgaaagtgccatttgtttggttagcttggataatgctctttccatttaggtgatgtttggtttaaggatgtaaatggtcggtaaaattcggtaaatttctggtaccgtttaccagatttttccgaccgttttcagatttttcgggatatacggaaaacgggacggaaacaggatgtgttattacgaaaacggtacggtaaatggtgagacatatttaccgtccgttttcggaagttttgggaaaatccggtattttcccgtattttaaccgtattttcccggtcaaaagaaaacaagagaggcaagaactatacccgttagggtttagagattagggttttagatgtcatagaagatatatcaagtgatccagacgacatgccacatgatttttagtttatgtatcgtgtgtttaagacttatatactatgtggataaaactttagtgaacatgtatgattatttatgtgtggtcatg

SEQ ID NO: 129846 - DNA, 1090 bp, Zea Mays
cacccgccgctctagtcccactccccgccgccgccgccacttgctcgcctttgccccttctgtctcccttcgtccgtagcagaccaggaacgcccaaggcgctagcgtctccaagatggtgctgcaaaacgacattgacttactcaatccaccggcagagcttgagaagctaaagcacaagaagaagcggctagtccagtcccccaactccttcttcatggatgtcaagtgccagggctgtttcagcataaccactgtgttcagccactcccagactgtggttgtgtgcccaggctgccaaactgttctgtgccaacctaccggtgggaaggccaggctcaccgaggggtgctccttccgtcgcaagggcgattaggtcctgcttctcttaacgtgagaagagataaatttggtgttttgcaactttctcaggatatgtactcggtgaggattttgttaattattatggctgttagcgtggcctgacaatgcttgtgtaaacctgcactttgtttgagcgtagtgacagctaatatggtgctgtttggcttttgctgagggagtggcaatgcaaatgaaatcaactggtggcgttatttgtcagggtttaactgaaagtgccatttgtttggttagcttggataatgctctttccatttaggtgatgtttggtttaaggatgtaaatggtcggtaaaattcggtaaatttctggtaccgtttaccagatttttccgaccgttttcagatttttcgggatatacggaaaacgggacggaaacaggatgtgttattacgaaaacggtacggtaaatggtgagacatatttaccgtccgttttcggaagttttgggaaaatccggtattttcccgtattttaaccgtattttcccggtcaaaagaaaacaagagaggcaagaactatacccgttagggtttagagattagggttttagatgtcatagaagatatatcaagtgatccagacgacatgccacatgatttttagtttatgtatcgtgtgtttaagacttatatactatgtggataaaactttagtgaacatgtatgattatttatgtgtggtcatg

SEQ ID NO: 129847 - DNA, 1329 bp, Zea Mays
atgtcccacgccggggcctccatcggcggcggcggcggcgctgctcgcggccgcagccgcagcctcgggagcagcagcagagccggcaatggcaacggcgccggggcgttcgtgagggcgggggccgacggcaacgagatgtacgtgcgggcggacaagatcgacctcaagaccctggacgtgcagctggagaagacgcggtcgcaggtgtggctggaccaccagcggtcggcggcgtcgccgcggccggagacgccgctgctcgggtgggagatcgacctcctcggcaagctcgacatccagaaccagatcgcgcatggcaccttcggcgtcgtgtaccgcggcacctacgacggccacgacgtcgcagtgaaggttctggactgggggcatgatgggcaggacacggcggcgaagcaccgcgaggccttcgagaaggaggtcgccgtctggcagaagcttgaccaccccaacgtcactaagttcgtgggcgcgtcgatggggacgtcccagctgaagatccccaggaagcaggggtcgacgtcgacctcctcctcctcctcctcttgcggcggtcgcactgcgccgaacgagtgctgcgtcgtcgtggtagagttccagcacggcggcacgctgaagacgctgctgtacaaccaccgggacaagaagctttcctacaggaaggtcgtccggctcgcgctagatctcgccagaggtagcgcttcacgcaccagtatatatatggtcgctgatggcggcatggcgcgcgcgggtcgcgacgggatcatgcatgcatgcaattgcaggctgaactacctgcactcgaagaagatcatgcaccgcgacgtgaaggcggagaacatgctgctggaccgtaagcggacgctgaagatcgccgacttcggcgtggcgcgcgtggaggcgcagagctgcgaggtgacggggcagacgggcacgctgggctacatggcgccggaggtgctgcaggggaagccgtacgaccacaagtgcgacgtgtacagcttcggcatcctgctgtgggagacctactgctgcgccatggcctaccccaactacagcctcgccgacatctcctaccacgtcgtcaagctgggcatccggccggacattccgaggtgctgccctcggccgatggcggacatcatgacgcggtgctgggacgggaacccagacaatcggccggagatgtcggaggtggtggcgctgctggagaagatcgacaccggcagcggcaagggcggcatgacgcccgtcgacgacgtctcgcaggggtgcacctgcttcggcttcaaccgcagcgtcgcctag

SEQ ID NO: 129848 - DNA, 196 bp, Zea Mays
agtgtttgtcgtaacaaccgagtaccaatctgttatgcaactcattttagctatatggcgaagtacagctagcacatgctggcataacatccaaacgttaagatcattcgttaccgttattaagtcatttcccacattaataattcaatcacggttaataattgagattaatctataccctctattcttaacaaag

SEQ ID NO: 129849 - DNA, 1188 bp, Zea Mays
ccctacagccgacatgcaaggggagggggaggggtagggtcgaccgctgcgatcagtcttaaacacctacccgtccggccgacgagagagccattcaccgcaacaacacacaacggcagagaccaagaagccgtgaccgtgggagagctccgagcgccagccgcgtgcggcgtgtccatactccatacacgaagaggaacagtcgaacagaggaagagcaggaggagatgtacttccgtccgccgcccaagggcccagagtggtacgccagcgatgcggagacggggcaggcggcgcggccgctgtacccaatgatgctggaggacccgcgtctgcggtgggccttcatccggaaggtctacagcatcctctccatccagatgctgctcaccgtcgccgtcgctgccgtcgtcgtgtacgttcgccccgtcgcgctcttcttcgtctccacgcccggcgggttcgggctctacatcttcctcctcatcctcccgttcatagtgctttgccctctgtactactactaccagcaccacccggtgaacctgctgctgctcggcctcttcaccgtggccatcagcttcgccgtcggcctcacctgcgccttcaccaaaggggaggtgatcctcgagtcggcggtcctcacggcggcggtggtgctgagcctcacggcgtacacgttctgggcggcgaagcgcggccacgacttcagcttcctgggcccgttcctgttcgccgccgtcatgatcctcatgctgttcgcgctcatccagctcttcttcccgctcggccgcatctcgctcatgatatacgggggactggcggcgctcgtcttctgcggctacatcatctacgacaccgacaacctcatcaagcgctactcctacgacgagtacgtctgggccgccgtcgcgctctacctcgacgtcatcaacctcttcctctccctcctcacgctcttccgggcggcggattcgtgagcacggctacctgccagctcgcgtaggcgcggcgacaggatcttggaatgtgccttgccttgccccgcctccggtgctgtctgccgaaattcctctgtaaaaagactaaagagaaataattgttttggttttgtgctttgcttcgcttgcgaagattgttcaacgaaacaattttttttctgtgaaactaactgtcgtttttgggacc

SEQ ID NO: 129850 - DNA, 485 bp, Zea Mays
tctttcgccagattgtgctcattgggtatgtgcccaacatggatgtagaaagaaacagtttcaggtgctccatatgggttatggaagcagaacttatacatgccacctcttggagctttaaactcaaatttctcaccagattttcccttcaatgtgtacacagtgttgccacctggtgacggggatcggttgtgtaccgtgaggtcgattcctgggtggtcggagctccagaagatgtcgtggtcgacgacgacgaagttcccggacacggtgtcgccctcatagggcacgaactcgtggatgcactcggtgtcggtcaccgtaaccgatagcgcatccgcccgccacgccgccgatagaaccgccgccagagccactaccagcagcgccgccggccgccacctcgccatcgctaatctcctaataccaccgccctcagcgtggtatcagggatcgggatggcgacggaggtgatgcgtgttttt

SEQ ID NO: 129851 - DNA, 1661 bp, Zea Mays
caggaacgctacccttgttctatcctatccggctatccccattcggccactctccagtccgcggaagggtggcggacggcgaggaaagggtgcgaggtgagcgggaagacggcagcccggtcgattcgaggcgcggaagtgccactcggcgaggcacgaccgctggcagggctgacgcggtttccacagccgcccgcccgccttcatcagagtccataatccaagctctaaacaggttcgtccatgagcagataaggcgcgcgccacgccgcggccaccacacgtacgtaaggcgccaaccccatctccgggaaagtatgggggcgctacccgtcgcccacagtctcgctctcaccgccgcgttcctcccgtgccgccgccccgcggcccacggccggtgccggcgccggcggtacagagcggtggtggcgtacatggagccgaaccccaactcgccggcggccatcgcggggcgcctcgtcggcgcccttcccatcgtgggcctcgtggcgcgcatcctcaacgacgagggcggcgtcggcggcgacatcatcgacttcgccgagttccgccgccgcgtcagcaagaagtgcacggtcatggactccaaggccttctacgacttcaaccaacgacgcgggaagccaggcgatcccttctacgttctactgtgctgctggctggccgccatcggcgccgggctgctcaaaacggaggagatcttggaaggcgtggcgcgcctccgcatctccaacgacatcgagttcgaggaggagacgttcatcgacatgatgagggcggcaaaggagaaaagggcgaagctgaaggctcctgctccgcagataccgatggagacgcgggcggagaaggccctcgaagccatctacgtgtgctgcttcggtcaggacatggtggaggacgaggacgagaagcttctccgggcgatactgaacgccgtgttcccctccgtcgggcgggccgcggtcgagaggatggtggcgtccatggccaagcaggtggcctccggcgagaggaagcgggacgggaggaccgtgtccaaggaagtgcagcagcggcagctcaaggacctggagtttctgaagcagaacaagctggagtcgtcgtgaagcagcagcggcggcgagcagaaacttggcagcaaatcacgcggcgtggttcgccggcggctgcagcagccttgctttcggttcgttttggaacaacggattcatggtggaattttgtaggattattagaacagaactctatgtgaatttgtaaccctttggaagttggaacaaggaagtggccatactgaaatcctacatgccctttttggaaccgtggtatgctgaacactgggcttcataaaaatattatctccaacattgtaattagatttgtagtattataatcataattcataaccaccgcttctttgtatttttgttattctcgcaaggtttagccgtaattttaaaaaacctagttatggggttactctcgttccaaaaaaaaatagccgtaattttaaaaaacctagggttactttcgttccaaaaaaaaactccttatggaatgcctcatgccgtagaattctggcggagcaatccctatatttgctttcaaacactatattagaaagtttgccagtttcttaa

SEQ ID NO: 129852 - DNA, 852 bp, Zea Mays
gtggcggacggcgaggaaagggtgcgaggtgagcgggaagacggcagcccggtcgattcgaggcgcggaagtgccactcggcgaggcacgaccgctggcagggctgacgcggtttccacagccgcccgcccgccttcatcagagtccataatccaagctctaaacaggttcgtccatgagcagataaggcgcgcgccacgccgcggccaccacacgtacgtaaggcgccaaccccatctccgggaaagtatgggggcgctacccgtcgcccacagtctcgctctcaccgccgcgttcctcccgtgccgccgccccgcggcccacggccggtgccggcgccggcggtacagagcggtggtggcgtacatggagccgaaccccaactcgccggcggccatcgcggggcgcctcgtcggcgcccttcccatcgtgggcctcgtggcgcgcatcctcaacgacgagggcggcgtcggcggcgacatcatcgacttcgccgagttccgccgccgcgtcagcaagaagtgcacggtcatggactccaaggccttctacgacttcaaccaacgacgcgggaagccaggcgatcccttctacgttctactgtgctgctggctggccgccatcggcgccgggctgctcaaaacggaggagatcttggaaggcgtggcgcgcctccgcatctccaacgacatcgagttcgaggaggagacgttcatcgacatgatgagggcggcaaaggaggtaataacgtgacgataacatcatcctgctgtactgtatctgcaccgcaacggcatgcgctagaaccagaggagatgagctgtgtgtgtgtttgtgtgtgatgattggtgc

SEQ ID NO: 129853 - DNA, 882 bp, Zea Mays
gtgagggcttcttccgccgcacccgccgtcttatccgaactcctcgacccgattggcgcgattcgccgtttgttttcccgaatcggcgacgggatccgcccgattcggccgtcgatctgcgctgattcggcccgcgcgccgtcggggttcgctttcttctgcgcagggtctcgaatttcctaggagcggaggcgatggctgggaagggaggaaaaggattgctcgccgcgaagacgacggcggccaagtcggcggagaaggacaaggggaagaaggcccccatctcacggtcctcccgcgcgggcctccagtttcctgttggacgaatccaccgtcagctgaagcaaaggactcaggcaaatggccgcgttggtgccactgcagccgtctactccgccgccatcctggagtacttaactgccgaggttctggagctggctgggaacgctagcaaggatctgaaggtgaagcgtatcacccctcgccacctacagttggccattcgcggagacgaggagctggataccctcatcaagggcaccatcgcaggtggaggcgtcatcccgcacatccacaagtccctgatcaacaagtcctccaaggagtgaagactagggaatgcacattgttagtttaaactggacatttctgtgtgctcctctggagtccttgtcgtcgtgtaggttttagttgagctgtcaggttggagtgacccttctcctgtgtaacgcttgcctggtactgcttcagttatttggacactgtgtttgtgttgagttgttaacttcaagggtgcaaacctggataattatttagttattatatgactatctggtattcggtttatgctgttgggcagtggccagttggggctcaggtttg

SEQ ID NO: 129854 - DNA, 900 bp, Zea Mays
gcacacccaactacaatctctgacagaacagtccaaacccccgaactgctacgtctcgctgaaaatatctgcgtacctagaggtgtcggataggattctccgcctataataagtcggctgccaagcgggaaaaaaatctctgtttgtggcgtgcggaaggagtcggagggaaccgaaaactcagggtctcgaatttcctaggagcggaggcgatggctgggaagggaggaaaaggattgctcgccgcgaagacgacggcggccaagtcggcggagaaggacaaggggaagaaggcccccatctcacggtcctcccgcgcgggcctccagtttcctgttggacgaatccaccgtcagctgaagcaaaggactcaggcaaatggccgcgttggtgccactgcagccgtctactccgccgccatcctggagtacttaactgccgaggttctggagctggctgggaacgctagcaaggatctgaaggtgaagcgtatcacccctcgccacctacagttggccattcgcggagacgaggagctggataccctcatcaagggcaccatcgcaggtggaggcgtcatcccgcacatccacaagtccctgatcaacaagtcctccaaggagtgaagactagggaatgcacattgttagtttaaactggacatttctgtgtgctcctctggagtccttgtcgtcgtgtaggttttagttgagctgtcaggttggagtgacccttctcctgtgtaacgcttgcctggtactgcttcagttatttggacactgtgtttgtgttgagttgttaacttcaagggtgcaaacctggataattatttagttattatatgactatctggtattcggtttatgctgttgggcagtggccagttggggctcaggtttg

SEQ ID NO: 129855 - DNA, 2002 bp, Zea Mays
cgctagactgctgcagtcgaaccgtgacgcggtgagtccactgcctcctcttctcgtcgtcgacgagccaaaccgcgtcgtggcaagcccgtcgccgcttcctcccgtcgtctacgagccgtaccgcgacgaggccatggcaggagccgacgccagggcgcactactgcgggtacctgccctgtgagagaggaggcctcgccacggcgtggcaaccgggcggcctcttcgacagaggcgtctactccgacgagcagcgcttcgaggagcccatcagcgccgacaactgtggggccgatgcaaggcaagaagtcgcgctcgcggcgcgcgtgcttgccgccgacacgtgcgcagccgggatcctcgacggcgccgcgcccttcgccgccaccagcgagaagcacatggcacctgtggcatcaccttcgccgtcctcattcctgaccacaacaacagcggctcgagttgcagtcgtggagaccaccaccagcaactcgccacccaagtgttcggcaaaatgcttgaacgtctcatcgacgcccaatctggcgttgggcgacccagaggagccggagaatatcgtcgcgtcggagcccatcgtggacaagccggtgactagcgccaacaccaagactttcccgcacgagatcaaggagctggcagtcaacgtctacgacaaggggctgaggctcgagatctattctaaggtcgggttccagacctgcgccaaggcccattccgggtcccttggtcacgaggagcaggacgccaagaccttcgcggcatggggagtggattatctagcagacccggtgtcctactccgaggagtacgggctcttgttcgacatctaccactcgaccagcaccgaggacagaattcttaccaccatgccaacctcgacatccacgctgctccactcgtcattgacatatgcacttccaggtgcttcccttccaaaccttgccttgctgagctcgatgtctctggagcatgccagcttgtgtgcacatcacgtgttggaggaattgtcaacacgcattgatgacctcttcagcaatagaatcggctccatgtccacactcatggcctacggtagtgagcttcgtgtagtccgagctgacaagtcaagacgaagccctgttggtaagataagagagctcaatgaagacataattgttcccgaatactattacgctggtggagataaactccaatcacttaatgcttggtttggtccagaggggaatattcagagaatagttgaactccaatcacttaatctaaacagtagaccatccttgtcattggtggtttcgctggagactaagagagcgatagagccgaagccgagacaaacgtcgcgatgccgtggaattggctgcatccagtctagagatgtcaatggggaccagatacccgctaatccatggggaattcccctattaaggtacgggtatgggacaaaaattatccatatgggtatagatatgggacaaaatctctacccattggataaacaggagcctaggacgacggtgacgaccatggattctcaggcgccaacgaactcggatgacgaaggaaggagagagaggggggagagaaggcaccattcgtgggatgtgttcgctgagatgtgttccctggccgcaattcgtgggatgtcccaccctcaccgggcgctggccgagcaccacgacgccaggtccagggcctccaccaccaccacatcgtcctcgtcctcctccgcccgccgcgacgacgaccccgacccgccgccgaggtcgctcagggacccgccctacacgctgggccccaagatcttcgactgggacgagcagcgcaccgtctggcaccgccgccacctggagacgccgcccttcctcaacgacatcaagccacgggttcttgacaaataccagcttcatgaagctgtccaggagaaagaacgaggagtagactcgcttggtaggactccttgctacaaagacacacactga

SEQ ID NO: 129856 - DNA, 1435 bp, Zea Mays
atgcgacgattgaaatagtgacatcaaaggaggtgaagatttgtggcgcccttggtccctgcatttcccttcgcaggaaaaatagctccgttagtgataaggaaattggtgaagttcatgacaaggtaccgagctggtgatggtagttatcgcctaagggtaacgaccgttgcaagaaggtgggctgctcctcgatctcctgaaattgctgcagggtttgatcaggaagctgctgcagctgttatggccaggcttgctgtttacagggcagagacgtaccatgttagagatgttatacgatggcttgacaagatgcttatccgcttcactgctaagtttggaaactatgtttctgaagatccatctacatttcggctgtcaacaaacttctccttgtatccacagttcatgtactacttgcggagatcacagttcattgatgttttcaacagctctcctgatgaaactgctttcttcaggttgatgctgaatagggagggagttgtggggtctctaatcatgatccagcctactctattccagtactcatttgatggaccacctattcctgtgctgttagatgtcagctccatctctcctgatgtcattttactatttgattcatacttctatatcgtgattcattatggctcaaagattgctcaatggaggaagcttggctatcacaaggacccaaaccacgaaaatttgcggaagctccttgaagcaccagaagtagatgcagaggcactattggtagaccgtttccctgtgccaaaactcataaagtgtgaccagcatggtagtcaggccaggttcctgctcgctcgcttgaatccatctgtgacacagaaaacacagctttcagagggatctgaagtcattttcaccgacgatgttagtttgcaagtgtttattgaacacttgcaggagttggctgttcagggctagaaagtcatggagcttcaccatgtctctgctatttggtccacttgagatcctgaagatatggctttgagagggaccagacttcatatttgcagatgaagtttacttgcaagtttttattgaacacttgcagtaattggttgtgcaggattaacatgttcatgtggattatttatatgcaattttctgctcacatgcaaatactggggagctctactgcctggaggagtgagatctccctgagttgtacattgctcaagctccagtttgatgtaagccaattacattttactagttctgtatatcatgtggtattatccactgggaatgctggattttctccacaaatgattgttgtgcattccatccagttttggctgtatggtaaccaatatgggggatactttctgttttgtagactcattagtttgtatgcccctttacgcacaaaacaaagagataatgtagcctttctctgattctcacc

SEQ ID NO: 129857 - DNA, 2889 bp, Zea Mays
agaaagaatggaatccaccaagctttattttttttaaaaaaaagaaccctcaaagggaaaaaggctgcacactggaagacgaaggcaaaccctagtcgctactccaccgcggcgccaaccacctcgatcgggctccgattccgatggacttcgcggagctggaggccgtggagggcctccggtggccgtggcactcgtggccgccgactgctcccgccgccgcgtccctcgtcgtgcccacggccgtcctctgctcgccgctgcagcaccccacggcgcccgacctcctcccgctgctcccctacgcgccgctccgctgcgcctccccgggttgcggcgccgcgctcaacccgttctcgcgcgtgcaccacggctccgcgcgctggtcctgccccttctgcggcgccaccggcaacccgttcccgcgcctcctggcccccgacgcgctccccgccgagctcttccccacccactccagcgtcgagtactcgctgcctccggaccccgccgaggccgggggcccggggccacctgcgctcgtgttcgtgatcgatgcggccacggcggccgaggagctcgccgtgctgaaggacgaggtacgcagggtcgtgcaagggctgcccgaggggatcagggtggcgctcgtcactttcgctgcgtccgtatgggtgcacgatcttggatttgagggttgcgctcgagtggttgtgctcaacggcgagcgtgagctcgagtctgacaagatacaaaaacttctaggtgttcaccgttcaccatacaagaagttggctatgccaaggtccactgaagcacagcgatttttgctgcctgtttctgaatgtgaatttaacatcacatctgcaatagaggacctgagctccatgtctgcatgtccacgtgggcaccgccctttaagggcaactggcgcagcgatttctactgctattgctcttctagagggttgctgctcacccagtactggtggtcggattatggtctttacatctggtcctgcaacagttggtccagggtgtgttgtggaaactgatcttgggaaagcaattcgttctcatcgtgacatattcaatagcaacgcacctttgactgacaaagcacgtgatttctataagaaagttgcaaagaggttgacagatcatgcattagttcttgatctgtttgcttgctcccttgatcaggttggggccgcagagctgaggaatccaattgaagtgtcagggggtttaatggtgcatacagaatcatttgagtctgagcagttcaaaagctgttttaggcatatgttcaagcgtgaaggcgccaataaccttaatatgaacttcaatgcgacgattgaaatagtgacatcaaaggaggtgaagatttgtggcgcccttggtccctgcatttcccttcgcaggaaaaatagctccgttagtgataaggaaattggtgaaggtgggacaaattattggaaaactagttcactgagcagcaagaccaacattgctttctttttccgagttgattgcagtcgtaaagctgagcccccaactgtcttctttattcagttcatgacaaggtaccgagctggtgatggtagttatcgcctaagggtaacgaccgttgcaagaaggtgggctgctcctcgatctcctgaaattgctgcagggtttgatcaggaagctgctgcagctgttatggccaggcttgctgtttacagggcagagacgtaccatgttagagatgttatacgatggcttgacaagatgcttatccgcttcactgctaagtttggaaactatgtttctgaagatccatctacatttcggctgtcaacaaacttctccttgtatccacagttcatgtactacttgcggagatcacagttcattgatgttttcaacagctctcctgatgaaactgctttcttcaggttgatgctgaatagggagggagttgtggggtctctaatcatgatccagcctactctattccagtactcatttgatggaccacctattcctgtgctgttagatgtcagctccatctctcctgatgtcattttactatttgattcatacttctatatcgtgattcattatggctcaaagattgctcaatggaggaagcttggctatcacaaggacccaaaccacgaaaatttgcggaagctccttgaagcaccagaagtagatgcagaggcactattggtagaccgtttccctgtgccaaaactcataaagtgtgaccagcatggtagtcaggccaggttcctgctcgctcgcttgaatccatctgtgacacagaaaacacagctttcagagggatctgaagtcattttcaccgacgatgttagtttgcaagtgtttattgaacacttgcaggagttggctgttcagggctagaaagtcatggagcttcaccatgtctctgctatttggtccacttgagatcctgaagatatggctttgagagggaccagacttcatatttgcagatgaagtttacttgcaagtttttattgaacacttgcagtaattggttgtgcaggattaacatgttcatgtggattatttatatgcaattttctgctcacatgcaaatactggggagctctactgcctggaggagtgagatctccctgagttgtacattgctcaagctccagtttgatgtaagccaattacattttactagttctgtatatcatgtggtattatccactgggaatgctggattttctccacaaatgattgttgtgcattccatccagttttggctgtatggtaaccaatatgggggatactttctgttttgtagactcattagtttgtatgcccctttacgcacaaaacaaagagataatgtagcctttctctgattctcacc

SEQ ID NO: 129858 - DNA, 442 bp, Zea Mays
gggccggtacaatttgattgatcaagcagcatctaaaatgtttgaagagggatcagttgacgacagcgattcttatcttcatgctgtgagggatatccacatgtgcttgggatattcttttgactaccaagctggagtaatccattcaggttttcaatttttttgtaggttcccaagcaacgtcactagaatatgtgtcatcatatggtttgatcgggcagataacagagctgcacgatgagctccagtaccttcagcatgagaccgaaaatgtccttccacgtgagcgaggaagatgcaccgacgaactataaagacataattcaaatttgaggggctatttctctactcctttaagaagcgagcaaggatagctaatgcccgagtcatcgtcggcgactatcgtgcgtggggccagcaggagcagaaagactagggtaag

SEQ ID NO: 129859 - DNA, 1262 bp, Zea Mays
cgcgtcgcgtccagccgccgctcgcccgctccgctcaccgtctctgcctcctctcgcgcagatccgcccctggccaagaccatcgcgtccctcttcctggactccggggagtcgtccttcgccaactcctcggcgcggacgacgcgccacgtggactgcgcgtccgacagccagtccaccgagtccgaggccccggcggccgacgacttcgcggacgccatcgtccgggggctccgctccgacgaccgcctcctcttcgagccccacgggccctccagctccatcctcgagaggaagcctccggcggcgcctgccctgcggccgcgagcggcggcgtcctcctctcgtccttcgttgacggcgtcgcggtggcgttcgactccgccgacccgtcagatggtgatggtgtcaggcggcgggggtaacgcgtgggcgaaggagatgaccctccgccgcaggatagccagcatattcaacaagacgcaggaacacttccctactctgaaggactacaacgattatctggaagaagttgaggatatgactttcaacctgatcgaagggatagatgtcgaggagattgaagcaaaaattgcaagataccaacaggaaaatgcggagcagatatacttgtccagagctaaaagggcagaagatcttgcggcagcacttaaagcaagcaggatgaaccccgtaaaggccgaggccaatgatacggctgctgggagttctcagggtattagtggcggggcaggagttcagggccagtatgcacctgccgctgttcttgggggagtggctcagccccgccccacaggtatggcgccccaactaatcggcagtgggtcggatcccctgcaaggagacgacgaggagaccaggagactacgcgcagagcgagcagcacgggctggcggatggactgctgaattgagcaagagaagagcgcttgaggaggcgtttagcgccatattcatctaggattagatcaaaaggcaacacatggtctgcattggcattggtaaaacctgcactagttctgcagggcaaagaataagaactactcaatcagatgccgccatgcaaaagttaaaatgtgtctctatccatggcagggctactctaaaactaactaaatatattactagtggtctttcacatttgcatggttggtcttattgtgaccggcaagtcagtaagtgggcagccgagccttttgttctggtactagcaaaaatggaagtgtagcgacatctgagtaa

SEQ ID NO: 129860 - DNA, 1825 bp, Zea Mays
cgcgtcgcgtccagccgccgctcgcccgctccgctcaccgtctctgcctcctctcgcgcagatccgcccctggccaagaccatcgcgtccctcttcctggactccggggagtcgtccttcgccaactcctcggcgcggacgacgcgccacgtggactgcgcgtccgacagccagtccaccgagtccgaggccccggcggccgacgacttcgcggacgccatcgtccgggggctccgctccgacgaccgcctcctcttcgagccccacgggccctccagctccatcctcgagaggaagcctccggcggcgcctgccctgcggccgcgagcggcggcgtcctcctctcgtccttcgttgacggcgtcgcggtggcgttcgactccgccgacccgtcagatggtgatggtgtcaggcggcgggggtaacgcgtgggcgaaggagatgaccctccgccgcaggatagccagcatattcaacaagacgcaggaacacttccctactctgaaggactacaacgattatctggaagaagttgaggatatgactttcaacctgatcgaagggatagatgtcgaggagattgaagcaaaaattgcaagataccaacaggaaaatgcggagcagatatacttgtccagagctaaaagggcagaagatcttgcggcagcacttaaagcaagcaggatgaaccccgtaaaggccgaggccaatgatacggtcagtagatatcttcgagatatatgtttccttagtaaattaactgtgaaggttataaaatatgggttttctttagcttagaaatccgatagtctgatagctggttgtgtaagtacacgagcaatcccatcatgctggtgttactggtaagttacttgcatcggaaatatttggcactagtatttagcatgtcaaccaggcaaacttctagtaaacatcatgaggatatggtagtgatgaaatgctgaatcatgaagtgacagctttcagatttatcaccttgacatcttatcaacatgttctattggaaattgtgatcataatcacagtattggatgtggatgtatgctttgcactagaaaataaaattaattatgcaggagtggtgatttagtggtcaaaggggcaattgagttttagggtacgcaagaatttgctatatatatagaattctagatgcataacagaatggatgtagcgaaaaagtcaaagcggcttagaatttggaacgagagggagtactatttttttcttgagatgttgatgcattgatgctgtgttggtgtaaatgccaacacttggtgctcttgcaatctgtaacaggctgctgggagttctcagggtattagtggcggggcaggagttcagggccagtatgcacctgccgctgttcttgggggagtggctcagccccgccccacaggtatggcgccccaactaatcggcagtgggtcggatcccctgcaaggagacgacgaggagaccaggagactacgcgcagagcgagcagcacgggctggcggatggactgctgaattgagcaagagaagagcgcttgaggaggcgtttagcgccatattcatctaggattagatcaaaaggcaacacatggtctgcattggcattggtaaaacctgcactagttctgcagggcaaagaataagaactactcaatcagatgccgccatgcaaaagttaaaatgtgtctctatccatggcagggctactctaaaactaactaaatatattactagtggtctttcacatttgcatggttggtcttattgtgaccggcaagtcagtaagtgggcagccgagccttttgttc

SEQ ID NO: 129861 - DNA, 1351 bp, Zea Mays
atgacaagagatggattggatgcccctgccaattcggttgcggtggtcgctggttcctccaccgcggcagctggttccttcgaggcagctgccttgcctgagagtgttcttcgaccagagggccgcccaaagatggctgacatcggcgtcgccgtgtatggagtgctgcccgcccagcgacgggcggatcgtggacgtggcccgtttcgtaaagccaaggactcaaatctcctcaaccagaaccagcgaagcgtgcgtggacgcgtcctattcttcttccctccccgacctttccccaacttctccctccttcaaatccgatctccccgcaaggccgcaatcatgcgcaactccaccgccgcccagccctctactccctcctccgcccccgtcatgtccggctcaggccccgcttacgtggcgccggcctcttccacccccgtcggcggcggatacacctacccggcgccggcctcctccgggggcagcgccggctacgccaggatcccgacctaccccgcgcccccgtcgtcgtaccccgccaccaaccctcccacgccgcaggtctccaccaacgccccggtccaggaccccacggcgccgccgtctccgctggccaaggcgggcgagctcgtcgcgcggctccgcgagcagggccaggcgctgatggcggcgcgccggccctgggccgaggtcttccgcgcggcggccttctccaggccaccgtcgctcggggaggcgctcgcccggacgcgccgcaacgccgcctacttccgcgccaactacgcgctggccgtgctcgccgccgtggcggcctcgctgctctggcaccccggcacgctgctcgcgctcgtcctcctctgcgccgcctggttcttcctctacttcgcgcgggcgcgggtgaaccagccgctcagggtcctggggacggagttcgacgacgggaccgtgctcgccgcgctctgcggggtcaccgtcgtcgccttgctcttcaccagcgtcggctggaacgtcgtgggctccgtcatggtcgggggcgcgctggtcggcgcgcacgccgcgctcaggaccaccgacgacctcttcctcacggagcaggaggccgccggggacgggctggtggcagccgggcccatcttgcccacctatgtccgcatcgtttgattcattcgcgcagctgggcggtgtcattcatcaatcttgatgttattgcttgcagacagtagcaattttccttgtaattaccatcacgatgatgtctgatattggttgtgggtgtgtaaagatctatatttgttcagaaagacaactgcgatatcgcgcacattctagtttcgatgcttcaagatct

SEQ ID NO: 129862 - DNA, 1811 bp, Zea Mays
gtctcgcagacggaccacggtccacgggttgtaaaaccaaccaggctaccagccgagggcgagtgcgtcgctttcctcctccaggcctccaccctcgctctcgctcgctcgtcgtcaccaccacaccagcgaggcgcggcgcggcgggcttcgctcgtcgagagaggcgcgccgtccatggaggcgatggaggaggccaacaggacggcagtggagagctgccaccgggtgctggcgctcctctccaacccgcacggccagctcgtccccagcagggagctcgtggccaccaccggggaggccgtagccaggttcggctccctggcggccaagctctccagctccaacggcaatggcctgcagggccacgctagggtcaggaagaccaagaagcccctgcccatcttctacagcaacctcttcctcgagagcagctctgcggtggccgccgccgcgactgtggccaagacgcccagtccgagcccgaccactggcctccagctgttcccgaggtaccaccagatggagggctcgtcgtgtaaggatcctgtcaggatccctgcgcagttccccaagaggttgctgctggagaacctggctgccggtctggaggggtcgtcgccgcctgcccctccggtccggatggtgcagccggtgtccgttgcgcctcccgcagggatgcccaccccggcattgcccgccgcacacctccatttcatccagcagcagcagagctaccagaggtttcagctcatgcagcagatgaagattcagagcgagatggttaagaggagcaatcttggtgagcagggtggtagcttaagtggcggcgggggcggtggtaagggtgtgaacctcaagtttgacagctccaattgcacggcgtcatcgtctcgctcgttcctttcgtctctgagcatggaaggaagtcttgcgagcttggatggaagccgggccagcaggccgttccagctagttagtggctctcagacatctagcacaccggagctgggcctggtgcaaaggagaaggtgtgctgggaaggaggatgggagtggtcagtgcgcaaccgggagccggtgccattgttcaaagaaaaggaagctaaggataaggaggtccatcaaagtccctgcagtaagcaacaaggttgcagacatcccagctgatgagttctcgtggaggaagtatgggcagaagccaatcaagggatccccacatcctaggggttactacaagtgtagcagcgtgagaggctgccccgcgaggaagcacgtcgagaggtgcgtggacgacccttcgatgctgatcgttacctacgagggtgaccacaaccacagccgagttctagcccagccagcctgatctctctggctatcgattattcaagatcgcttccgtagtagtcaccctccctctctagagaagggaggacagcaacagcaacaatgagagcctagtgtctgtacataagttctgcttctaacagttggaggagtgattcggttagctagctctttcagaagaatcagtggtgacagaagggaacttatcgcgtcgatggatggaagaaagggagagagagagttcctcatcagatactcatactctatttttgtagcttcggtttatctctcttttttgttcatcctgtgctagggcccatcctgtgggttgtatgtctgggaatggtgttgggggggattggatcggagaagaaggcatgtggcaggaaattgcctgtaaaagtggctacacctaggaacagaatgtactatcgtcttcagcagtggtacagccttgttgacgca

SEQ ID NO: 129863 - DNA, 2226 bp, Zea Mays
atggtgtggggactgggaggatgcttcggcggtgtcgccgtcgccgcggtgtcgcctgttgcagcaggccggaagcaatcggcgtcagaaggcggagcagaagccaagcagcagcagcagcagcgggtggcaccacgagaggaggagcagcaggcggcggcatcagtagcaggaggccgtaaggagaggaagaagaaggacgctaatatggagatcaaagaaaagaagaagattcaaagattgaagaattatcgactacatcatatcaaaaggagtagcttatacacaggcctgcgcttccccttcctctcgcgattctcccatccactgtaccggagctccaccacgtcctccggtaagaaacagatgaaagacagcgacgacgagggcgccggcgatggcgtcaaccgcccgcacacgtccaacaaccttccactgccggctccacactccgacccgaacctccagttctcgggtgggacggacgatgagtcctcgaaccgggacagcagctcctctgccaccggcggcgcgagcccggggtactactccgactacccgtccagcttcagcggcgagtgctcgccgtacaacatgtccccctggaaccagaccatggcgtctccctggtcgcaccacagcgagcccgccgggctcggaggcggcccgcccacgatggcgccggggacgagcctcatcagctcgctggtgagggaggaaggccacatctactcgctcgccgccaagggcgacacgctgtacaccggctcggacagcaagaacatccgcgtctggcgcaagcagaaggactcgggagggttcaagtcctcgagcggcctcgtgaaggcgatcgtcatgtccggcgagcgcatcttcacgggccaccaggacggcaagatcagggtgtggaaggtgtcggccaagaacggcatgcacaagcgcgtcggcagcctgccccgcctgcgcgacttcctgcgcggctcgctcaacccgtccaactacgtggaggtgcgcaagaaccggtcggcgctgtggatccggcacagcgacgccgtgtcgtgcctgagcccgacggacccggcgcaggggctgctctactccgggtcgtgggaccgcaccttcaaggtgtggcgcatcagcgactccaagtgcctcgagtcggtggtggcgcacgacgacaacgtcaactccgtcgtggcggcgttcgacgggctggtgttcacgggctcggccgacggcacggtcaaggtgtggcggcgcgagcagcaggggaagggcaccaagcacacggccgtgcagacgctgctgaagcaggagcacgcggtgaacgcgctcgccgtgagcgccgtcgcgcccgtgctctactgcggctcctccgacggcctggtcaacttctgggagggcgaccgccacctcgtccacggcggcgtcatgcgcggccacaagaaggccgtgttctgcctcgcagcggccggcgcgctactgctcagcggctccgccgacaacaccatcttcgtgtggcgccgcgactgcggggtgcactcgtgcctctcggtcctcacgggccacaccgagcccatcaggtgcatcgccgtcgtcgaggacaacggcgagaacagcagcgagtccaacgccggtgactctgctggcggaggggggtcgtcggcgtcgcggtggatcgtgtacaccggcagcctcgacaagtcgatcaaggtgtggcgcgtgaccgacgaggcgccggacccgctgttccacggctccggcgatgcgccccagatattcgaccggtatcccggcgacgccttcggggccagtggctcgacgacgtcgttccgctaagacgatttgtctgatcgatcacttgcagcgaaattacacgtcgtctcacttcacaagaaaacgtcttgggaggactaaattatactctaaatacatatacatataccacgtccatatatacactgttggaaatggctgaaattgtaaggtataaaaatttatgatctatagcttgtgctgggcacaaccgcacgagctatgtagtttggttaccttttaaatttgtgagttgtgacagagatggcgaatttagttaggtatacgtttgctttttgcaactttgcattgctatatggcaaattttgaagcatacttatctgttgtactagctgaaaatgaattcgttttgtgttaacaatgtattcaataaatatctcgattttaacc

SEQ ID NO: 129864 - DNA, 679 bp, Zea Mays
gcaggccaggtcagtcatcaggaggtgatcggctgaggagaagctcgtacgtgcggtcgatccatcatggtgtggggactgggaggatgcttcggcggtgtcgccgtcgccgcggtgtcgcctgttgcagcaggccggaagcaatcggcgtcagaaggcggagcagaagccaagcagcagcagcagcagcgggtggcaccacgagaggaggagcagcaggcggcggcatcagtagcaggaggccgtaaggagaggaagaagaaggacggtgagaaggcttccgtagttgtgatgcaccagttccccttccactcgcgccccggcttgctctgaaatccatcgattgattctcattctccctttcactcgagtatacaagctcaccattcgcgcaggaaactatatatagacttggctctggtgaaaacggaagctaacgcgttcctgttccttcccgcctctgtacattcgtccacggtcggtgtattttgtgtggatcagttttgtatgatgtatagtaaatgatggattgtatatttgtatacgtaaacacgtccatttatgcttgatgagtaccaccactgagatttgttctatactacatcagtagatgcatgggttgactgtgacgatgatcacaccatcttaatttgttcatatttactgccaaacacagttg

SEQ ID NO: 129865 - DNA, 405 bp, Zea Mays
ctttatatgtacttcccatgataaacttttgtcaaatggtattggtatttcacaaagggcttactgtactttcatcttattggcagggcaccaactctaatagattcaccatctggaaagcgagggcagttatcatgccttgtgaagatggtttgttgggattgcgattccctttatgcgtcctgtttttttatttgtcatcttctgctgtatcatcctttctttgaactatattttcatgtggtacatgataccttttgttaccttcgccacagtactgctcacgaatagcattttgagccattttgctatgccttggaataaaacttttatcctcgatcctaggaatggataacctcttggattttcacatctgatattaaccattaaaatttggatgatgga

SEQ ID NO: 129866 - DNA, 3026 bp, Zea Mays
aaacaccccttggcattctccatctccactcccacagcctctctggtctctccggcgcctcgactgcgagacccaccgcgacgccccaccgatatggcgacagccggtggcgccgcaccggcggcaatggacgagaaggcgcggcgcacgcgcgacctccttgctagcttctacaacaccgacccgtccgcggccgccgggggtgccgcggcccccgcgttcctggcgcgcccgtcccctaccgccgcgcccgcatcgcccctcgactcaatcaactccacctccttcgatcccgacatctacatgaatgtcctggtgcaacaatccaatctggaaggtcttctacaaaggcatgtgaagatggctactgagatcaagaacctagacacagatttacagatgctagtgtatgagaattataacaagtttattagtgcaactgacactataaaaaggatgaagactaacattgttggaatggaggcaaatatggagcagctccttacaaagataacatcagtgcaatcaagaagcgacacagtgaatacatctctttttgacaaaagggaaaacattgagaaattacatcgcacacgcaatctgctccggaaagttcaattcatatatgaccttccaactcgtcttaacaaatgcatcaagacagaagcatatgcagatgctgtcaggttttttactggagcaaaacctatttttgaggcctatggagatacatcctttcgagactgtaaaaaggcttctgaggaggcaatggatgtagttatacaacaccttcagacaaagttatactcagattctgaacctattgaagcaagagcagaagctgtagttctccttaaacaattgaagtttccagtggacaacttaaaatcgaatctacttgagaagctggaagaatgtctcttgaatttccagaatgagactacacatgcttcaattggtgacatctcaaagacatttcgtgcttatttaataatatttcctgattcagaaaggcgtctcattgaacttgcacaagctttgttcttaaaccgatatgagacagtcagagagaatctgaagaaaagaattccatcaacagatctactggcaatgctacgatccttatgggaggatgcaaccatcatcgatgaggttatttcagaggctgcgctaccagctttttctttggagactactcgagacattgttaagcaacacatagcaactgcatttctccatcttcaaagtgaaatatcagaggcactggttaggacacattcaacatcaaatgagaagttggaagagtcacagctgcaaactgctatggagacaagcaaaatcaaagtatcccaaggatgcatagatctcctgcaggaatttcatcatctggtagatggcaatatagagttgcttgttaagctgagggatttgattattgattgggtacaagaaggttttcaagagtttttccagaaacttgatggacattttcatgtgctttctgggagaagcaaaacaaatttacaagagccaactatggattctatgcaaactgataagaccccaacagtcttggtacttatgcttgcacaactctgtgtttacattgaacaaacaacagtccctaaagttacagaggagttagcttctttttttggaggtggtgcacatagctacgaatatggaccaccttttgtgcctggagaaatatgtcggctatatcgatcatctggagagaaattcttgcaccattacataaatatgaagacccagaagatctccaaacttcttaacaagcgatttacaacaccagtttggattaagcacaaggaacctagggaagtgaacatgtttgttgatctacttctcctagagatcaatggtctggtatctgaagtcaagcagatcttacctggtatggttcggcgacatcggcattcagatagcactggtagcacgacttcctccagaagcaatccaatgcgagaagacatgttgaaccgatcaaacacacatcgtgctagaagtcagtttttagaaaatcacctggcaaagttatttgagcaaaaaatggaaatattcaccaaagttgaatacacacaggaatctgttatttctactgtcctcaagctctgcctgaaaagcttgcaagaatttgtccgtcttcagactttcaacagaagtggatttcagcagattcagctggatatggaatttctcaagacctctcttaaggaatttgtggatgatgaagcagccattagctttttactcaaagaggtgaacaatgctgcccatgagagatgtcttgacccaatccctcttgagccccccatattagataagctcataaatgcaaaactagcaaaaattaaagagagaaacccaaatatgcggtagctatgcacagattggtgtcgtttactagaattcagttctgtccatttgaatgcactattcagagttgtgtgtgcaacttcatagagtttagggcacatagcatggatgaaaatctggagtcagactcagatttgaataacactccccaaattgtatactggtatacttaatttggggtggtcgagctgttagcatccccttgcttgtcaggctaccgtcaagttgtcttctgtgcattgttttcttatcccaggtcaggtactggtctgaatttaatcaaatgagcatcgagctgttagaaaaccaaggcaccaactctaatagattcaccatctggaaagcgagggcagttatcatgccttgtgaagatggtttgttgggattgcgattccctttatgcgtcctgtttttttatttgtcatcttctgctgtatcatcctttctttgaactatattttcatgtggtacatgataccttttgttaccttcgccacagtactgctcacgaatagcattttgagccattttgctatgccttggaataaaacttttatcctcgatcctaggaatggataacctcttggattttcacatctgatattaaccattaaaatttggatgatgga

SEQ ID NO: 129867 - DNA, 2592 bp, Zea Mays
aaacaccccttggcattctccatctccactcccacagcctctctggtctctccggcgcctcgactgcgagacccaccgcgacgccccaccgatatggcgacagccggtggcgccgcaccggcggcaatggacgagaaggcgcggcgcacgcgcgacctccttgctagcttctacaacaccgacccgtccgcggccgccgggggtgccgcggcccccgcgttcctggcgcgcccgtcccctaccgccgcgcccgcatcgcccctcgactcaatcaactccacctccttcgatcccgacatctacatgaatgtcctggttcgtgtgcaacaatccaatctggaaggtcttctacaaaggcatgtgaagatggctactgagatcaagaacctagacacagatttacagatgctagtgtatgagaattataacaagtttattagtgcaactgacactataaaaaggatgaagactaacattgttggaatggaggcaaatatggagcagctccttacaaagataacatcagtgcaatcaagaagcgacacagtgaatacatctctttttgacaaaagggaaaacattgagaaattacatcgcacacgcaatctgctccggaaagttcaattcatatatgaccttccaactcgtcttaacaaatgcatcaagacagaagcatatgcagatgctgtcaggttttttactggagcaaaacctatttttgaggcctatggagatacatcctttcgagactgtaaaaaggcttctgaggaggcaatggatgtagttatacaacaccttcagacaaagttatactcagattctgaacctattgaagcaagagcagaagctgtagttctccttaaacaattgaagtttccagtggacaacttaaaatcgaatctacttgagaagctggaagaatgtctcttgaatttccagaatgagactacacatgcttcaattggtgacatctcaaagacatttcgtgcttatttaataatatttcctgattcagaaaggcgtctcattgaacttgcacaagctttgttcttaaaccgatatgagacagtcagagagaatctgaagaaaagaattccatcaacagatctactggcaatgctacgatccttatgggaggatgcaaccatcatcgatgaggttatttcagaggctgcgctaccagctttttctttggagactactcgagacattgttaagcaacacatagcaactgcatttctccatcttcaaagtgaaatatcagaggcactggttaggacacattcaacatcaaatgagaagttggaagagtcacagctgcaaactgctatggagacaagcaaaatcaaagtatcccaaggatgcatagatctcctgcaggaatttcatcatctggtagatggcaatatagagttgcttgttaagctgagggatttgattattgattgggtacaagaaggttttcaagagtttttccagaaacttgatggacattttcatgtgctttctgggagaagcaaaacaaatttacaagagccaactatggattctatgcaaactgataagaccccaacagtcttggtacttatgcttgcacaactctgtgtttacattgaacaaacaacagtccctaaagttacagaggagttagcttctttttttggaggtggtgcacatagctacgaatatggaccaccttttgtgcctggagaaatatgtcggctatatcgatcatctggagagaaattcttgcaccattacataaatatgaagacccagaagatctccaaacttcttaacaagcgatttacaacaccagtttggattaagcacaaggaacctagggaagtgaacatgtttgttgatctacttctcctagagatcaatggtctggtatctgaagtcaagcagatcttacctggtatggttcggcgacatcggcattcagatagcactggtagcacgacttcctccagaagcaatccaatgcgagaagacatgttgaaccgatcaaacacacatcgtgctagaagtcagtttttagaaaatcacctggcaaagttatttgagcaaaaaatggaaatattcaccaaagttgaatacacacaggaatctgttatttctactgtcctcaagctctgcctgaaaagcttgcaagaatttgtccgtcttcagactttcaacagaagtggatttcagcagattcagctggatatggaatttctcaagacctctcttaaggaatttgtggatgatgaagcagccattagctttttactcaaagaggtgaacaatgctgcccatgagagatgtcttgacccaatccctcttgagccccccatattagataagctcataaatgcaaaactagcaaaaattaaagagagaaacccaaatatgcggtagctatgcacagattggtgtcgtttactagaattcagttctgtccatttgaatgcactattcagagttgtgtgtgcaacttcatagagtttagggcacatagcatggatgaaaatctggagtcagactcagatttgaataacactccccaaattgtatactggtatacttaatttggggtggtcgagc

SEQ ID NO: 129868 - DNA, 2808 bp, Zea Mays
agtgggtgtgcgagcgggcggacgaaagcaacgccccaacaacctgatccctccccttcaccccatcgcacgccacaacaaagcagagcgcggcgctacacctacacacctccacccggaccacccccccacagtcccacaccacaccacgcagtgccgtgccgcactgctgtcctgcaatctcccataaactcactcgcctcgcctcgcctcgcctcgcccacccgcccgcctgtccctccccaaggccgcagctcactcgtgtcgtgcacccgtcccctcccacccgccaagaactagcattgccgccgccggtgccagggggcggaggagaggccgcggcggcgagggagcggcaccaggcgcagggggtcaggagagccgccggcaggatgttcgggcgggacccctggggcgggcctctggagatctccaacgccgactcggcgacagatgacgaccggagccgggacctggaccgggcggcgctgatgcggcagctggacgagacgcagcagagctggctcctggccgggcccggcgaccaggcgggcaagaagaagaagaggtacgtcgacctgggctgcgtcgtcgtcgaccgcaagatcttcatgtggaccgtcggcaccatcctcggcctcggcgtcttcatcggcttcatcatgatgatcgtcaagctcgtcccgcacaagcgcccgccgccgccgccgcccgaccagtacacgcaggcgctgcacaaggcgctcatgttcttcaacgcgcagcgatccggtccgctgccgaagcacaacggcgtcagctggaggggcaattcctgcatgaaggatggcctctccgacagcaccgtccgccggagcttggtcggaggcttctacgatgcgggggacgccatcaagttcaactaccccatggcctggtccatgaccatgctcagctggagtgtgatcgagtacagggcgaagtatgaggccatcggtgagctcgaccatatcaaggagctgatcaagtggggaacagactacatcctcaaaaccttcaattcatctgctgacacgatagacaggattgtcgctcaggtgggtgtaggtgacacctctaaaggcagcagtcagcctaatgaccattactgctggatgagaccagaggacatcgactacaaaaggccagtcaccgagtgtcactcttgctcagatctagcgtctgaaatggctgctgccctggctgcagcttccatagtgttcaaggacagcaaaacctactccgacaagctcgtcaaaggcgcaaaagccctgtacaagttcggaaggctgcagcgcgggcgatacagccccaatgggtctgaccaggcaatcttctacaattccaccagctactgggatgagtttgtgtggggtggtgcgtggatgtactttgccacagggaacaattcatacctcacggtcgccacagccccaggaatggcgaagcatgctggagcctactggtttggaagtccaaactatggagtatttacctgggatgacaaacttccaggagctcaggttcttctcagcaggttgcgactcttcctaagtccagggtacccttacgaagaaatactgaggacattccacaaccaaaccgacaatgttatgtgctcatatctgcctctattcaattcattcaacttcactaaaggaggactaatacaactcaaccatggaaggcctcagccacttcagtatgctgtcaacgcagctttccttgcttctctatacagcgactatcttgaagctgcagacacgcctgggtggtactgcggacctaacttctacaccacagaagtcctccgcaagtttgccaggtcacagctcgactacatccttggcaagaacccattgaagatgagctacgttgtgggtttcggaaacaagtacccgaagcgccctcatcacagaggcgcgtcgatacctcacaacggcgtcaagtatgggtgcaaaggaggttacaagtggagggacacaaagaaggcaaaccctaacatccttgtcggagcaatggtggctggccccgacaggcgcgatggctacaaagatgtccgcacgaactacaactacacggagcctactctcgcagcgaatgctggtctggttgcagcgctgatctctatatccgatatcaaaaccggacggttcggcatcgataagaacaccatcttctctgcgattcctccgatgttcccaacacccccgccgccgccatcagcatggaaaccatagaggcaatacctctgaatgtttttccaaagcatcgaacagggaagtggagcaaacgtgtgatcatttggtacagcgaaggccagagacaggaaagctgacagcataagtttatagagcttctatttctgtaccaatatgacagatcagtataagatcctctgtcagacatagatcggaagctgtgtgcatcgcgtggagctaatttttgggggtcttgttgctattggcactccagctcatgtgtgaagttctttttgtagaaatggtacctttacaaattgttttataggagtgacttttcattattatagtaaagaatgcgtgtgatctctatgcttgcttcattttgatcctgttattttgtattcaaaaaatccctgtttgaggggaaatatgtttggtaacaagagatcacaggggatgggtggggtgggaaattagttcttgtcctcctcaatttcctccaattctcctgtggtcctctggttaccaaatcaaccctaagttctcggaaattacaatggaatgacaaaaggacaaacatgagtag

SEQ ID NO: 129869 - DNA, 868 bp, Zea Mays
ccctcttatccgttctcgtctcctgtcccggactcccgggaccggggaggccgggatcgagaagggcaacgagcgcgtcccgtgctcgccgctcctcgccgatggcgtcctccactctgccagcctaccccttccgtatgtctcttcccggactacgagccccggaccctgctaaggttaagcacgtatccgttcgagcccccgctcgccgtcttcccgttgcagcctccgcggcaccatcaggcgccgcggcggcggcggcgagggagcgcaggcgtttcctggagagctacgggctcaacccaaacgacttcgaggaagatgcagaggagaatccgagggaagagagaaaggacaggcggagacgtcggcagtcggggagaggggagcaaactgcggaagcggcagtgactccagcgaaggtggaggagcctcgggagactcacaaaatgctccaggtgctaggtggaaaagtccgcagaaggaaattactttcacccaaagataggaatgtccgtccaatgatggaagttgtccgaggagcagcctttgacattttacagtcagctggtggttctcctgcttcactcagaccgggtcggtggctagacttgtatagtggtactggatccgttggaattgaagctatgagccgaggatgttcagaggcacatttcgttgagatggatccttgggtcatctctgaggtcctcaaaccaaatctggagtgtactggatttattgacgtgtcacagatacatatgctccgcgttgaaaaattcttggccaatgccgaaaaatctcatggtaaatatccttcattcgattatatcagtgtaacaccaccatatctggaggtcaactatag

SEQ ID NO: 129870 - DNA, 863 bp, Zea Mays
ccctcttatccgttctcgtctcctgtcccggactcccgggaccggggaggccgggatcgagaagggcaacgagcgcgtcccgtgctcgccgctcctcgccgatggcgtcctccactctgccagcctaccccttccgtatgtctcttcccggactacgagccccggaccctgctaaggttaagcacgtatccgttcgagcccccgctcgccgtcttcccgttgcagcctccgcggcaccatcaggcgccgcggcggcggcggcgagggagcgcaggcgtttcctggagagctacgggctcaacccaaacgacttcgaggaagatgcagaggagaatccgagggaagagagaaaggacaggcggagacgtcggcagtcggggagaggggagcaaactgcggaagcggcagtgactccagcgaaggtggaggagcctcgggagactcacaaaatgctccaggtgctaggtggaaaagtccgcagaaggaaattactttcacccaaagataggaatgtccgtccaatgatggaagttgtccgaggagcagcctttgacattttacagtcagctggtggttctcctgcttcactcagaccgggtcggtggctagacttgtatagtggtactggatccgttggaattgaagctatgagccgaggatgttcagaggttgtccaaaaattcatactgaaacttcagtcatgatagtctagacatgaatgcagataatccctcaaaacacccattcatctaattaccttttatttttttatcacaattcaaataagctcattgttgacaaattactcatgatgtttttatatatccaagtaaggactactgcatacttgcaaacttttcatc

SEQ ID NO: 129871 - DNA, 786 bp, Zea Mays
atgaagcgctggatcaaggagatggaggcggaggccgccgcggccacctcgtccaggtcgagtacgccctcgagggtcgtacgcaagggcaacgccactgtcagcgtccgcgtcgtcgagaagaagtccaccccaagctctaggactccagtgggcatagggcacgccgtcggcatagatccccttcaacaaccggtcacctcggcagcaaacttcggcggccacatcgtttgcacgcacaactcgatcaccccccttcgcttctccgagttcttaataatggtgcacggagtgcagtaccaccagacgaccgtggtgccccgggagtccatccttaagaccgaggcggagtggctcaactctatcaaggccgaccttgtggtttcagatgttgtacctgtcgtgtgtagggcagctacagttgctggcattcgatccatgtgcgtcacgaatttcagatgggacttcacttatgcagagtacgttgtagctgctggacatcatcatcgctcaattgtgtggcaggtgatgtatgatgcctttggtgttaggctacatgcagggaagcaagcagaggtgcagtcatttgtgcctgtagtgttgttgttgcccaatcatgcagggaagcaagcagaggatcagaaggtcgatgaagctattttggaagtgttagaccttcgatgccagggtttcatggcctacgtgcagacggactccgggaagacgacgaccttctacttccccatcaccggcatcatcatgcagcccgctagaatgccacaatag

SEQ ID NO: 129872 - DNA, 2882 bp, Zea Mays
ccttcctcatgaaggcgccgcgccggcgtgggggcatcgatcgccgcgccggtgattcggcgcaccgccctgccctgcccgcccagcggattcggtgcggcagacgtacgcggacagccggacccggacgcgatgtgaagtgcgaaccccaaaaatattccacttgtcttcccccctcgtcgacccacagaaccttcgactcgtcgccactggagaagtggctggctacctccgattcagcacgtaaagaaagcaaaccgcccgcagttccgttccgcaagaccagatcgcccgcttttctcctccggtcctctcctccctcccctctcccctgagccctgatcgaatcgatccacggtgccggcggacgcctcgacccctccagttccatccaatccgccagtgaacagatggcgtcgcagtgggctgctccgccgccgggctacccggccgggcacgggcaggcgtacggcgaccagcagctggccacgccgccgcctcaggcagcgacggccgtggccgtgacggcggcgagcaacggcgtgggcaacccctacgtcgtcgtcacccccgcgtctgccgcaccgtccacctgccagaccgtcaggaaggcgctgggccgctacggcaagctgctcgaggacggaacccgcaaggccgccgacgccaccggcaacatctggcaccacctccggacggcgccgaacatggcggacgcggcggtggcgcggctgacgcaggggaccaaggtgtacgcggagggcggccacgacagggtgttctaccagacgttcggcgccatgcccggggagcagctccgcaaggcctacgcctgctacctctccacctcctcggggcccgtcatcggcacgctctacctctccacggcgcgcctcgccttctgcagcgacagcccgctctgctaccagggccctgccggccagccgcacgagtgcatgtactacaaggtggtgcttcctctgagccaggtgacatccgtgaacccttcttccagcatgcgcaaccgggcagaaaggtacattcagatcaggaccatggataaccacgagttctggttcatggggttcgtgaactacgacaaggccctcaagaatctctacgaggccctgcagcaccgcgatgtcagcgcccaccagcgctgctgatgctgatcaggcttgggttaggtccgacagtcctactgctacttatttcgtccatgatgaactgtgatacctttatctcatctgatgttcttgatgaataagagaaccaccgaaaactcctggtgtgcttgcgtcgctaatctgatcggtgcagagagaatatggtgcatctcacaaaataacatttctttaatccttgatacattctcatttagccaaatttttttcatggtcatggagtccattacaatgctgcaggcctgatcctccatatacaaacttcaaccttgcaatagcatattagactttacaccatagaggctgcatgctgtctccacatcgatcaaatatacaatcaatagcgttcgtttctttagcaatagaaacgtatacaagctcagcaggaaggaaggtagcagcaattaagttttctcgctatcgatttacaacaacattacctaggaaaactgttgttgccatggcgcgcgttcggttctgttctgtcattctgtgcgtgtacagtataggcttgtattgtaagctgtagcacggtgacggcgcgctgtgctttgctccggtgcctcaggtgttggatcgacggtcagtggtggtgtgggtgtccgtgggcatgcgcggtctggtcgatggagtcgacgcggctcttgagcgccgcgagctggcccctgacgctgaggtcgatgacgtgcgagtcgtcggtgccgtagcagacgacgaagccggcgatgagggacgcgtccacggcggtctctaccttgaggtcgacaaagccggtgaggcggcgcatcttgcgcgcgatgcgctcggcctggcgcgcgtccagctccacggcggaggtcaccagcacccggagcgcgaccatctgcggcggcggcggggcgctggcctcgccgtccgggacggcgggggccatgctgcagttccggtccaggagcgaccgcaggaagtcgagcgtgagcggcttgaacggggccgcgactgggactgggactgggactgggacggacgcggtggtcccgtcgatgtgctcgacgccgacgtagctgctgtcccggcgcagcgtctgcgcctgccaccgagggcagtgcgcatgggaccgccccgcggccgccgtggtgctcggctgcgccggcacgagatggccgcctgggctgatgggctggttcaagatcttcatcgctaccctgcacgtgaacaataatagttcaaaatctatagcagcaagcacaaagaagaggaacatgtatgggactgagcaaggactcgaacaatgaaacgcggtggttcttgcctcagcactcagcagcacaagcagctggtgatcggagggaacggcagggaagctgaggcgagggtggggagaagcagaagactgcgcggcgcagcagtgtggggaagggtaatagctgccagagtgccagcgggggggataagatagctgctgctgcgtagcgtcgctagcttggtgtcgaggaggggaagaggacgggagagtttggcgtgcacacgatgcggccccggcagccgcacacgccccatccggggaaatctgcatctgcgtgccgcacacgccccagtccccgccccgtgtggtcaccaccggtcattccatcacgcgcccccgcccggccgccccctatccgctgtctgttccatgcgcgcgacggggcgccacggctttggtcggccgcgcctcgc

SEQ ID NO: 129873 - DNA, 1102 bp, Zea Mays
tttaatttgactcgatgaattgcttcttgattgaataggcaaatttacattcaataatctgtacaattgatatccaattccgggagaaccccaagtgaacgaaaagatatgttcgtctcccctgcttcaaatccaatctgcaagcttctcttcctcgttcttgccagcgaagaggaggcatcattgcatttggtccttggagcatcgattcgaatcctattagtagtatcagtagcactagcagcagcagccgacgggcggctaccggcggccggccaggcggttgagccaggcgttgcggagctggagctcgacagggtcgccgaagcactgcgcccgcgcgaggcagaagtgcgtgcagaacccggccgacgagcgcacgcggcaggtggaaagcacgtagcacgacgcgcgctccatgccgcgcgcctgcaccaccagcccccacacctgccgcgccgcctccgaggcggcggaggccccgccgccgtccgaggccacctgctcgaccaggatgatcccgtccggcctccgcgccccgcctggcccccaccggcgccgcacgtccggccagctctccggcgccgcgggctcccgccgcaccgtcacgcgctcgccctcgccgctgctgaacaggtgcaccaggaacggcgcctccccgacgtgccgcacgatctccgcgatcgagtcccgcatccacctctccaccttctcctccccgaccttctccgacacctcatcgtcctcccctcggcccaacacggtccccggcagcccctcgtcctcctcccgccgctggagctgcaggccgccgcggggaggcgtgtccgcgcccgccgcgcgcaggcgcaccgacggcgccccccgccgcgtcgtcacgggcacgagcggtgcgggcacccgcgatcgcggccgaggcagcgccaccgacgacgacgacggcgacgctggcccgtagccccgcacggtaggcgccgccgccatcgcacgctggaccaccgatcctgccgccgcgacctcctgcggtagttgataatccgaggcgccgggagcggcggcggttccgaagtagtagtagaattagcacgatccgagacgagtc

SEQ ID NO: 129874 - DNA, 3028 bp, Zea Mays
cgcacgctgccgtcgaccgctagttgaccttcccttccctcagaaccctaacgagcggtgagccgcctctctcgagcgcctaccactctgccccctgcgccgcctgcggcctgcccccaactcccgcaccatcgcgaagtcctcgacgtctaggtcgccattccagtaccttctagaatatcaggatcgccagcgccgccgcatcgggcggccctgtggcccatggacaagctccgcgtccaccgctgcaccggcgacgcggtcgagtggtccccctctcccatcgtcgcgctcgccgcctctccctgcgcctcccaggtcgccgccgcgcgtgaagacggctcgctcgagctctggctcgtctccccgggctccgtcggctggcacaaccagctcactatacaaggcaacgccgcgtcgagggtcacatcactggtgtgggggcggagaggtggagtgaccggccggctgctctcgtccagcattgatgggtcggtgtccgaatgggatctctttcacctgcagcaaaagactgttctagatactgttggagttccaatctggcaaatggccatcgaacctttggatgatgctaaaaatactgaaaataatagctcagagtttgctgtcaatggtcatacaaaccaaaatgactccagcgattctgactttagtaacattgatgatggtgacaactctgaggatgaagatggttctaccaacacaagatcttcatatcatgggaatgatttccagcgaatggctcttgcatgtgatgatggttctgtacgattgtttaacgtgcctgattcaggtgcattgacttactatagatttcttcccagagtgagcgggcggtctctcagcgtgacatggagtagtaacgccaaatttgtattttctggcagcagtgatggtttaatcagatgctgggattcaacatctttccatgaaatgtatcgtattactgctggattaggaggggctggtacctcacctgaactttgcatctggacactattgtttctgaggtgtggaactattgttagtggagatagtaccgggagtgtacagttttgggatagccgccatggaacacttctgcaagctcactcctatcataaaggcgacgtgaatgcactaacaactgtgcctggtgagaacagggtattttccgcagggtccgatggccaggtaattttatacaaaatatcaaaagatgaatttggtgctactaaaaatgtggtcaaagagcaagttcacaaatgggtctatgtgggatatgtgagagctcacactcatgatgtaagggcactgaccatggctgtacctatctgtagagaagatacatcacctgaggaaaaggtggtgaagattcgccggcgtgaaaaacatgaatttagttaccacaaatgggctcatcttggtgttccaatgcttatatctggtggtgatgacaccaagctgtttgcatattcagcaagagagtttactcagtttgcacctcataatttctgccctgcacctcaacgccctttgataaagatggctagggatagcacagtcaatggagattctgtaatgcttgtccagtctccaaactggttggatattttacttgtgacagttcagaacaaattgacgactccaagtacatcatcatctagaggagatgctacagtccgacaacttgctcgtttgaaaagcaaggggtccagaaaaatcatttctagtgctgcctctgccaatggaacacttttggcctattcagatggtgtgagaccctgcctctttgcactaaggcataagggtggaaagaagtatacccttgacaaattagagctaccaaaaggattgccctgttctcagagtatggcgtttacggttgattcgtccaatttgatacttgcgggacgtaatggaaaaatatacatcattgacattgcaacaagagaaatttcaaatgtatttcaccctacaagaaaggcagatggagcaaaaatctcaagagaatcacctataacgaagatgttcctaagtgcagatgggcaatggctggctgcagttaactgctatggcgatatttatgtatttaatcttgaggtgcaaaggcaacactggttcatatcccgaatgaacggtggttctgttacatctggtggattttgccccaaaaacaacacacttgtgataactacatctaaaaatgaggtgtatgtatttgatgtggaagcaaaacaattaggcgaatggtccaagcgatatacacaccagttgcccagaagtttccaggaattccctggagaggtcattggcttatcatttcctccgcaaagctcatcgtcagttgttgtatacagtaccagggctatgtgcaacatcgatttcggattgccagttgttgaggatgttggcttgccaaatggatcaggtgcaccagcagagaaggcagacgcaaaaaagagtaaaaaaacaaggcagaagcgtaaggcccgtgatgaagagtctacagaggagaaaaggaacaacttcaacttctttgcgtttaaagaaccagtgctctttgttgggcatctacaggacagttcaattttaatggtagagaagcgatggatggatgttgttgaaggtttcagcgcaccagttgacagacatatatatggcacatgattcttgctaacatcggcctttggcgctcgtgacaagcaaaccattgtttttgtttttttttctcaagtaatgcaaaacatccgtcctcaagcatgtcaacggttgaaaggggctacaagatattgcagcacaaagtgaaagctgcacgtagactttagagtcggggattgtggcaatggtgtattttcttttgttctctagtaatgtagtggactccctgcgccagtttgtcataccttgtcgctgcgcaaaattttgtcacatgtaaacactgtatcatcacttctgttattgttgagctgatatcttctgtttgcctcaggaaaaaaataatagtaggaaaaaaacagtaaaacta

SEQ ID NO: 129875 - DNA, 1325 bp, Zea Mays
cagagtgggaccagcaagccgcgccagtgtacatgtcttcaccgtcacacgtgcgctcctctcgtccatcctccacacgtgcgctcaaaccgagcttgtccacggaccgcaccctgtctgcacgcatctccaccgtccgatccccagccgatggcggcggagcccgcggcggccgaccacgatctccggccacccctggcggatggcgccgctgctgccggcgtgggcgccgcctccttggcggcggcggcgggcgcggcagaggcgctgatgagcgcgacgtcggagcagctcacgctggtgtatcagggcgacgtctacgtcttcgaccccgtcccgccccaaaaggttcaggctgttcttttggtacttggagggtacgaggttccgcctggtttggtaaacatggctgtttcttcagcaaatgatgagaagaatacaactgtggctgctagaagggttgcttccttaatgagattccgtgagaagagaaaggaaagatgtttcgataaaaggattagatacagtgtgcgcaaggaggttgcccaaaagatgaaacggcgtaaaggccaatttgctgggagatcagattttggcgatggtgcctgttcttctgcagcttgtggctctccagctaacggcgaggatgatcattttcgagaaacccattgccaaaattgtggtatcagctcaaggcttactccagcgatgcgtcggggcccagctggtccgaggtccctctgcaatgcttgtggcttaatgtgggcaaataagggtactctacgaagtcctctaaatgcacccaaaatgactcagcagcttcttgccaatccatgtaacatggtagatactgatgacaaaaactcaaatgttcttcctgtggagcataatcaagccacacccaaaactgactcgatgatgccaaaagaggagcagaagctggacatacgcttgcccaccgaagaagatacgaaggcagtttcatgacaaatgctcaaacatgtatatagatcgagacaggtttctgagtttaggatgacatataaatcagtaaaactaacaaaggcagcacaaaaaaaattacatgcattgtgttgccacatttatctccgtacccgattcatattgtattgctaactgatgcagttcttactccttaccctgtgtcaacctgaccaggtgacttggcaggaactcaaaatgttttcaagaatacgacgcattcttgagaaacgttttgtttattgttgtaaaaaccacttcaatagtaatttgcatcaactttgatgcaatttattttatagaaaaacatgtgatattttggt

SEQ ID NO: 129876 - DNA, 854 bp, Zea Mays
agtgacaaactgaaactgaccatgaagccatgaaacaggctccgctccggcctgtagccgtgaccccccacgaaaaccctaatggcgtcccgcctccttcacctccgccgcctcattactcctccctccaccgtccccgccgcttccttctccaccgccgtcagcgcgaccccgcgcgtctccgcgctcgtcgacgagatctgcgggctcaccctcctcgaggcctcttccctggccgatgccctgcgcggccgcctcggcgtcgaccagttgccgccactagctatcctcacgggcggcggcgcaccgctcgtcggcggcggagtaggtcccggcgcggccggcgaggaggcgaaggccaaggaggagaagatggcgttcgacgtgaagctggaggggttcgacgccgcggcgaagctcaagatcatcaaggagctgagggcgttcacgaatctgggtctgaaggaggccaaggatctcgtggagaaggcgcccgccgtgctgaaggctggagttcccaaagaggaggcggagagtatcgccgagaagatgcgggcgctcggcgccaagattgttctcgagtgaacgacgagagctgtgtatgccctcgtttcttgatttgtttcgtgtttcttgtatgaaaaaaagagagaattttggaacaaggagataataattagtaaatttgactagagatcttttcactgcgagtgcaaacaccaattgagcttcggtgaatacgaacttagacttagtgatcaactttcgagttctatatcaatgctttttatgagatgtatgacatatagcgaactctagcatcagagtaccatcttctgctgattctgtttacc

SEQ ID NO: 129877 - DNA, 584 bp, Zea Mays
cagagccagccaccactactcgcctgctccgctcgcgcatcccatcccagcggcggcagacagagagcagggatcggcgggtccgccgtcgacatggctcggtacgtggagatgctggacatgggcgtgcgcatcgcggcgaggttccactcgcactgcccgcagacggcgcgcatgtactacaagccgccgcagacgcagacgcagacgcagtcgcagtcgtcgtcgtcctcctcggccgacgactccaaggccgcgaccgcgagctccgccctcgacgcgccgtcggtccggcggcccttcgcgctcgcggcggcggcggcggagttccgcgccggcgaccggtcgggccatcatcagctgcacggcttggacaccgcgctagtcgtcgtgtacgaggtcatgtgaggggtcgacgaggggaggggaacaagaacgaccttcttggcaagcgccgcaagaaatttgctgcgagatgtgtactctgttctttgatttgtacatagctgtgtcggaaagttttcgtccaacacagatgaactgagaaaacattcattcattcaacatgttgttcttcgggattt

SEQ ID NO: 129878 - DNA, 102 bp, Zea Mays
catgaggtcagttctcctgtctacgacatgcagacatataacaaacttgctactcaaatctccctccctccatcttacatagctcctgaggtaaaagttaaa

SEQ ID NO: 129879 - DNA, 711 bp, Zea Mays
gcacagcagctcaagttctccgtctccctccagtttagggttgcgtggctgggagctcgggtagctagtcgtccatggcgatcgatcgagaaggggtggtggcgtttggttgttggctgagagagtgcgatgttggcatggctcaatcaactcgccggccgcgggtggcttatagcttaattctgcgcattcgatcgaggtgcgggcgcagtgtttaattgattgagccgtgccaatatcacaaccttctctagcctatatatgtggagtggactacaggtacgggggttttgtgttctttgtcgtcctgctatgcgccgtgaaatttaattaagattcggttttccatctatatatcgtgtatataccatggatgtgtgtactgtttgtggcattattatcaggtcatgtttacaagtatagtaggtgtggcagcagttgacctatggttcccggataaaaagatgtctattgctattttatatataatagtaatccgtatatgcgattgctgcttaataagggctttgttcgattctgtgatgggattagaggagattaaatccccttcgatcgtatgaacattttggcagtgtatatgagcattttggcaggaggctagggtactctattgttggtcaaagcttgctctcattttggcagtgtatatgagcattcacagttcgctcgtgaaagaacagctgttttttt

SEQ ID NO: 129880 - DNA, 1345 bp, Zea Mays
ataggctgtcaatacaacttggtaggtttgctgcaactttctcatgactgcccatgcatgcatgcatgcagtacatatcatacaacaaaatacaaaactgaaccagcaacaaaccgatgcccatgagattgacatggtgatcgagctacagcaggccgccggtcttctccaacgctagacaacgaagaaggagcaattaatcaagtagatcgattcaatccaatccaatggggttgctgataccagcccgtccggagcaatgcacgttgagccgtatcgtgtctctcatcaccgtcggtgtcgtcatcgtggtttgcacgtacgtcacatcttctccggccggtggcgacgccgggaaggaggagttcttcagcatatggcaccgccgatcatcggattttgtccccgacgatctggaggtggcgctgcgcggcgcagcgtacgcgaacaggacgctgatcctgaccatgctgaacaaggcttattcggaggagggcggcctgctcgacctcttcctcgagagcctgagggaaggggacggcaccgagcagttgatcgaccacgtcctcttcgtggccatggaccagcaggccttccgccggtgcaggagccttggcggcctcaagtgctacctgctccggccgacggacagcgcggacgacctctcgtccgagcagatctacatgtcggacgggttcatacgcatgatgtggcggcggatccggttccttggcgacgtcctcaagcacggctacagcttcgtattcactgatatggacgtgatgtggctgaggaacccgttcccgaagctggaccgcggtgaaggcgaggacttgctgatcagcgccgacaagttcaacggcatgccgcacgactacgccggcaacgagctgaacacaggcttcttcttcgtggtctccaacgaccggacggtggcgctgttcgacgagtggcacgcggcgcggcaggtctcggcggggatgaaggagcaggacgtgctgaaccggatgaagcggcgcggcgcgttccgccggctgcgcgtgggcgcccgcgtcctggacacggcgcgcttcagcggcttctgccaggacagccgggacgcggcgcaggtggccaccgtgcacgccaactgctgccgcaccaagcgggcgaaggtagccgatctcaaggccgttcttcgcgccgcggaggggctcaacaggacaaggatggagattaagtggccagcgcatagcgagtgcgtaaaatcgtggttgtgaggctatcaccatcttaggtctcctatttcaccctctattttcaattttactttacaaatagtatcgtttacagtttcgtgtcccta

SEQ ID NO: 129881 - DNA, 1770 bp, Zea Mays
cccaacggcaaaagcgatcgttgccgcgtccccagcgagcgtgccgccattgcgccgccacgccggcgacccgcggcgtcgcatcgcatgtgaacacggggcgcgtttctcgtgcctgtcaagtaagatcggtggcgatgaagtgcgtctccggcgcgtacttcgagccggacttcgacccgctcctcgaccgcctcggcacccccggggtcgtcgtcgataacgagacgcgcgaggactgcacgctcgtcaaggtcgacagcgtgaaccgggacggcgtgctgctggacatggtgcagctgctcaccgacctcgacctcgtcatctccaagtcgtacatctgctccgacggcggctggctcatggatgtgttccatgtgacggaccggacagggcgcaagctgacggacccgtcgctccccgagttcatccagcgcgcgctcgtgcggttccaccggaccgtcaactgcgcgtcgcccaggttcaccacgtgcctcggcaacgtggtggggccggccggccccgacgtgtcgggctgcgccgcgctcgagttcacggtgaacgaccgcccgggcctgctgtcgtccatcacgtccgtgctggccgacagcggctgccacgtcgcgtcggggcaggcgtggacgcacaacggccgcgcggccggggtgctgtacgtcacgccgccgctcccgagccggtgggcgcgcgtcgagcggctggtggaggccgtggtgggcgcgcgcgagaacgtggccggcgagcgacactggacgcgcgtgtcggggcccgcgcggggccgcgtccacacggagcgccgcctgcaccagctcatgcgcgacgaccgggactacgagtccggcccggcgccgacccccgtcgacgaggggctcttcggcgtgggcgacaaggccgcgaccaccgcgcggacggcccgccgcgcccgcgccgcgacgcgggtgtccgtcgacagctgggaggagcggggctacgtcgtcgtcaagatgacgagcagggaccgacccagtctgctcttcgacacggtgtgcgcgctcaccgacatgcagtacgtcgtcttccacgctaccgtcgggtcccagggggttctcgccattcaggaatattacatccggcacaaggacgggggcacggtcgacagcagcgccgagcggcagaaggtctcccggtgcctcgtggccgcggtggagcggagggccactcatggcgtgagagtggaggtgcacgccgccgaccgctcggggctgctatcggacttcaccagagtgctgcgggagcacggcctgtcgctgctgagagttgagctcaagaggcacagggacgaggccttcggcgtattttacctcgacacggacaccggcggcgaggtgcgcactgaggcattgcgcgccgtgcagatgagggtcgccgagatgggcatctcgctcgacgttgtaaaggagaccaaggcccctggctggccgcctgtgaggaagaccagcgtgccagccccacccgtcgccgggcagcagcctcaggagaagcccagaccttctcttgggagcctcctatggtcaaaccttgaaaagctctcaaataacttcaactacatcaggtctccagcatagacgcttccattggtgcgtcggttccagtcattttccggatctcgggtactaacaattaaaatgtcatgaaaccgtacaaatttgtatatatagtatagcatgttggcatgttgcattgcacatgaaattctttagatatttgaagatc

SEQ ID NO: 129882 - DNA, 1373 bp, Zea Mays
atcaatggtgggctgcaaaacaatttccgcaagcaggttcgcaaattgcttccatcttcttagcaactggactggacgggccggcgggctacgtacggcccaaaagcaaagctccctctctgctactccgaccgacatcctcagaaagaccagttagactagaccaccgccgctccacgcttccaccctctgctgcgggacgagctcgagaggttcgccggcgctcctgctcggccgacggccgtcgccgcgcgataataggccaggagacgcggagagatgctgtcgtccgccgccttctcctcctcaccgctgctgcgcggagccccgctgcggacccggcacctgctcctggcccctcccgcgcgcgcgcacggcggcgcggcgagccgcgcccgcggtggccttccgaggttccacgccccgtctctcccttcgtccaagggtgaggtgattcgcatccaaggagacgagttctggcacatgacgcgggttttgcgccttggcgttaacgacaaggttgaactattcaatggggtgggcagtttagctgaaggattcatacataaagttgacaaaggtggctcaggtgttgagttattagaggatgctaggatcatagctcctcaaggcatccaatggcatgtctttgctgcgtttgggacactgaaaggcggacgtgcggattggcttatagagaaatgaacttggagcttctagtgttacccctctcctgacagaacgatgtcacacaatagcggaaaatcgggtggataggttgcaacgccttgtgctggctgcagttaaacaataggatacatgaaatgtcgctgaaatccccaattcagataaggcaccttctacctgttgtatcacagtcaaagcttgctttcttagcatcagcggaagcgcctcctctttttagtgttctgccagaatccagcattgaacaaagtgggcttctgattattgggcctgaaggagacttcacagcagaggaggtacattcactgaaatcagcaggtgcggcccctgttggtcttggtccatgcaggctacgggttgagacagccacgatatccctcctatctgctctcatgctctggtcagatgctaaacaccggtaaagacagcaatgcaggtaatctaaggacagttctctcagtcatctttatggtatactagtcctctttcaggtgattagtaccatgaaataccattcaggatctagttggattcagtaaccaaaaccatgggtaattattccattggatctcagaacgcatttcagtaagagcttggtcttgggcttgaccagcatggacgatgagcatctcaatacacgatgttttgtttgagttatgttatcttag

SEQ ID NO: 129883 - DNA, 1769 bp, Zea Mays
atcaatggtgggctgcaaaacaatttccgcaagcaggttcgcaaattgcttccatcttcttagcaactggactggacgggccggcgggctacgtacggcccaaaagcaaagctccctctctgctactccgaccgacatcctcagaaagaccagttagactagaccaccgccgctccacgcttccaccctctgctgcgggacgagctcgagaggttcgccggcgctcctgctcggccgacggccgtcgccgcgcgataataggccaggagacgcggagagatgctgtcgtccgccgccttctcctcctcaccgctgctgcgcggagccccgctgcggacccggcacctgctcctggcccctcccgcgcgcgcgcacggcggcgcggcgagccgcgcccgcggtggccttccgaggttccacgccccgtctctcccttcgtccaaggtaggcgtgtttgttacagccccgcgccagcagccgtcggccgcctaggcatttcgtcgagcgcccctgtgtgtgctccttcctgttgagcgcgcggtggtcttcgtttgcactatcctggtagatcgtgtgtttcgtacagaaatatcatccaccttgtttgtgcactgaattgtcgaggggtggatttggatgtggttgcatgaaacgtcgtatacttcccctttgcatcattgtgtttttttattattatttgagacaaccgttgcctcttgcctcattgtcgtggcattttgttgagctgtggtgccgtgcattaggttattcatttcatcatgtgtagttccgtggaaacatatcgcctgtgactgagatggatgttacattgcagggtgaggtgattcgcatccaaggagacgagttctggcacatgacgcgggttttgcgccttggcgttaacgacaaggttgaactattcaatggggtgggcagtttagctgaaggattcatacataaagttgacaaaggtggctcaggtgttgagttattagaggatgctaggatcatagctcctcaaggcatccaatggcatgtctttgctgcgtttgggacactgaaaggcggacgtgcggattggcttatagagaaatgaacttggagcttctagtgttacccctctcctgacagaacgatgtcacacaatagcggaaaatcgggtggataggttgcaacgccttgtgctggctgcagttaaacaatgccagaggatacatgaaatgtcgctgaaatccccaattcagataaggcaccttctacctgttgtatcacagtcaaagcttgctttcttagcatcagcggaagcgcctcctctttttagtgttctgccagaatccagcattgaacaaagtgggcttctgattattgggcctgaaggagacttcacagcagaggaggtacattcactgaaatcagcaggtgcggcccctgttggtcttggtccatgcaggctacgggttgagacagccacgatatccctcctatctgctctcatgctctggtcagatgctaaacaccggtaaagacagcaatgcaggtaatctaaggacagttctctcagtcatctttatggtatactagtcctctttcaggtgattagtaccatgaaataccattcaggatctagttggattcagtaaccaaaaccatgggtaattattccattggatctcagaacgcatttcagtaagagcttggtcttgggcttgaccagcatggacgatgagcatctcaatacacgatgttttgtttgagttatgttatcttag

SEQ ID NO: 129884 - DNA, 1618 bp, Zea Mays
ctcctcctaactacgcctgcctgtttcctcccccgcaggattgatgagctcggcgagggtgagaggccccttcacgccgccgcagtggatcgagctggagcaccaggccctgatctacaagtacctgtccgcgaacagccccgtacctcacagcctcctcgtccccatcaggaggagcgggagcctcgcatcgtctccctacccgcctccctacttcggcacgagcacattcgggtggggctccttccagctgggctactccggcaatgcggatctggagcctgggcggtgccgccggacggacggcaagaagtggcggtgctccagggacgcggtcgccgaccagaagtactgcgagcgacacatgaaccggggacgccatcgttcaagaaagcatgtggaagaccagcctggccatgccgcgaaagccatgtccgcggtggccgtggcggctgctgctgctgctgctacccagcatgctgctgctctggccggcgccggagctactgctgctgctggcctcgctgtcaatcggcaccggcagccggggaagagctatgccacgggtgcgactgatccatgctctctgcaatatagcagggaactggcgaacaaactgtcgaacgagagcgaaaacatgcaggactctgacaatgtctcgatgctgacttccatgaacacaggaaacactgcaggcagcgtgtttccgttctcgaaacagaacactgctcttttcgaagtgagcagctcaaggccagagtttggccttgttccatcggattcactgacgagttcacctcatagttccttgaagagtgtcaaaaatctgctcagctcacggagtctgagtgagcaccagagctccgcctccctgcaacactttgtggactggcccaggacgccacctgcccagggaggtctttcatggcccgaggcagaggacatgcccagagctcagaggtcccagctctcagtatccgctccaatggcatcctccgagctatcatcggcctccacatctcccatccacgaccacgagaagctgattctgtcacctctcaagctgggccgcgagtataccccatctggcgtcgtcagcgctgcagcgaacagatacgaggttagccagctagaagcgacctgggcgacgatgttccgcgactcttcgacgggcggcccgttgggggaggttctggccaagaacaacagcaacgcggaagcaagaggttgcccgtcggcggcgccacctctaaccgactactactgctgggattcaggccacggcatgcagtcgtcccccgtgggagttctgcagatctcggttcagttgtagtgagacatcccagcatccgcctcttgtgagcccgctgggttctggccatggaaaaagcgtgagggggagcatttaccacgtagtttgtcatttgagactgatctcctgtttctgtcacctgagttcttcttttgttgcccttatacctggctttgtaactctcaccttcgttggatcgtgataggcgccgtgatgtgtggtgtggctgggtttttggtgcgccgttgatgcgtagtaccatcatataaactagtggactggcgcgctccatcgcgcgcgtttgaa

SEQ ID NO: 129885 - DNA, 2356 bp, Zea Mays
ccaaaagaaaaaccagactggtttcccgagcgcaggccgcaaccgcaaccactcctcccggccggcacaaaaccaaccgagcaccgcgcgcgcacagacacacactcaccagcaggcagcagctagctagctctctagcaacgagcacaaaacgagcaatgccgctagttccgtcccactccctcgcttcccatcccgcaccccatggaagggagcagcactagctagcgtgggacagggcggggtggtgtcgtggtgatggaagcgggcggcggcgcctcggaactcggcctgctcggcgccggatctggcaggctgctcaagcacgggcggggcgacgcggcggggggagaggaccacgggtgggtcgtcgtcgtcggcggcggcggcagggccaagcaggccaggaccgcgtccgtcggcaccggggacgcggcggccacggcggccgtgccgttcctgctgggctcctgcggcggccccggccacggcggggaacggatgctcagcttctcgtccgccgccgccgccgccccggatgatggcggtgccatgccgccgctgtactacgggaccccggcctcttgctcaggattgatgagctcggcgagggtgagaggccccttcacgccgccgcagtggatcgagctggagcaccaggccctgatctacaagtacctgtccgcgaacagccccgtacctcacagcctcctcgtccccatcaggaggagcgggagcctcgcatcgtctccctacccgcctccctacttcggcacgagcacatgtaagcgaagaaagagaggaggacgcaaaaagcaaaggcgaccgagagtgctgagtgctattgcctgggcgctagcttcagtagttcagttccatcatgcacatcgacatgataaaaaagccgcgtcggttctttccttttcggaatcttgattggcgctgctgcttgttgcctgttggcacagtcgggtggggctccttccagctgggctactccggcaatgcggatctggagcctgggcggtgccgccggacggacggcaagaagtggcggtgctccagggacgcggtcgccgaccagaagtactgcgagcgacacatgaaccggggacgccatcgttcaagaaagcatgtggaagaccagcctggccatgccgcgaaagccatgtccgcggtggccgtggcggctgctgctgctgctgctacccagcatgctgctgctctggccggcgccggagctactgctgctgctggcctcgctgtcaatcggcaccggcagccggggaagagctatgccacgggtgcgactgatccatgctctctgcaatatagcagggaactggcgaacaaactgtcgaacgagagcgaaaacatgcaggactctgacaatgtctcgatgctgacttccatgaacacaggaaacactgcaggcagcgtgtttccgttctcgaaacagaacactgctcttttcgaagtgagcagctcaaggccagagtttggccttgttccatcggattcactgacgagttcacctcatagttccttgaagagtgtcaaaaatctgctcagctcacggagtctgagtgagcaccagagctccgcctccctgcaacactttgtggactggcccaggacgccacctgcccagggaggtctttcatggcccgaggcagaggacatgcccagagctcagaggtcccagctctcagtatccgctccaatggcatcctccgagctatcatcggcctccacatctcccatccacgaccacgagaagctgattctgtcacctctcaagctgggccgcgagtataccccatctggcgtcgtcagcgctgcagcgaacagatacgaggttagccagctagaagcgacctgggcgacgatgttccgcgactcttcgacgggcggcccgttgggggaggttctggccaagaacaacagcaacgcggaagcaagaggttgcccgtcggcggcgccacctctaaccgactactactgctgggattcaggccacggcatgcagtcgtcccccgtgggagttctgcagatctcggttcagttgtagtgagacatcccagcatccgcctcttgtgagcccgctgggttctggccatggaaaaagcgtgagggggagcatttaccacgtagtttgtcatttgagactgatctcctgtttctgtcacctgagttcttcttttgttgcccttatacctggctttgtaactctcaccttcgttggatcgtgataggcgccgtgatgtgtggtgtggctgggtttttggtgcgccgttgatgcgtagtaccatcatataaactagtggactggcgcgctccatcgcgcgcgtttgaa

SEQ ID NO: 129886 - DNA, 2271 bp, Zea Mays
ccaaaagaaaaaccagactggtttcccgagcgcaggccgcaaccgcaaccactcctcccggccggcacaaaaccaaccgagcaccgcgcgcgcacagacacacactcaccagcaggcagcagctagctagctctctagcaacgagcacaaaacgagcaatgccgctagttccgtcccactccctcgcttcccatcccgcaccccatggaagggagcagcactagctagcgtgggacagggcggggtggtgtcgtggtgatggaagcgggcggcggcgcctcggaactcggcctgctcggcgccggatctggcaggctgctcaagcacgggcggggcgacgcggcggggggagaggaccacgggtgggtcgtcgtcgtcggcggcggcggcagggccaagcaggccaggaccgcgtccgtcggcaccggggacgcggcggccacggcggccgtgccgttcctgctgggctcctgcggcggccccggccacggcggggaacggatgctcagcttctcgtccgccgccgccgccgccccggatgatggcggtgccatgccgccgctgtactacgggaccccggcctcttgctcaggattgatgagctcggcgagggtgagaggccccttcacgccgccgcagtggatcgagctggagcaccaggccctgatctacaagtacctgtccgcgaacagccccgtacctcacagcctcctcgtccccatcaggaggagcgggagcctcgcatcgtctccctacccgcctccctacttcggcacgagcacatgtaagcgaagaaagagaggaggacgcaaaaagcaaaggcgaccgagagtgctgagtgctattgcctgggcgctagcttcagtagttcagttccatcatgcacatcgacatgataaaaaagccgcgtcggttctttccttttcggaatcttgattggcgctgctgcttgttgcctgttggcacagtcgggtggggctccttccagctgggctactccggcaatgcggatctggagcctgggcggtgccgccggacggacggcaagaagtggcggtgctccagggacgcggtcgccgaccagaagtactgcgagcgacacatgaaccggggacgccatcgttcaagaaagcatgtggaagaccagcctggccatgccgcgaaagccatgtccgcggtggccgtggcggctgctgctgctgctgctacccagcatgctgctgctctggccggcgccggagctactgctgctgctggcctcgctgtcaatcggcaccggcagccggggaagagctatgccacgggtgcgactgatccatgctctctgcaatatagcaggtattctcttctgtagtgggatactgcacttttggatatgatattagtacgatacttgtcggcactgtagttttcacagtagatacttccatctcaaagtcttcggtcaagtgtttccatggatttgcaaacatgaacatgttcaaaaaacgctcaaggttcccgtcgttcttcgatacacatgccacctaatcccactgtcgaacgattcgtgcagggaactggcgaacaaactgtcgaacgagagcgaaaacatgcaggactctgacaatgtctcgatgctgacttccatgaacacaggaaacactgcaggcagcgtgtttccgttctcgaaacagaacactgctcttttcgaagtgagcagctcaaggccagagtttggccttgttccatcggattcactgacgagttcacctcatagttccttgaagagtgtcaaaaatctgctcagctcacggagtctgagtgagcaccagagctccgcctccctgcaacactttgtggactggcccaggacgccacctgcccagggaggtctttcatggcccgaggcagaggacatgcccagagctcagaggtcccagctctcagtatccgctccaatggcatcctccgagctatcatcggcctccacatctcccatccacgaccacgagaagctgattctgtcacctctcaagctgggccgcgagtataccccatctggcgtcgtcagcgctgcagcgaacagatacgaggttagccagctagaagcgacctgggcgacgatgttccgcgactcttcgacgggcggcccgttgggggaggttctggccaagaacaacagcaacgcggaagcaagaggttgcccgtcggcggcgccacctctaaccgactactactgctgggattcaggccacggcatgcagtcgtcccccgtgggagttctgcaga

SEQ ID NO: 129887 - DNA, 959 bp, Zea Mays
ccaaaagaaaaaccagactggtttcccgagcgcaggccgcaaccgcaaccactcctcccggccggcacaaaaccaaccgagcaccgcgcgcgcacagacacacactcaccagcaggcagcagctagctagctctctagcaacgagcacaaaacgagcaatgccgctagttccgtcccactccctcgcttcccatcccgcaccccatggaagggagcagcactagctagcgtgggacagggcggggtggtgtcgtggtgatggaagcgggcggcggcgcctcggaactcggcctgctcggcgccggatctggcaggctgctcaagcacgggcggggcgacgcggcggggggagaggaccacgggtgggtcgtcgtcgtcggcggcggcggcagggccaagcaggccaggaccgcgtccgtcggcaccggggacgcggcggccacggcggccgtgccgttcctgctgggctcctgcggcggccccggccacggcggggaacggatgctcagcttctcgtccgccgccgccgccgccccggatgatggcggtgccatgccgccgctgtactacgggaccccggcctcttgctcaggtgagcacggcgaccgaccggtggttgtcgcggtggtgctggtgcaaagcttcctcgttttctttttcagttgcttgctgattggattttggtgattgaaaagcttgttatctatccacttcttttcgagtgtcatcgcttttcgatccgaatcaccttgctacctctctctgcgcttggactggtagtagctacagacttccctagtttttacttgtttagggctacctttctccgttgctttgctcataccagaaatggagctgatttgtgccctcttccgtttcttcttgtactcccgtcccgtcttctagcttcagtaattcatagtgtaaaagttctcccacctccggaaaaagaaaagaaa

SEQ ID NO: 129888 - DNA, 608 bp, Zea Mays
aaaccttacattgcatgttccatggaatttccgacaaagaggcttcaaactctgcatttttgtacctactattccattctagtatgttggcccatcagcattcagcacctggtccctagttccaacaagcttctgccattggatttcatggatggtaataggtttccatcccaatttccacaggccaaaacacagcagaaatttacagtggcatcagttttccagctccagctgtacatgatcctcatttgccgtaccataaacaatgtgtcgcacagtatggaagcaacagaaggaaaccggcatgaatggttaggcctccagctatacaaaaaagactccaccccgtgagcgcttttcgacgattcatgattcacagaacaattccggagctatacagaagctcactgctcgatcttcatggagcctgtagaacaccgaaggagcatttgtgtgataatggacggattactagggacatttgtatttttcagggaagagaatagagaggatcatatagataccagagttgttggtgccgctatcggctgccacgccagggttgaagttcatctgaggcatattctgaagtccttcccacatagaag

SEQ ID NO: 129889 - DNA, 1485 bp, Zea Mays
atggcccgcttgtcagtcctcatcggccccatgtcaagtacctacaggttggatcatttgtcaattaggttccatcatagtgggggatttgtgataaatcaagggaagcttgagtatgtaggaggcaaatgtgatttgtcatatgtggagttggacaaggtttctcttccagagatacagggccacctagcagatcatgttgtcagtaagaactttatgcgtttacattggttgaagccaggggcagaattgagcaatggtcttgtactgctagtcgatgatgcatcttgcctaacaatggttagtcacataactgatgctggtgttgcagaaatttatgttgaggaagttgttgtctgtcttcaaatggttgagcaaccttccaaagaatcacaaggagtcagtctaggagatgcagcagattgtggcaggggtaagcaaattgtagaagatgaagatggtggcagcagcaagcaaattgaagataataggtttgctgaatttccagtagaagataaagaggaagacactgaaactgaatcattagataaagactacttccaacccattgaagatgacagttcaggggaagatgatgaagcaattgatttcagaaaatatgccaatgaggtgaagaggaatatcagggctaagaagctaggactacaaagtggagggattggacacattaaccctgcagaattggtagatgaagttccgaacctagatgacccagggagtccatatcatgactccagtgaagagtattcatatgaagaaaacagtgaaggtgagtctaaaaggtggctgagtcaagagaacagatgcagtagacagtttaaaaaagctcttgtgaagtatggattgaaagcacacaagcacttacacttccagaaagatgagaagaatagggttagggcaaactgttcttggccgggatgcaaatggttaatctatggttccaagactaccagatcagattggtttaaggttgtcacttttatagatgagcattcttgcccacctaggagagacaataggtactatccagtcatttccatgtgtgaagccattagaaagaaggttatggtgaggatacaagagaatagggccaaggctgagaagtggacaggaacaatctgtcctaatatcttcaagaaattaaaaatcaacattctgaggtctggtagctgtgatgtgctgtggaatggtgaagatggctttgaggtgcaagagaaagaagacaggaggtacattgtgaacttggttggtagaacatgtacttgcagatattggcaactctcaggttcatgtgagcacacagcagagtacaagggggacaaggggcagaaggaccacaagggggacaacgatgtcatggggaactaccagcaggctgcagcacctgctgtttggaaacaactaataccaagactgcaccaccaagactggcttttgtcttttgtttatattctagaatgctaa

SEQ ID NO: 129890 - DNA, 1072 bp, Zea Mays
gatcctaaggcacaatagcaatctgtagagagaaagaaaaagaccgaagttggcatgggaagagatagtaaaagaagacttgaaatgatgaaataaacctaaagatttagtcttacataagagtacatgaaaaatagctatccatgtgtctgaatcttgatttgtgggttctgttaggtttacctaacttgcttgggaccaaaagattttgttgtttgtttgtttgtttgtactcaaacggcagtacttatttagatggctattgttaatgggcactactcttacaggatgttgcaaggagtgtgacaacacgtgatgtacaggaagcgcgtcgacaagacataaagaatgaaatcctcaattctgagaaattgaagtctcattttgaagagaatccaacggaccttgatttgctcaaacacgataagttgctatgcaacaaggaaattcctgcatacctgcgtgatgtccctgactacctaattgatccgaaaacaaaagaagccagcaatgctgtcaagctttccagggctgctatgcatatcgacaagccccaaaggcggaaaaggcaggggtttaagggaggatcagggaaaagcagagaccctctcaagacattctctgctgagggcaaacgagggagacggaggaaagaaagggagggagaaccagatagaagaaagaagagtaagaaggcgtgaagttgatttttcaagcagtttgctatcaagctcgcccaattttgtaggctttgtttgaagcaacttgacaaagtgctgtatcggtgacactcgtaggtcgtagctaaggagtatgtttttattgcctgatggcaactcttaatttttaaagtgtactcgcttccccccttttcctgtactgttaggaagcactaatgacgtgaaatttcattcaccaaatcaggggtatttaaagctaataatgttaagtccccccaggtggaacattcacacaaaactcgcccattccccgtggacctgtcccagatgaggccgcgcacaatgttccatttcttcacctatcaattttagatttactaaaaccatattca

SEQ ID NO: 129891 - DNA, 2357 bp, Zea Mays
aaccgccgccgcaaagaacggcccacttgactacttgaggttgagggtttcttctcctcgtgcgcactcgcgtttcctcttcatccgctgccacaatctttgcggcgccctcacacaccgccgccgccggctagagcctagggccgtaaccgtaacagccacccctgagactgagatggatacagcggaggaggctgggcaggaagtagtcagcgctgttggggaggatagtatcccggaagctgccgcctgcagcagggaggagaggaaggaggaagaggaggaagaagtggaggtgagcttcgatgaacttggcctggacgagcagctgaagagggcgttgaggaagaagggcatcctcaaggccaccccgatacagcgggaagccatcccgctcatcctggaagggaaggatgtggttgcaaaggccaagactggctctgggaagacctttgcctatcttctcccacttctgcacgagctactgaagttgtcctcagaaggacgtatacgaaaacctgcaccaaatgctttcatcctggttcctactcgagatttatgccaccaggtgtataatgaggcattatctctccttgagctctgtacatgcaaattgagggttgtgcaagttaccgcgagcatgtcggataaggatattactgttgcattgtctggcccccctaacattctcgtatcaactccagcttgtgttgcaacatgcatatcaaagggaattattcgtggacctgcagttaaagagtcactttcaatgatgattcttgatgaggctgacctacttctatcctaccgctgcgaagttgacttgaaagctctcatcccacatatcccgagaagctgtcagtctattctgatgtctgcaacttcaagctctgatgttgacaagttgacaaaactacttctgcataacccatttgttctaactctttcggaggttggtcaagcaaaggatgatgtgatccccaaaaatgttcagcagttttggatctcctgtgatgccaaggataaaatacttcatatccttgcacttctaaagtttgagctcattcagaagaaagttcttatatttgtaaactcaattgatatggctttcagattacgactgatcttggaaaagtttgggataagatctgcagttttgaatgctgagttgccacaaaattcccgactacatattatagaggcattcaacgcaaggctatttgattatctaatagcaacggatgacactaaaacaaaggagaagcaaaccaatgaggaaaataaaaaagaggcaacattgtcccgcaaacggaagaagcaaaccaataaggaaaaccagaaagagcaaaaggtgtcccgcaaacatttgcaacagactttagatgctgaatttggagttgtcagaggaattgacttcaaaaatgtatttacagtagtcaattttgacatgcctctggatgctactgggtatgttcacagaattgggcgaacaggtagagcaaataagactggtgcatccatatcgcttgtttcaccaaaggaggatagtacttttaaagagattgagcatatgttgcaagatgtcgaaaagaaagatatggactgcatttcacctttcccattacttacgaaagatgctgttgaatctctacggtatagggctcaggatgttgcaaggagtgtgacaacacgtgatgtacaggaagcgcgtcgacaagacataaagaatgaaatcctcaattctgagaaattgaagtctcattttgaagagaatccaacggaccttgatttgctcaaacacgataagttgctatgcaacaaggaaattcctgcatacctgcgtgatgtccctgactacctaattgatccgaaaacaaaagaagccagcaatgctgtcaagctttccagggctgctatgcatatcgacaagccccaaaggcggaaaaggcaggggtttaagggaggatcagggaaaagcagagaccctctcaagacattctctgctgagggcaaacgagggagacggaggaaagaaagggagggagaaccagatagaagaaagaagagtaagaaggcgtgaagttgatttttcaagcagtttgctatcaagctcgcccaattttgtaggctttgtttgaagcaacttgacaaagtgctgtatcggtgacactcgtaggtcgtagctaaggagtatgtttttattgcctgatggcaactcttaatttttaaagtgtactcgcttccccccttttcctgtactgttaggaagcactaatgacgtgaaatttcattcaccaaatcaggggtatttaaagctaataatgttaagtccccccaggtggaacattcacacaaaa

SEQ ID NO: 129892 - DNA, 946 bp, Zea Mays
aaccgccgccgcaaagaacggcccacttgactacttgaggttgagggtttcttctcctcgtgcgcactcgcgtttcctcttcatccgctgccacaatctttgcggcgccctcacacaccgccgccgccggctagagcctagggccgtaaccgtaacagccacccctgagactgagatggatacagcggaggaggctgggcaggaagtagtcagcgctgttggggaggatagtatcccggaagctgccgcctgcagcagggaggagaggaaggaggaagaggaggaagaagtggaggtgagcttcgatgaacttggcctggacgagcagctgaagagggcgttgaggaagaagggcatcctcaaggccaccccgatacagcgggaagccatcccgctcatcctggaagggaaggatgtggttgcaaaggccaagactggctctgggaagacctttgcctatcttctcccacttctgcacgagctactgaagttgtcctcagaaggacgtatacgaaaacctgcaccaaatgctttcatcctggttcctactcgagatttatgccaccaggtgtataatgaggcattatctctccttgagctctgtacatgcaaattgagggttgtgcaagttaccgcgagcatgtcggataaggatattactgttgcattgtctggcccccctaacattctcgtatcaactccagcttgtgttgcaacatgcatatcaaagggaattattcgtggacctgcagttaaagagtcactttcaatgatgattcttgatgaggtgctctccagttgtcgttcatatatatatttttgtttactttcattttgtttacatatttcattggccctgcaatgtaaagaagaatgctagcgttgaatttgtgatgctatattttctgtcacagtctaataaaataataaaaagaaatttctgtta

SEQ ID NO: 129893 - DNA, 1341 bp, Zea Mays
atggcacacggtcgtttgaggcattgcgagtcccgagtcgactctctcccgtttcccggccgtccccttcaccaatccaatccaactccaattcgtcctccggtcctccccctcgaggcctacgcacaatagattcgatctcgagtcctcgaatcctgccttttcctctggtcaggaaagcatgagcttgatttccggcgcttctcgccgtcgagctcgaaccagaagataagaagaatccgctaggggcgagccccatagaagatggccccgcacccgcaggaggacaaatcagatcggcacagcagcggcgccggtgcgtcgagggagcaggaacggcggccgtccaaggcatggggaatcctcatcttcggcctcatcggcgtcaccaccgccagtttcgctattactcaagttcgcaaaagcatggactggttctacactcagttgaataaagtgcagtcaacatcatcttggacttggaggtatacaagtaataactcaagtcgtggaagcttcagtgaggaagctaagaaaagatattatcagcgaatgcagcaggaatatgaagaggaacaagagagagttcaaagaataaggcatatgcagagtgtcttcaacagagagaggaataaatttggacgaggttatgaaagctggagggagaatggccctcctcgtggctacaattacatccctcgggatgattggtattggcagaccgatacttctcactcagaacataaaaataggcggacgtacacaccggcaggacctagggtttatcctatgtcgcatcactatgcagttctaggtcttgacagatcacgagcgacaccatatacagatgcagaagtgaagactgcttttagaacaaaagcgatggaagtgcatcctgaccaaaatcaaaatgatagagatgctgcagaagagaagttcaaggaggttgtcaagtcttacgaagcaattaaatcggagagaaaaaacggtgtaagttgatgcaaacttccagtgtggtcggatcaagtggtaaagactgggaccggatcacgcgggaatcagttgtgccttgtatatgtaatcaattgttgccggcagcttgataaaatggttcttctgttgctgttgaggacctgtagcacgagttccatttatgagcttgggcgatgtagatttggataggttcaaaagatgtgctttttgttcatttagccactaacttgacgtgctcccatcatactttgggtcaaatggggttgggccaaaaaaggtcgaaatttttttttggatcatactgtgctagcccaaagattaaaaacagtggtctaggttgactctaaa

SEQ ID NO: 129894 - DNA, 1415 bp, Zea Mays
gatcccatggcacacggtcgtttgaggcattgcgagtcccgagtcgactctctcccgtttcccggccgtccccttcaccaatccaatccaactccaattcgtcctccggtcctccccctcgaggcctacgcacaatagattcgatctcgagtcctcgaatcctgccttttcctctggtcaggaaagcatgagcttgatttccggcgcttctcgccgtcgagctcgaaccagaagataagaagaatccgctaggggcgagccccatagaagatggccccgcacccgcaggaggacaaatcagatcggcacagcagcggcgccggtgcgtcgagggagcaggaacggcggccgtccaaggcatggggaatcctcatcttcggcctcatcggcgtcaccaccgccagtttcgctattactcaagttcgcaaaagcatggactggttctacactcagttgaataaagtgcagtcaacatcatcttggacttggaggtatacaagtaataactcaagtcgtggaagcttcagtgaggaagctaagaaaagatattatcagcgaatgcagcaggaatatgaagaggaacaagagagagttcaaagaataaggcatatgcagagtgtcttcaacagagagaggaataaatttggacgaggttatgaaagctggagggagaatggccctcctcgtggctacaattacatccctcgggatgattggtattggcagaccgatacttctcactcagaacataaaaataggcggacgtacacaccggcaggacctagggtttatcctatgtcgcatcactatgcagttctaggtcttgacagatcacgagcgacaccatatacagatgcagaagtgaagactgcttttagaacaaaagcgatggaagtgcatcctgaccaaaatcaaaatgatagagatgctgcagaagagaagttcaaggaggttgtcaagtcttacgaagcaattaaatcggagagaaaaaacggtgtaagttgatgcaaacttccagtgtggtcggatcaagtggtaaagactgggaccggatcacgcgggaatcagttgtgccttgtatatgtaatcaattgttgccggcagcttgataaaatggttcttctgttgctgttgaggacctgtagcacgagttccatttatgagcttgggcgatgtagatttggataggttcaaaagatgtgctttttgttcatttagccactaacttgacgtgctggtgtaaggacactacacgctcttagccaggttagcaagaaaaggctcagccccaatcttacagatgcaggcaaccaaataatccctatataaaaggcggactagatcatgagacgttcctcggtattcggtaacaatagaaatgacagagcatcaagctctttgctgattattcctct

SEQ ID NO: 129895 - DNA, 1420 bp, Zea Mays
gcagtactgcagcggatcccgatcccatggcacacggtcgtttgaggcattgcgagtcccgagtcgactctctcccgtttcccggccgtccccttcaccaatccaatccaactccaattcgtcctccggtcctccccctcgaggcctacgcacaatagattcgatctcgagtcctcgaatcctgccttttcctctggtcaggaaagcatgagcttgatttccggcgcttctcgccgtcgagctcgaaccagaagataagaagaatccgctaggggcgagccccatagaagatggccccgcacccgcaggaggacaaatcagatcggcacagcagcggcgccggtgcgtcgagggagcaggaacggcggccgtccaaggcatggggaatcctcatcttcggcctcatcggcgtcaccaccgccagtttcgctattactcaagttcgcaaaagcatggactggttctacactcagtcaacatcatcttggacttggaggtatacaagtaataactcaagtcgtggaagcttcagtgaggaagctaagaaaagatattatcagcgaatgcagcaggaatatgaagaggaacaagagagagttcaaagaataaggcatatgcagagtgtcttcaacagagagaggaataaatttggacgaggttatgaaagctggagggagaatggccctcctcgtggctacaattacatccctcgggatgattggtattggcagaccgatacttctcactcagaacataaaaataggcggacgtacacaccggcaggacctagggtttatcctatgtcgcatcactatgcagttctaggtcttgacagatcacgagcgacaccatatacagatgcagaagtgaagactgcttttagaacaaaagcgatggaagtgcatcctgaccaaaatcaaaatgatagagatgctgcagaagagaagttcaaggaggttgtcaagtcttacgaagcaattaaatcggagagaaaaaacggtgtaagttgatgcaaacttccagtgtggtcggatcaagtggtaaagactgggaccggatcacgcgggaatcagttgtgccttgtatatgtaatcaattgttgccggcagcttgataaaatggttcttctgttgctgttgaggacctgtagcacgagttccatttatgagcttgggcgatgtagatttggataggttcaaaagatgtgctttttgttcatttagccactaacttgacgtgctggtgtaaggacactacacgctcttagccaggttagcaagaaaaggctcagccccaatcttacagatgcaggcaaccaaataatccctatataaaaggcggactagatcatgagacgttcctcggtattcggtaacaatagaaatgacagagcatcaagctctttgctgattattcctct

SEQ ID NO: 129896 - DNA, 2276 bp, Zea Mays
gccaaagccggccaccccaaacgcgagaaagcttggcttctcagttctcagaaagtcaagcgaaaaaaaaacagtacaggaagaaaatagtagataaaaaaatcctcttcaccgtttcctcttccttctccccgtgcgagctgtgactctgaagccgccgccgcctcccgcctgcctctccatctccgtccacgccgcgtcataaaaatcccccttcaaggcccgacctagcacctaccctcgccacccgcccattccagttcccaatccgatcggtgcacgagctccgaatccactatccctgttgttggcggcctccagctcccgctgggaccatttccgtttcagggaggcggtctactctgtatttagatccgccccctccttgcggtagtcgggggagcggatttaggtgaacaagcatcttgattttttttgaccccccaatctttgctctacccaccgcgtggtcttcgcctttaaatcctctggaggtggatagacggacgaggcaaagccgaaggcaagaacggtcgtttcaagtatcctgctaccggcgtccgaaggaaccttcaagtgttccagtggaggtattaggagtggtggggaaaaagggattgtagaggtaacgatgttgagacagagctctagtagaaatcagagatccagaggtctgaagctgaagaaagctcttcagattagtctcttgcttctggtttctgtttggttgctctaccaagttaagcattcttacgagaagaaggcggcgtacagcgaaggtgaagtgaatgatttgcataaagatgacaagggccagggagaggcagtcagattgggcaggaaggatgtgcctccaaagatggaggctgattcttcaacactggatgagcgggttgaggatgaagagaacgatgaagtggagcaagaaatgaagcatgatgagaacgatgaggatcccatcgatgagcaagacctggagaaggacgaggatcttcccgagcctggcgagcattcttctgaaaaggatgaagatgtgggtgtgtttgaggacgaagagcggaaggagcggtcacaggaggatcaagagaagagcttccatggtgacgatgtgtctagtgctgttactcatgatcctcaatcgtccgagcaagatgagctgttccatcatgcccaagacacggtcctattcgtggatgatgcttcaactgcagtgcccaatgaaaaccatgtggctggaaacgacgaggaggaagtgcagagggctagggaaaggagtttcagaggcgatgatgtgtcaagctccgtggatcatgacgccaaggtggcaaagcctctcccagaggaacaactgaacagcatggataagatatttgaaggcaccacaaacttgtctaacggaatttcgtttcgagctcctggaataaatggatcatatgccggcatggacaatgtggctacagtaccaactaattcaccttcacagaaaaacgcaggcactcctagcaatgacatagaaagcaagacccacccatctccggcaaatttgaccggaccagagcaaagtaattcgactttgaaagatcacccagatcaacaagtgaattcaacagcagtgctgggcaaccaagtacagcctttgactaaccagacgccgtggcccgagttggattctccaaatggcaccttggctctggtaacagatgtccaaaagtccacatctggagctggagatgatggcagcagcactgtggacaagaggacggacggtagagatggtcccaaagaagacgtggatgtgtccacgaaaataatgaacagggcaatcagtgaggatgaagtcgttccagagtgacaaggagatctctcttgccggcttctggtgtaacctgtaagtttgtaggacttggtttcgtctcctagactagacttggagatgcgcaagcaggctgtctcgttgtgcacgccttttgtgtaagtttgatagatgtctgcttttgtactgccagttagtagtccatcacaatgatctgggtcgagtggagaacaagaagcatgtgtacccacagaaatatatgtagcgattctgcagctcttgaagcttcgctgctcgaatcaaatgccagagtaggcagctaaataccatctatcaatgaaatgtccatgcccatcgctgcccaattttgtgtctgaatatgtgtaggtgtgaatcgtggtgcttgactgcttgcaaagtggaaatgtgcccgatgttgtagtagtagtaacagtgcgctgtt

SEQ ID NO: 129897 - DNA, 2047 bp, Zea Mays
tcccctcgctttcgcttcgccggcactccatccgtccatcgtggcccaggctgtcgttccgttctataaagggcgtcgagaggaaaccggtggaaccctacactgagaaccgcagagacaggcgtcttcgtactcgcctatctccgcgactcaaagctttccccaattcccccccttctcccatttctcaccaccgccgccgctccccccgttcaacaacaccatgagggagtgcatctcgatccacatcggccaggctggtatccaggtcggaaacgcgtgctgggagctgtactgcctcgagcatggcattcaggctgatggccagatgcccggtgacaagaccattgggggaggtgatgatgctttcaacaccttcttcagtgagactggcgctgggaagcacgtcccccgtgctgtttttgttgaccttgagcccactgtcatcgatgaggtgaggactggcacctaccgccagctcttccatcctgagcagctcatcagtggcaaggaggatgcagccaacaacttcgctcgtggtcactacaccattggcaaggagattgttgacctgtgccttgaccgcatcaggaagcttgcagataattgcactggtctccagggcttcctcgtcttcaacgctgttggtggaggaacgggctctgggcttggttctctcctcctggagcgcctgtctgttgactatggcaagaagtccaagctcggtttcaccgtgtacccatccccccaggtgtccacatccgtggttgagccatacaacagtgtcctgtccacccactctctcctcgagcacactgatgttgctgtcctgctcgacaatgaggccatctatgacatctgccgccgctcccttgacattgagcgcccaacctacaccaacctcaacaggcttgtctcccaggtcatctcatccctgacggcttccctgaggttcgatggtgctctgaacgttgatgtgaacgagttccagaccaacctggtgccctacccgaggatccacttcatgctttcgtcctacgctccagtcatttctgctgagaaggcctaccacgagcagctgtccgtggctgaaatcaccaacagcgccttcgagccatcctccatgatggccaagtgcgacccccgccatggcaagtacatggcatgctgcctcatgtaccgtggtgatgtggttcccaaggacgtgaacgctgctgtggccacaatcaagaccaagcgcaccatccagttcgtggactggtgcccgactggcttcaagtgcggaatcaactaccagcctcccagcgtcgtcccaggcggtgatctggccaaggtgcagcgtgccgtgtgtatgatctccaactccaccagtgttgtggaggtcttctcccgcattgaccacaagttcgacctcatgtacgccaagcgcgccttcgtgcactggtacgtcggtgagggtatggaggagggcgagttctccgaggctcgtgaggatctggcggcgcttgagaaggactacgaggaggtcggtgctgagtttgacgagggtgaggacggcgacgagggtgacgagtactagacgctctactggcgcggcgtcgtcgggcttgtgtgccactgctatcctgtgatctgccctgagtggctcctatcgtgttatgtttctgtcggttcttatctatctgtcgttgtgtggtttacaacttacgttgtaagactttattcccccgctttgctactgggttattaagtttggcgttattgttttcttgatctctgagatgctttgctttcaccacctgttttttttttgtcatctgtgtaattgagtcgacggacaatcattttcttgcttcgagcaggcgagagcagcacacgagttgcagacagatcttactgtggcaataaaaaaaataaacaataataaatatgtagcgaatattaatcaacacattgattctctagaaggatagtatattatataagtctcgtgagcgtcccaggtaatgatatcatcgaaattaggaaacaaaacgataaaaggggg

SEQ ID NO: 129898 - DNA, 2047 bp, Zea Mays
ctataaagggcgtcgagaggaaaccggtggaaccctacactgagaaccgcagagacaggcgtcttcgtactcgcctatctccgcgactcaaagctttccccaattcccccccttctcccatttctcaccaccgccgccgctccccccgttcaacaacaccatgagggagtgcatctcgatccacatcggccaggctggtatccaggtcggaaacgcgtgctgggagctgtactgcctcgagcatggcattcaggctgatggccagatgcccggtgacaagaccattgggggaggtgatgatgctttcaacaccttcttcagtgagactggcgctgggaagcacgtcccccgtgctgtttttgttgaccttgagcccactgtcatcgatgaggtgaggactggcacctaccgccagctcttccatcctgagcagctcatcagtggcaaggaggatgcagccaacaacttcgctcgtggtcactacaccattggcaaggagattgttgacctgtgccttgaccgcatcaggaagcttgcagataattgcactggtctccagggcttcctcgtcttcaacgctgttggtggaggaacgggctctgggcttggttctctcctcctggagcgcctgtctgttgactatggcaagaagtccaagctcggtttcaccgtgtacccatccccccaggtgtccacatccgtggttgagccatacaacagtgtcctgtccacccactctctcctcgagcacactgatgttgctgtcctgctcgacaatgaggccatctatgacatctgccgccgctcccttgacattgagcgcccaacctacaccaacctcaacaggcttgtctcccaggtcatctcatccctgacggcttccctgaggttcgatggtgctctgaacgttgatgtgaacgagttccagaccaacctggtgccctacccgaggatccacttcatgctttcgtcctacgctccagtcatttctgctgagaaggcctaccacgagcagctgtccgtggctgaaatcaccaacagcgccttcgagccatcctccatgatggccaagtgcgacccccgccatggcaagtacatggcatgctgcctcatgtaccgtggtgatgtggttcccaaggacgtgaacgctgctgtggccacaatcaagaccaagcgcaccatccagttcgtggactggtgcccgactggcttcaagtgcggaatcaactaccagcctcccagcgtcgtcccaggcggtgatctggccaaggtgcagcgtgccgtgtgtatgatctccaactccaccagtgttgtggaggtcttctcccgcattgaccacaagttcgacctcatgtacgccaagcgcgccttcgtgcactggtacgtcggtgagggtatggaggagggcgagttctccgaggctcgtgaggatctggcggcgcttgagaaggactacgaggaggtcggtgctgagtttgacgagggtgaggacggcgacgagggtgacgagtactagacgctctactggcgcggcgtcgtcgggcttgtgtgccactgctatcctgtgatctgccctgagtggctcctatcgtgttatgtttctgtcggttcttatctatctgtcgttgtgtggtttacaacttacgttgtaagactttattcccccgctttgctactgggttattaagtttggcgttattgttttcttgatctctgagatgctttgctttcaccacctgttttttttttgtcatctgtgtaattgagtcgacggacaatcattttcttgcttcgagcaggcgagagcagcacacgagttgcagacagatcttactgtggcagcacagtgcacacttcaccctccggttccgcttctgttttgtgtccggttactctgcggcgcaaagcgagcgctggtggtgtggcgcgtcgtcgggctgccacgcagaccgctatggtgcagtggcggtctcgcggccgaaacccatttgttgtacctcaatgcttacttacgccttatgaaggcctcatcgaggctttggtgttt

SEQ ID NO: 129899 - DNA, 2297 bp, Zea Mays
tcccctcgctttcgcttcgccggcactccatccgtccatcgtggcccaggctgtcgttccgttctataaagggcgtcgagaggaaaccggtggaaccctacactgagaaccgcagagacaggcgtcttcgtactcgcctatctccgcgactcaaagctttccccaattcccccccttctcccatttctcaccaccgccgccgctccccccgttcaacaacaccatgagggagtgcatctcgatccacatcggccaggctggtatccaggtcggaaacgcgtgctgggagctgtactgcctcgagcatggcattcaggctgatggccagatgcccggtgacaagaccattgggggaggtgatgatgctttcaacaccttcttcagtgagactggcgctgggaagcacgtcccccgtgctgtttttgttgaccttgagcccactgtcatcgatgaggtgaggactggcacctaccgccagctcttccatcctgagcagctcatcagtggcaaggaggatgcagccaacaacttcgctcgtggtcactacaccagtaagtaatctgatcggatcttaagttggcattgatcccagatattcaatctgtaatgaaaaccatacttaaacttgatttgcttgtcttgcagttggcaaggagattgttgacctgtgccttgaccgcatcaggaagcttgcagataattgcactggtctccagggcttcctcgtcttcaacgctgttggtggaggaacgggctctgggcttggttctctcctcctggagcgcctgtctgttgactatggcaagaagtccaagctcggtttcaccgtgtacccatccccccaggtgtccacatccgtggttgagccatacaacagtgtcctgtccacccactctctcctcgagcacactgatgttgctgtcctgctcgacaatgaggccatctatgacatctgccgccgctcccttgacattgagcgcccaacctacaccaacctcaacaggcttgtctcccaggtactgtctctgtgtactgtactggctttggattcagtctgatttgtattcttggcttttgtctaaccattggctcttactgatgttgttcaggtcatctcatccctgacggcttccctgaggttcgatggtgctctgaacgttgatgtgaacgagttccagaccaacctggtgccctacccgaggatccacttcatgctttcgtcctacgctccagtcatttctgctgagaaggcctaccacgagcagctgtccgtggctgaaatcaccaacagcgccttcgagccatcctccatgatggccaagtgcgacccccgccatggcaagtacatggcatgctgcctcatgtaccgtggtgatgtggttcccaaggacgtgaacgctgctgtggccacaatcaagaccaagcgcaccatccagttcgtggactggtgcccgactggcttcaagtgcggaatcaactaccagcctcccagcgtcgtcccaggcggtgatctggccaaggtgcagcgtgccgtgtgtatgatctccaactccaccagtgttgtggaggtcttctcccgcattgaccacaagttcgacctcatgtacgccaagcgcgccttcgtgcactggtacgtcggtgagggtatggaggagggcgagttctccgaggctcgtgaggatctggcggcgcttgagaaggactacgaggaggtcggtgctgagtttgacgagggtgaggacggcgacgagggtgacgagtactagacgctctactggcgcggcgtcgtcgggcttgtgtgccactgctatcctgtgatctgccctgagtggctcctatcgtgttatgtttctgtcggttcttatctatctgtcgttgtgtggtttacaacttacgttgtaagactttattcccccgctttgctactgggttattaagtttggcgttattgttttcttgatctctgagatgctttgctttcaccacctgttttttttttgtcatctgtgtaattgagtcgacggacaatcattttcttgcttcgagcaggcgagagcagcacacgagttgcagacagatcttactgtggcagcacagtgcacacttcaccctccggttccgcttctgttttgtgtccggttactctgcggcgcaaagcgagcgctggtggtgtggcgcgtcgtcgggctgccacgcagaccgctatggtgcagtggcggtctcgcggccgaaacccatttgttgtacctcaatgcttacttacgccttatgaaggcctcatcgaggctttggtgttt

SEQ ID NO: 129900 - DNA, 1598 bp, Zea Mays
tcccctcgctttcgcttcgccggcactccatccgtccatcgtggcccaggctgtcgttccgttctataaagggcgtcgagaggaaaccggtggaaccctacactgagaaccgcagagacaggcgtcttcgtactcgcctatctccgcgactcaaagctttccccaattcccccccttctcccatttctcaccaccgccgccgctccccccgttcaacaacaccatgagggagtgcatctcgatccacatcggccaggctggtatccaggtcggaaacgcgtgctgggagctgtactgcctcgagcatggcattcaggctgatggccagatgcccggtgacaagaccattgggggaggtgatgatgctttcaacaccttcttcagtgagactggcgctgggaagcacgtcccccgtgctgtttttgttgaccttgagcccactgtcatcgatgaggtgaggactggcacctaccgccagctcttccatcctgagcagctcatcagtggcaaggaggatgcagccaacaacttcgctcgtggtcactacaccattggcaaggagattgttgacctgtgccttgaccgcatcaggaagcttgcagataattgcactggtctccagggcttcctcgtcttcaacctcaacaggcttgtctcccaggtcatctcatccctgacggcttccctgaggttcgatggtgctctgaacgttgatgtgaacgagttccagaccaacctggtgccctacccgaggatccacttcatgctttcgtcctacgctccagtcatttctgctgagaaggcctaccacgagcagctgtccgtggctgaaatcaccaacagcgccttcgagccatcctccatgatggccaagtgcgacccccgccatggcaagtacatggcatgctgcctcatgtaccgtggtgatgtggttcccaaggacgtgaacgctgctgtggccacaatcaagaccaagcgcaccatccagttcgtggactggtgcccgactggcttcaagtgcggaatcaactaccagcctcccagcgtcgtcccaggcggtgatctggccaaggtgcagcgtgccgtgtgtatgatctccaactccaccagtgttgtggaggtcttctcccgcattgaccacaagttcgacctcatgtacgccaagcgcgccttcgtgcactggtacgtcggtgagggtatggaggagggcgagttctccgaggctcgtgaggatctggcggcgcttgagaaggactacgaggaggtcggtgctgagtttgacgagggtgaggacggcgacgagggtgacgagtactagacgctctactggcgcggcgtcgtcgggcttgtgtgccactgctatcctgtgatctgccctgagtggctcctatcgtgttatgtttctgtcggttcttatctatctgtcgttgtgtggtttacaacttacgttgtaagactttattcccccgctttgctactgggttattaagtttggcgttattgttttcttgatctctgagatgctttgctttcaccacctgttttttttttgtcatctgtgtaattgagtcgacggacaatcattttcttgcttcgag

SEQ ID NO: 129901 - DNA, 1074 bp, Zea Mays
caggcgtcttcgtactcgcctatctccgcgactcaaagctttccccaattcccccccttctcccatttctcaccaccgccgccgctccccccgttcaacaacaccatgagggagtgcatctcgatccacatcggccaggctggtatccaggtcggaaacgcgtgctgggagctgtactgcctcgagcatggcattcaggctgatggccagatgcccggtgacaagaccattgggggaggtgatgatgctttcaacaccttcttcagtgagactggcgctgggaagcacgtcccccgtgctgtttttgttgaccttgagcccactgtcatcgatgaggccatctatgacatctgccgccgctcccttgacattgagcgcccaacctacaccaacctcaacaggcttgtctcccaggtcatctcatccctgacggcttccctgaggttcgatggtgctctgaacgttgatgtgaacgagttccagaccaacctggtgccctacccgaggatccacttcatgctttcgtcctacgctccagtcatttctgctgagaaggcctaccacgagcagctgtccgtggctgaaatcaccaacagcgccttcgagccatcctccatgatggccaagtgcgacccccgccatggcaagtacatggcatgctgcctcatgtaccgtggtgatgtggttcccaaggacgtgaacgctgctgtggccacaatcaagaccaagcgcaccatccagttcgtggactggtgcccgactggcttcaagtgcggaatcaactaccagcctcccagcgtcgtcccaggcggtgatctggccaaggtgcagcgtgccgtgtgtatgatctccaactccaccagtgttgtggaggtcttctcccgcattgaccacaagttcgacctcatgtacgccaagcgcgccttcgtgcactggtacgtcggtgagggtatggaggagggcgagttctccgaggctcgtgaggatctggcggcgcttgagaaggactacgaggaggtcggtgctgagtttgacgagggtgaggacggcgacgagggtgacgagtactagacg

SEQ ID NO: 129902 - DNA, 409 bp, Zea Mays
tcccctcgctttcgcttcgccggcactccatccgtccatcgtggcccaggctgtcgttccgttctataaagggcgtcgagaggaaaccggtggaaccctacactgagaaccgcagagacaggcgtcttcgtactcgcctatctccgcgactcaaagctttccccaattcccccccttctcccatttctcaccaccgccgccgctccccccgttcaacaacaccatgagggagtgcatctcgatccacatcggccaggctggtatccaggtcggaaacgcgtgctgggagctgtactgcctcgagcatggcattcaggctgatggccagatgcccggtgacaagaccattgggggaggtgatgctgagtttgacgagggtgaggacggcgacgagggtgacgagtactag

SEQ ID NO: 129903 - DNA, 1171 bp, Zea Mays
atgagggagtgcatctcgatccacatcggccaggctggtatccaggtcggaaacgcgtgctgggagctgtactgcctcgagcatggcattcaggctgatggccagatgcccggtgacaagaccattgggggaggtgatgatgctttcaacaccttcttcagtgagactggcgctgggaagcacgtcccccgtgctgtttttgttgaccttgagcccactgtcatcgatgaggtgaggactggcacctaccgccagctcttccatcctgagcagctcatcagtggcaaggaggatgcagccaacaacttcgctcgtggtcactacaccagtaagtaatctgatcggatcttaagttggcattgatcccagatattcaatctgtaatgaaaaccatacttaaacttgatttgcttgtcttgcagttggcaaggagattgttgacctgtgccttgaccgcatcaggaagcttgcagataattgcactggtctccagggcttcctcgtcttcaacgctgttggtggaggaacgggctctgggcttggttctctcctcctggagcgcctgtctgttgactatggcaagaagtccaagctcggtttcaccgtgtacccatccccccaggtgtccacatccgtggttgagccatacaacagtgtcctgtccacccactctctcctcgagcacactgatgttgctgtcctgctcgacaatgaggccatctatgacatctgccgccgctcccttgacattgagcgcccaacctacaccaacctcaacaggcttgtctcccaggtcatctcatccctgacggcttccctgaggttcgatggtgctctgaacgttgatgtgaacgagttccagaccaacctggtgccctacccgaggatccacttcatgctttcgtcctacgctccagtcatttctgctgagaaggcctaccacgagcagctgtccgtggctgaaatcaccaacagcgccttcgagccatcctccatgatggttcccaaggacgtgaacgctgctgtggccacaatcaagaccaagcgcaccatccagttcgtggactggtgcccgactggcttcaagtgcggaatcaactaccagcctcccagcgtcgtcccaggcggtgatctggccaaggtgcagcgtgccgtgtgtatgatctccaac

SEQ ID NO: 129904 - DNA, 895 bp, Zea Mays
tctacaaataccatttagatctgtttttcatggctcaacaagttttcacttttttaaaattattcagaggatatcagcaaaagatgcacttgatgcggaatatttctggactgatcctttaccttgcgatccaaaaagcttgcccaagtatgaggcatcacatgaattccagactaagaaaaagcgtcagcaacagaggcaggcagaggaagctgcaaagcgtcaaaaacttaatcatcctccaccacattctcgcttgcctccaatccagcagccagggcaagcacatcctcaaatcaggcctggccagggtatgcacaatgtgcctcctgtggcagctgggccaggccatcactatacaaagccccgaggaccaggaggccctaaccggtatcctccgggtgggaatcaggggggaggctacaatccgaaccgtggaggtcagggtggtggctatggcagtggcccatatccccagcaagggcgagggcctccttatcctggaggtggaatgggtggaacagctggtccacggggcagcggtggcagtggctatggagctggaggtccaaactaccaacagggtggtccatatggcgcgtccggtccaggccgaggatcaaactactcccagggtggtggttcccgcaatcagcagcagtatgggaactggcaataacgtggcattgagatgtatgtatatgcagaatgcatttgcagcatctttgcagtttaatcatgttgtgattagtactgtaatacagtccagatatcgtaatagggctgtttgtggcaagcccgagcgttgccaaagggacccttagcatagtctcatttttacctcatcacaaaaccaacttaaacacaataatagtaaactttccgtatgagatcg

SEQ ID NO: 129905 - DNA, 1743 bp, Zea Mays
gagcagcgccgtcgcggacgggctctcccttcgccgccgccgggtactcggcgctccatccaggcactccagccacccccaccccttcctccgccgccgggtactcggcgctccatccaggcgtccccgccccgcggccgcctgctactcgttcgggcgctccatccagcgttctccctccagctccagtctccggcgcgatgaagatcgcggtggaggggtgcatgcatggggagctggacatagtctatgacacgctgcgaaggctcgaggaggccgagggcgtcaagattgacctcctcctctgctgcggcgatttccaggctgttaggaatgagaacgatttacagtgtgttagcgttccacaaaagtatcgtaccatgaacacattttggaagtactactcaggagaagcagttgctccgtacccaaccatctttattggtggaaaccacgaagcatccaattatctgtgggaattgtactatggaggatgggcagcacctaacatatactttttggggtttgctggtgttgttaagtttggaaacatacgaattggtggattgtcaggaatacataacaaacaccattatcatttaggacactatgagaggcctccatacaataaagatactatacggtctgtgtaccatgtaaggcattatgatgttctcaagctcatgcatttgaaggagccgctagatgtattcttgtcacatgattggcctctgggcattaccgagtatggaaactggcagaagctcattagtgtgaagaagaactttgaagatgaggttaacaatagaacactaggcagcaaacctgcagctgaattactgaacaagctaaaaccaccatactggttttcggcgcaccttcactgtaagtttcctgctgttatccagcatggcaagaatggacctacaacgaagtttcttgcacttgataagtgcattcctgggcgcaattttttgcaggttatagacattccatccaatccaggaccatatgaaatccagtatgatgaagaatggcttgcaataacacgaaaattcaacagtgttttccctttagcacggacacagtttactatgcgggatgagcagctcgacactcaagaagaccggcaatgggtcaggagcaagttgaatactagaggagctaagccttttgattttgttcagactgcaccatctttcaatccttccagtacaacatctaaacagtccataacagtttgctgcaggaatccacaaactgagtcttttcttcagcttctggaactcccatatctgctggactcatctaaatctgagatgtttggtagaaatgagtcaacttctcagacaggaaacacacttgataatgaagatatagagctaccagatgaagatgaggatgctttagaagatgacgagtgaaggacagcacttttagacaagtaccattgcacctatcatgttggttgcagggtttgcgatagatttcattgtcttttgtagattgcaatctatatatctagacgaggaactaacatgtactagattgtattgtcatagctgcttttttgttggaggacgtttgtggatctagagggtgatctgttgatcacaatgccaactctttggtgtttagttcatacagttttttgaactaactacaattaatcagtagactagatgcatccggtggaaagtgttaacaaaaatatcatctactagcaaggtagagatcagctat

SEQ ID NO: 129906 - DNA, 3303 bp, Zea Mays
ctgcttttaatttccctccggattccagcgcttccttccgcctctcctccccaatcccatcgacacctgtaacgcaagtgcacatgggggacggcggcggcggtatcggcaggaggccctcgacctcgaggcgatgacgcgcgcgcgcgcgaggggtctctgggcgctgctgctcgttgcgctggtggcggcggcggtggcgcccggggcgctggtgctggcgcagggagggaccctgacgtcgcggtcggatctcgtggggctgtacgcgctgcggggctcgctcggcctgagggcgcgggactggccgcggcgtgcggacccgtgcgcggcgtgggcgggcgtgggctgccgcgccggccgcgtcgtctcgctcagcgtcgccgggctgcggcgcacgcggctggcccgcctgtcgccgcgcttcgacgtcgacgggctgcgcaacctcacgcgcctcgaggccttcagcgccgcggggttcgggctgcctggctccatcccggcgtggctaggcgccgggctcgcgcccacgctccagtccctcgacatctccgcctgcgccgtctccggggagatcccggcctccgcgctcctgggcctcggcaacctcaccaccctcaacctcgcaggcaaccaactgtccggccaactcccggccaccgcgctcccgaggctcacgcgtctcaggacccttaacctctcgcgcaatgcgttctcgggcgccctgccccacgcggtctggtcgctcccggggctcagcgttctggacgtgtctcgtaacaacctcaccggcgcattgcccacgccagggcttgcgctgccagccaatgcgcaggtggtggacctgtcggggaacttcttctatggcggcgtcccagagacctttcgtcggctgttcgcccaggtgctgcttgccaatatttctgggaactactttgacggcgagctaggagtgtccgacggtggtggcggcaatgtttcgtttcagttgaattgcttccttgatgttctgggacagcgtacacaggttgattgccagcagttctatgccagtcgtggcttgccttatgatggtccagttatcccacccgcaccacagcctgcaccttcaccggtaaggaagaagcacaagaatctgaagtacatactgatcggggccattggtggaggcctcctgctgatagccgttgttgcagccattgtgttctgctttgtgtgttctgggagtacagggaggaggaatcatcagagagaaagtggggcatcaccaagtgcaccatcgggagtgtcagctaccggcacagctgcagctactggtggcacgcagccttctgcattgtctgcaaacacggtgaaagtcggcgattcgtttgcttacgaccaacttgtcaatgccacctcgggatttggggaaaataggctcatcaagcacggtcactcaggtgatctataccatggtgtgctccaagacgggactgccgtggtggtgaagaggatcacttcgcgtgtgcctcggaaggatgcttatctggcagagttagatttgtttgcaaaaggagtgcatgaaacgctggttcctttgttggggcactgccttgataaagaagaagaaaaggttcttgtgtataggtttgtccgaaatggtgacttgtcaaatgcactgcacagaaagtcaagggaggaaaatgaaggcttgcaatctttggactggattaagaggttgaagattgcaacaggggtagctgaggctctttgctatctgcatcatgagtgttctccaccaatggttcacagggatgtgcaagccagcagcatccttcttgatgataaatttgatgtgcgtcttggtagcttgagcaaggtgtgtcctcaagaaggggaagggcaccaaaatgttatcacaaagctgttaagattttcttcgacagcagatcaaggttcttctggttccccatctgcaacttgcccatatgatgtctattgttttggaaaagttttactcgagctggtgacagggagacttggtatcagtgcatcaaacaatgctgccacgagcgaatggcttgatgccaccctgcggtacgtcgatatttacgagaaagagcttatgagcaagatcattgatccaacgcttattattgatgaggaccacctggaggaagtctgggcaatggcgattgttgccaagtcctgcttgaatcctcggtcttctaaacgcccaccaatgaagtacatcctaaaggcactagaaaaccctttgaaggtggtgagagaagacaatggcaatagctcggccaggttgagagcaacatcgtctcggggttcatggaacgctgcactctttgggagttggcggcatagctcgtctgatgtaggtccttctagggacgacaacattctgaaacgctcagagacaatcagatcgtccggcgggagcaatggggaccattcttcctcccgcaggaggcaatccaaggagatcttccctgagccgtctggctctcgtgacaccgaggattaaggggctgtttggttcgtatctaaatgtgccacactttgcctaagattagtcgttcgaattgaagaactaaccttaggcataaaagttaggcaaagtgtggcaacttaggcataaccaaacaggccttaagcgtgaaggagaatctttcttactaatcactttttcggtaaggcgggagtccttatggaggagggctctgttagagctccgcttgctgcttctgatagaattctttcgtccaaaaagtcaggaatgtgaattctctctcctactcaatggcttcacaacagcacactggtgccatgcagccatggtaatcaattttggggcaagtagcaacggtggaatgtacgttggtgtaccaatggcatgcagttggcagcagtgaaaagtcttcacggttggaagtctggtgtctcttttcgtttgcccctcctctcggttaaagaaagaatggcgagctgattctttttcttctccctactgtaattgattgtttcattgttgatcatagcagaaatgttcttttcattcatgcagtgcttggcatcttgtcttctcctcactttgattttttttttgtttcctgtgcgagcttgatattagactgtgtctctagtgaatcttctaaaataggggtcactgtagatgatacactctttacatagtgagatttaaaataggaaatacgataatgtgatatggagatagccttacaacgtgagacggacggcgccatcgtaggtgggccaaagccaaaagcccaaaaacttgatagg

SEQ ID NO: 129907 - DNA, 979 bp, Zea Mays
ccaccggtccatctccaacccccacacgccttctgcacctctctcccgctcgagctgtagggttgaaccgttgaaccaacctcgtcttcctttccaaggaaacggccccgggaccctgccgataaaagctgacgccacggtaccattgccaaggccagcaaaagcttccagtcttgttggctccgttcctccatgaaccagtagcctctggggttttcggtcagtgccttggcttgtgttggggacgcaatggtgaaggacggcggcgtgaagaaggtggcggtggcggcgccggcgccggcgccggaggaagcgacgccaaccggcctgaccgcgacgccgaccctcaccgtgcagctgctggcaccggaggcgcgggagaagtgctacaagaagacggtgggggaggaggcgacgttcctggagatcgccaaggactacttcaaccagttcaaggaggtacccgcgcaaaagcactggatctgcttcaagagctacttcgaccagaagcgcggctcggtgttcggcaaccgcaagcagaagatcgaccctgcggtcaaggatgagactccggaggtggtgaagcccgcagcagcagcagttgaatctcactgaggctttgttcggcagtcacggatcaaatcccttaggctacgttcgaagattttaattctccaagtggatctaatagggattgaatagatccctccctttcactcaatcacctttggggtttaatccccctttggtctaacccctgtccaaaaaagtctatttggttaatccccgctcttacaagatgcatgcaactcatgaatgcatgatgcctatgctgcaatgtggtataaacaggaacccttgctattgggggcaagatgtagatgttgtgcagtatggcaactccatcagcggatacatacataacaatgtttctgaacacatgcaactcatgaagttgcaaatatgcttctgttctcgc

SEQ ID NO: 129908 - DNA, 558 bp, Zea Mays
tacaaattagtgattatatcatcagttctgaaatctctagtcctttgtttctatcacctattgctccataaaacagcatcacatggcaagcattcagccaccacagcttgcaagtatctcccaccagcacaagcgtgttacaagacccagtgcttccaggccacctgcacttcaaacaaaatcaacttgcagcaggggcactccagcttcaaaatgcagctcattccgaacccagatattcaactgggctccgaggccactgcttctcgtaacagcctcagaactatcctgagtacagtggcacctgtgccacacaatggtcaccggaatcccgaatcatggtgggaaaatggatgtgattttagtacagtatccagttcccagccacaaaacaactaagtttacactttgctggtacaagttaaacagtaaaaccatacatcaactcaactttcaactgtaaggaagaaacatgccgaagtgcaagcaactgccatggaatctgctgaaatttcttgatgaagtggaaatgttccagttcaactaactcccagtcca

SEQ ID NO: 129909 - DNA, 273 bp, Zea Mays
tttcaataaatttacatagtgccattcagaactctgtatgattagcaaaactccacatgaaccagttatatacatcgcaaatctacaacaagcaaacaatcatattcttcttacctagcactgcctacaggtatatatatatatgtattgatccatccaaatggtccagtgcaccctgcagctctacactacagtctacctttactccatcaacaactcatgcacgacagttatatgtttatcagaatgtacatggctaatatagtattaagc

SEQ ID NO: 129910 - DNA, 219 bp, Zea Mays
atggggtggtggtggtggtggtggccgttggcgtcctgggtggaggtggctgggctggggaggggagacgaggagttgggcgtgggagacgaggggttgggcgtgggagacgaggagctgggggctggacgcggggtgggagacgaggggctcatcccgcctgttgctagactgctcagttctccataccgtgatccgaataaatgtcatgtggagtga

SEQ ID NO: 129911 - DNA, 1827 bp, Zea Mays
ttcaagcgcgcaactgacgcattggccgtaccccctcgcggcctctcaactatccccaccccaaagagaaaaggaaataaatccccaattaccgacatcgacgccgacggcgatgtccctccgcaagcgccagcgctcggcgagcagctcccgcctcaccgccttctgctcgccaccgtcccctcccgctcccccgtctacttccagctctcccaacccgcataccttccccaacgccgacgtcgtcctccgcctcttcctcaacccctcctcccccgacgacgtggacgtcaagcccgacatcgaccgccacctctccgcagccgtctcatccggaaccttcgtcgacctgcacgtctcgtccgcgtccctcctccgctcccgctacttcgccgccctcctttccgaccgctggcccaccgccgcgactggccgcctctccctcgcggtggtggcgcccccctcttgtccccgcccgttcgatgcccacatcgaggtgctccgcctcctccacactctcgatttcgcgggtgccatccgctcccccgacgatgccctcgacctcctccccatcgcactcctgctcctcttcgacgcctgcgtcgaggcctgcatccgcttcctcgaggccgtgccctggtccgaggacgaggaggcccgcatcatcgacctggcgcggctcctccccgccgatgaggcagccgacctgctcgccagggtttctcctcctcccgtcgccgccggcccttccgctgcgggggtggcccccaggtcgccctccgaggcgatgctgcacggcctgatccactcggcgatccatggccaccccgtccacgctgccaccaaggcgttcgtagcgatgctccttaaggactatccgtcgcggaactgcgtccacaaggtgctcgacgaggcatttcagtcgcgcctggacacaatcaaggaactcatggggaagtacgctagcccggatttcagggttgcggtggacagtgatgaacgcgaggccatacagaggcttaacctgcagtctgcggtgttgaatgtgaaacacctgtattggctcatcgagaggatggtcgatctgagggtggcagataatgcggtgacgctgtggagtgatcaagctgccctggctactgatttgcagaagttgctgaatgatgcagacatgtggcggaacatgacgcctgggcttccaatgcttgtgactcgttgcacactcaagctcgccaattcagtcatcactggggagactctggtacctcggcaggtgaggaggatgctcgtcagaagctggctccctgtcctaaacgtctgccgggacattgttcaaccaatgcactcccagaaatcaaccaactgccaagagctggagggggcgtttcttcagatcatctccacattgccttttctagaagcacaggagctgctgcagcaatgcctggggttctcgactcgcaatgtcgatgactgcccgcatctggtcacggcattcaagacgtggttccggcgcgctggccgggctcctctaggcggggaaaactgaaacatgagcggatgtctgtatgcgcccaatcggtgcttgtgtcgctttgtattctcacatcacatagtctgctatcggcctacctacatcctctggatttggtatagtgcttgcctctctctctctctcgaatttgtctgtatatactgtcggtcgtttttgcacttaattgcacctactacttttagctattgtctataatcaataaccaaggtaaatgtatgcagcgtatgatccgtgtttttaactctaacaatgaggtctgcgtgcctattttc

SEQ ID NO: 129912 - DNA, 813 bp, Zea Mays
aacacatcgccgtgcgcgtgcgtccacttcattgctgctcatgtacccctacacgtttcgggcggccgccagcagcagcagcagcagcacggcactcgggttcgcgctcggccggatcggcggcaccacgaggagcggcggcgtcgctgcgccaggcttggtggtacccgccgcgggcgtagcacgcgggaggagcgtctcctcgacgccggccggcagcgcacccgtgccgggcgaccagggcgtcggcatggagcagccgaagcagcagcagcagcagcccaaggtgcccccgcaggacgccgccgggggcgagaacaagcgcgacgacatgcacaagcacaccagggacgtgatgacccactcgttcggggaggggtactcgacgcgctccgacgaggagggcttcggcggggtgtacggcgggaacgaccccgtggaacaccccggcgccgagatccatcctagccactccgagtacgacacgtcgcagggctcggaggtaaaggagaaggagaaggcgcgccacctcaaggacgagaagcatgccaccgcctagaggcgccggcggcgacatcaggcagggctgtcggcgtttagtttagtcgagttcgctttgctcccggcctctgggcgcgtcacgtactcagcgtggttcgctaggctgctttcgaaatactacagtactatccaagtttgctgagatgtaaaaaaaatagtaagctgtttcaaggagcttccgtgctagtacatgttatttctgctctttgcttctatgtaatacaagccacaattattttgcgcctgcaatat

SEQ ID NO: 129913 - DNA, 685 bp, Zea Mays
aacacatcgccgtgcgcgtgcgtccacttcattgctgctcatgtacccctacacgtttcgggcggccgccagcagcagcagcagcagcacggcactcgggttcgcgctcggccggatcggcggcaccacgaggagcggcggcgtcgctgcgccaggcttggtggtacccgccgcgggcgtagcacgcgggaggagcgtctcctcgacgccggccggcagcgcacccgtgccgggcgaccagggcgtcggcatggagcagccgaagcagcagcagcagcagcccaaggtgcccccgcaggacgccgccgggggcgagaacaagcgcgacgacatgcacaagcacaccagagtacgacacgtcgcagggctcggaggtaaaggagaaggagaaggcgcgccacctcaaggacgagaagcatgccaccgcctagaggcgccggcggcgacatcaggcagggctgtcggcgtttagtttagtcgagttcgctttgctcccggcctctgggcgcgtcacgtactcagcgtggttcgctaggctgctttcgaaatactacagtactatccaagtttgctgagatgtaaaaaaaatagtaagctgtttcaaggagcttccgtgctagtacatgttatttctgctctttgcttctatgtaatacaagccacaattattttgcgcctgcaatat

SEQ ID NO: 129914 - DNA, 2374 bp, Zea Mays
ttttaaatcccctgccgccgctcgtccccgccgtcgtcccccccttccatcattctcccaaaacgacaccgcagaattccccggccgcgccgatacccaccctacaccattccgcgattctaccaccggaaacggcggggagcgccatggcgtacatgtgcgccgacagcggcaacctcatggccatcgcgcagcaggtgatccagcagcagcaacaacagcagcagcaagagcaccagaggcaccaccaccaccacctaccgatgccgctcccgctcccgcccccgccgcgccaggcgctgcctatgccaccggccacggcgcccccgcacggccagatcccggcggcgtccctgccatacggcggcggcgcgtggccccaggcggaccatttcttccctgacgccttcgtgggcacgtccgcggccgatgcggtgttctcggacctcgccgccgccgcggacttcgactccgatgtctggatgaacagcctcatcggggacgcgccggtcttcgcggactccgacctcgagcgcctcatcttcaccaccccgccgccgccgccgcccgtacccgctcccgctcccgctcccgcttctgctgtggcccccgtcgacgcggcggcccagcccgaggccgccaccccggcgtcgcttccccagcctgccgccgtcgctgcgccggcagcgtgttcctctccgagctccctggacgccgcctgctccgcgcccatcctccagtccctcctcgcctgctcccgtacagcggccgctggcacggggctcgctgccgcggagctcgccgaggtgcgcgctgccgcttccgacgacggggaccccgcggagcgcgtggcgttctacttcgcggacgcgctggcgcgccggctcgcgtgcggcggcggggcgcaagcgcaaccctcgctggcggtggactcgcgcttcgcccccgacgagctcacgctctgctacaagacgctcaatgacgcctgcccctactccaagttcgcgcacctcaccgccaaccaggccatcctggaggctacgggcgcggcgaccaagattcacatcgttgacttcgggatcgtgcagggtatccaatgggcggcgctgctgcaggcactcgccactcgcccgggggagaagccgtcccgggtacgtatctccggcgtgccttcgccgtacctggggccaaagcctgcggcgtccctcgccgcaaccagtgcccgtctccgcgacttcgccaagcttctcggggtggacttcgagttcgtcccgttgctgcggccggtgcacgagctggatcggtcggatttcttggttgagcctgacgagaccgtagccgtcaatttcatgctccagttgtaccacctccttggcgactccgatgagcccgtgcgacgtgtcctccggctggttaagtcgctcgatccatcggtggttacccttggggaatacgaggtcagcctgaaccgagctgggttcgtcgatcgttttgccaatgcactgctgtattacaagccagtgttcgagtcgctggacgtggcgatgccacgggactcgccggagagggtgagggtggagcgatgcatgtttggggagcgcattcgaagggccattgggccagaggaaggcgcagagaggactgataggatggcggctagtagggagtggcagacgctgatggagtggtgtggctttgagcctgtcaagctcagcaactacgccatgagccaggccgatcttttgctctggaattacgattccaagtacaagtattcacttgttgagctgccaccggcgttcttgtctctggcttgggagaagcagccgctgctcaccgtgtccgcttggcggtgagtccctttttttttgtgtgtgtattggtgctgttgtatgtagcattgtcataggaccagggaagaaatgaatagactggttttgcattgtcttaatttccttccaaaatgatgacaatggctagatggtataattggggactttagttaccttgtttgatgtttgttcttctacatgatcagtagctagagcaaatttagcgctaaatgtatagaaatggatagcaggtgaggtggagtagactgcttgctcatgtggttttctgaattctgatgacagtggcgagtggtcattctatatgtctatggatttgaaaaagcatgcaggcacctccatcgttgcaatcaataagcttacagtcgcaaagctaactagtataacaaatgtggtgttattgcacctactattctcgtgtatttggtaccaatggtagtgtagtgcacgaaatgaaattctgcacctaatgtcagccttgcattgtccagtttatgctgcgtgctaccccagggttgtcattt

SEQ ID NO: 129915 - DNA, 739 bp, Zea Mays
ccgtcctcatcctttccgggcttggcatggccgttctccttctcctcagagggcttggcatcgcagcggcgaccgcggatatcgaaatcgggcggcgaagccctagatctgcgacgacggtccgcgtcgacgccgaggaaaggcgagcggggtggacatagggacggggacgcgcggcgcttgcgatggcgcggggagacgtcatcgtggtgattagggcggcggcgcagcggggagacggagttggccgggaccgggaccgggaccgagggtttgctattttctgtggaatctgtgcagctctgctgtatcgcgtaattgcctagtttgcgtttaataatctgcggctctacactcctccagtctccactagcatggttgtatgcctgtattcagccttgccacgttccacgcacggtctccgcgtttggatgaggaggcgtcagagtcagaatgaactagaagcattgggcctgggccacgttccgcgcacggactcctcgttttgggcgcgattggatccttgtattcggcctcggccagggactcctgaccgtagagggcgagaaggcatcgggccaaagaagacgcgcaagatttctagctggtccaggctaagcgtttggctcccaataataaagtttagagtcttatgggctatataatctatacataatatatattataatttttgagattataatttatatgtatctgtttggttacctagattatacga

SEQ ID NO: 129916 - DNA, 728 bp, Zea Mays
ccgtcctcatcctttccgggcttggcatggccgttctccttctcctcagagggcttggcatcgcagcggcgaccgcggatatcgaaatcgggcggcgaagccctagatctgcgacgacggtccgcgtcgacgccgaggaaaggcgagcggggtggacatagggacggggacgcgcggcgcttgcgatggcgcggggagacgtcatcgtggtgattagggcggcggcgcagcggggagacggagttggccgggaccgggaccgggaccgagggtttgctattttctgtggaatctgtgcagctctgctgtatcgcgtaattgcctagtttgcgtttaataatctgcggctctacactcctccagtctccactagcatggttgtatgcctgtattcagccttgccacgttccacgcacggtctccgcgtttggatgaggaggcgtcagagtcagaatgaactagaagcattgggcctgggccacgttccgcgcacggactcctcgttttgggcgcgattggatccttgtattcggcctcggccagggactcctgaccgtagagggcgagaaggcatcgggccaaagaagacgcgcaagatttctagctggtccaggctaagcgtttggctcccaataataaagtttagagtcttatgggctatataatctatacataatatatattataatttttgagattataatttatatgtatctgtttggttacct

SEQ ID NO: 129917 - DNA, 2045 bp, Zea Mays
tgttatcgctccgcaaaagcgcgaggagggagagcgccaccacacctctgttcctcggtctccttctcttcctcgctaagcaaccgggcgcagcctgccggcaaaggcgagggcgcgggaagcccgcgttatttattagaataaagaagcacccagcccgcctgtgactgtgagaggccggcgcggagggagtctcatcagatcgtgccctctgtctgtccgtgtgtctgattacgcgtgcgtgcgagggtcagagaggagggagggagggaggggctctggagatgacggggagaagggagcttctgctgcttgcgctcctgggagtccttcagctagctcttcgtctaccttccgcagcgtcgcagtccttcatcggcatcaactacggcgaagtggccgacaacctcccgccgccgtcgtccaccgcgcgcctcgtccagtccacgaccatcaccaaggtgcgcctctacgggaccgacccggccatcatctccgccttctccggcacgggcgtctccctcctcctgggcgccaccaacggcgacatcgccaacctcgcgtcctcgcccgcggccgcggcggcctgggtcgccgcgcacctcccggcctcgtcgccggccgtctccaccgtctccgtcggcaacgaggtcctctttgccgacgcctcgctcgcgtcgcagctcgtcccggccatgcagaacctgcacgacgcgctgccgcccaactccagcgtcaaggtgtccaccgtgaacgccatggacgtgctggcgagctccgacccgccctcctccggcgcgttcaagccggagctcgcggcggcgctcgacccgctgctggcgttcctgagcaagaccggctcgccgttcctcatcaacccgtacccctacttcgcgtacctcagcgacccgcgcccggagacgctggccttctgcctgttccagcccaacgccggccgcccggacgcggggtcgagcctcacgtacaccaacatgttcgacgcgcaggtcgacgccgtgcgcgccgcgctggacgccaaggggtacaaggacgtggacatcgtggtggccgagaccggctggccgcacaagggtgaccccgacgaggccggcgccacggtggagaacgcgcgcgccttcgtgtcgggcctcgtgtcccacctccgctccctgtccggcacgccgcgcgcgcccggcaagtcggtggagacgtacatcttcgccatgtacgacgaggacctcaagcccggcaaggcgtcggagcggtacttcgggctgttccagaccagcctcgccgagacgtacccgacggggttgctcaggaacggcacggccggaccgataccagccacggcgccggctccggcgccaaccacgtccgccgcgacgctgaagccaacgccagggcagcagacacaggtgactccagcgcagcagggctcgacggcggcagctgggccttccggcatctgcaggccggggccagggacggctacgtcgagagggaccactaccgcttgcgcccaacctagtgctgctgaatcgtctcgcgcttcctcgatgctccctatcattgccggttttccggtcatagctttgctgatgtttacatgacctttttttttctttatgcttttttctgcctaatgtattgcgccacctctcgtattctagtacgtgtttcacgatccaagcacagcgtcgagatttaaagtacgataacagcatttgccattgtcactttgttaaaggaatctgaaaagagactcgaaaaaagcaagcgtccaaatgaatacaaatataatgagattcagtgtcaaagaatgatcagctaaagacatacaaaccaagtttggtggtttgttggcacacaaaaacaccaacagaaaggaaccacgtgcatgcaggacatacacaccgcggactgagcaagggcaacaaaaaacaacaatcgcagaccgagtccagtgctgcaagacccaaaactgtttacaaacctcaaaaacaacagcagtaacaattgtattcacgctcctgagtgtgaaa

SEQ ID NO: 129918 - DNA, 839 bp, Zea Mays
gtgttgaggtggaggctcctgatgattcatcttcaaaaggtaaggatgagctcaataagactaaagatgcagtggcgacaccagctaccgtacaggaacagaaacacagccaaacattgggaaatggggatagggaagaacctaacaacattgaaagtgtagttgtcggtgaagagaagggctctgtagtgactgccaaccgacctgattccatagctaggctcaaaagagcagcagctactgctgtttcagcagctgctgtgaaagctaggtttctcggtgatcaggaggaatatcaaattcgaaggctgacagcacttgtaatcgaaaagctgttccaaaaaatagaagtgaagatgtcattgttttcagagattgagcaggtggtctttcgaacgagagagtacaccgagaagaccagaaagaagctcctgaaggaacgaaatgcgattattgcagctcggatgggcgcattgccgtctaggccaaaccagacaggtgtagccggaaacaggttaccacctggactgtcggactcatgagcattagtccgacgaacctattcacaggttatgatgatcatgctttccctggcattctacatggagctggcagatcatttgcatgggtctgctgaccctttctaaggaatgtcagctccatggtgttcaccgccaagaccgacgagcgtcgactactcatcgacttctactacatcctcgtgctaaagaactctatcattagtttgggacaactcgatagatcgactatggtgtcttgcacgtctagattaggggtaaaaacgattagaatatatctcgttctgttttgctctggtt

SEQ ID NO: 129919 - DNA, 1523 bp, Zea Mays
ggcttttattgaaagggcggagttattaattcctaacctggaggtgactatttgcttactcaattacatttacagctgtgactgattcacaaattaggcatattgctgacatttactggctagggttccttattttacaatatatctattgcaatttgctagcatgacatttgattgagtttcatccaagcggaagtagatatattcagaataagggggtgtttgaaagtaattttagaggtttgagataaaaccatggtattggagaatactatagtattttttccaagagatgtttggatatcttgtaaaaaaaaactctgttttgaataccatagtttagtagttacaattataattttttggagtatttaaaactccactacaacctgaagtttttgtctatgagactgactagcttcttgcacatgtatactaaataccatgatttgagatactttgtctccaaacaagtattatttggttatttggtgtgatgtaaaaaatactatggttgtgctataatattttaaaaccatagtattctaaaaccgtggtttgaaatactctgcttccaaacatgtcctaagccttgctagttgctacactagtaccgcgtgtgtgttttttttcctgattgaccagctcaccagcatgagagtaaatatttttgatgttctgtgttacgtattccctcaatcctgctaaaggtgtttgtgataaattgcattgccccttatccattttcagttgactctctttttctatatattgtctatcttgcagaacctaacaacattgaaagtgtagttgtcggtgaagagaagggctctgtagtgactgccaaccgacctgattccatagctaggctcaaaagagcagcagctactgctgtttcagcagctgctgtgaaagctaggtttctcggtgatcaggaggaatatcaaattcgaaggctgacagcacttgtaatcgaaaagctgttccaaaaaatagaagtgaagatgtcattgttttcagagattgagcaggtggtctttcgaacgagagagtacaccgagaagaccagaaagaagctcctgaaggaacgaaatgcgattattgcagctcggatgggcgcattgccgtctaggccaaaccagacaggtgtagccggaaacaggttaccacctgggtatggcaaccctcctgtaaggcctccaaacgcaatgcctcggcccaccagctgaggaaattccggattccggacacccagtgatctataccccattcttttagaagcataccccaaagactcaaacctgccagcttgttgtagcattttttagaaagtacattgtacaattgtctgtataactgcttctatgaaaattcaccaaacctccacaactgttttaaacattccatcagataggaaaattccatttctctacaatgaacagcccacttgaccgttagcaagattatttctgctcaatttactaaaatagaatgctatatatctgctcaaagtttacttgcct

SEQ ID NO: 129920 - DNA, 875 bp, Zea Mays
gtgttgaggtggaggctcctgatgattcatcttcaaaaggtaaggatgagctcaataagactaaagatgcagtggcgacaccagctaccgtacaggaacagaaacacagccaaacattgggaaatggggatagggaagaacctaacaacattgaaagtgtagttgtcggtgaagagaagggctctgtagtgactgccaaccgacctgattccatagctaggctcaaaagagcagcagctactgctgtttcagcagctgctgtgaaagctaggtttctcggtgatcaggaggaatatcaaattcgaaggctgacagcacttgtaatcgaaaagctgttccaaaaaatagaagtgaagatgtcattgttttcagagattgagcaggtggtctttcgaacgagagagtacaccgagaagaccagaaagaagctcctgaaggaacgaaatgcgattattgcagctcggatgggcgcattgccgtctaggccaaaccagacaggtgtagccggaaacaggttaccacctgggtatggcaaccctcctgtaaggcctccaaacgcaatgcctcggcccaccagctgaggaaattccggattccggacacccagtgatctataccccattcttttagaagcataccccaaagactcaaacctgccagcttgttgtagcattttttagaaagtacattgtacaattgtctgtataactgcttctatgaaaattcaccaaacctccacaactgttttaaacattccatcagataggaaaattccatttctctacaatgaacagcccacttgaccgttagcaagattatttctgctcaatttactaaaatagaatgctatatatctgctcaaagtttacttgcct

SEQ ID NO: 129921 - DNA, 894 bp, Zea Mays
atggagcccaagccgtcttcggcggcgcatgctgacgcgccagcggtcgaggccccccgccgccgtggcggcggcggcaagcgcaagtcggccgggtcctcgttcacgccgtcgaagcgtcaggccaaggagcggaacgcttccttccacgtgcccccgcatcttctgcacagcgggccgctcacccgcgccgcgcgccagtcgccgcacaagctctcgggcacgccgtcggagtcggtgccagcgtcgtcggcggccgcaactggggacggggtgagcggcgggcaggcggtggttgatgcgatccggcccgagacagaggaaacgccggccccggagctgccgctggtagacgagatgttcgaggccgtccgatcccgtggcgctggcgtccatgtggtccctacctttgctggatggttttcgtggaaagaaatccacccagttgagaagcagaccttgccttctttttttaatggaaaatctgagaagcggacacctgagctggagtccaaagacctggctgagttgtcaatcggggagaccgatgctcggcaggaaatcttggaattcttggatcactggggcttgataaatttccaccctttcccaccagatggacatgaggagagtaagccagaggagacccaagacaattctaatgacgagaaagcttctttgatcgagcaactgtttaagtttgaatcagttcaatcatatatgacgcctttaccaatgaaagaagatgtgagagctccgcctcctctgcctagcttgattcctgaatctgtactcattcaagatgtggttgcagcagctgagccttctgttgagtaccactgcaattcctgttcagttgattgctcacggaagcgctatcattgtcggacccag

SEQ ID NO: 129922 - DNA, 104 bp, Zea Mays
gcccgcacggcgcgcactgatccgcgagttcaggtaagaccgagcgattctcggcatgatctcctaagcgctcggccaccacacaacggcgcttggcgcatgca

SEQ ID NO: 129923 - DNA, 1045 bp, Zea Mays
gtgcatctctcaattgaaccctaacagtataaaatcgcaggcgccgcccgctcccctctccaatatccctccattctcctaccaaaaatcgcagcgccgcccgcaccaatctcgaagtgttcgaaagtttccagacccccaaaaggcgaagcggcgatgagttccaccggaggcggcggccgcgggaaggcgaagccagcgaccaagtcggtgtcgcggtcctccaaggctgggcttcagttccccgtcggtcgcatcgcgcggtacctcaaggccgggaagtatgcggagcgcgtcggcgccggggcccccgtgtacctctccgccgttctcgagtatctcgccgccgaggtgctggagctggccgggaacgctgctcgggacaacaagaagaaccgtatcgtgccgcgccacatccagctggcggtgcggaacgacgaggagctgagcaagctgctgggcactgtgacgatcgcggccggcggcgtgatgccgaacatccatcagaccctgctgcccaagaaagctggtcagaagggggacatcggctctgcctcccaggagttctaagcgtttcggcggaatgaggagagggaccgccccctgtttctgtctcgtccgcgtggttgtgtttcagctctgcggtttttgggggagtgctgtcgatgagttgggattgatatgggttgtggggatgtaaacaaacgcagcgcgttgtttcatgaatgaatgatggatagaaggaacatatctatcatgatttctaccctggttgcatttggatccgatttgctcctatcgtttggtccattgtatcagacctgatgatggaactctttatatcggttctatgaactctgcatcatttgtcagatttcaattcctgttgatggcctcagtgagcctcaccgatcgattgtgctggttcaagttttcctacgggttctctttgccatgtaccaaaatctttgccaggttcgggagcgacatgtctcgacctccccggcgccgcgctgcgacgcggcgtgcgcgtacagcgcgagga

SEQ ID NO: 129924 - DNA, 987 bp, Zea Mays
gtgcatctctcaattgaaccctaacagtataaaatcgcaggcgccgcccgctcccctctccaatatccctccattctcctaccaaaaatcgcagcgccgcccgcaccaatctcgaagtgttcgaaagtttccagacccccaaaaggcgaagcggcgatgagttccaccggaggcggcggccgcgggaaggcgaagccagcgaccaagtcggtgtcgcggtcctccaaggctgggcttcagttccccgtcggtcgcatcgcgcggtacctcaaggccgggaagtatgcggagcgcgtcggcgccggggcccccgtgtacctctccgccgttctcgagtatctcgccgccgaggtaatcccccgacccctcttcctctcttcatgttcaccagatctgctcttgtccgatctcgtttgaatcgccgttgtgaatcgattgtttccttcgtttccgcaggtgctggagctggccgggaacgctgctcgggacaacaagaagaaccgtatcgtgccgcgccacatccagctggcggtgcggaacgacgaggagctgagcaagctgctgggcactgtgacgatcgcggccggcggcgtgatgccgaacatccatcagaccctgctgcccaagaaagctggtcagaagggggacatcggctctgcctcccaggagttctaagcgtttcggcggaatgaggagagggaccgccccctgtttctgtctcgtccgcgtggttgtgtttcagctctgcggtttttgggggagtgctgtcgatgagttgggattgatatgggttgtggggatgtaaacaaacgcagcgcgttgtttcatgaatgaatgatggatagaaggaacatatctatcatgatttctaccctggttgcatttggatccgatttgctcctatcgtttggtccattgtatcagacctgatgatggaactctttatatcggttctatgaactctgcatcatttgtcagatttcaatt

SEQ ID NO: 129925 - DNA, 2023 bp, Zea Mays
aaaaagagtaacaaactactaccgtcttccatgtttcgctttattttgcttatagtatgaatggcttgccaaactatacaaagggattgatttctatcccggtggttcctacaaattgctaactaacaaagaacgctggaattccctcacagaagcttataataccattggaacaaaaaaaaaaacatcctccgatgcatatcaggtacgcatccttaatttgctttccaggttattctgttgatgcagattcggaggacccagacagtgaaaacctattgaatcaaggaatttgtaaatactcgtcaaatatgcatcattgagttgtttctcagcattcttttgctattgatgccgacctggtcacctggaggtgccaactactgaaaaaatccattggcaactgccaagcgtgtactgacacggctggttcatgatcaactactccggtccaaatagtaatcatgtattgacagccggtcaaaagcatcaaaatttgccttcaaaccaacaaactgacttccaagctgtgcacacggagcatctggccatctgcacccttctcttgtgcggaaggggcagaatgattcgcaaaaatggtccgccggtgcatccgggccaagccacgagacaccccactcgagacagctccgattcttcaccagcgagacttccaaaaccttgatcctctgttctgcccccgccagcagtagcgacgccttcaggaagggagtgacgtcggggacgccaccgccgtcggtccgaaatggacggggctttcgcccatggaagacagcgctgagaagcacgacgccctcaccaggggaagcgacgcccaggggcgtcaccgtcgtcaaggcttttgccaaagaaaaccccaacacaatgccaagcgagggccccgggacaaaagcaagctacctccgccaccgccgccctgacgcacaaaccccgcagctaccgccggggccactgctgcccacttgttgttgccacacaccaccaccggggagccagatccgacggtcggcctcgccgtacccacaaagaggccacagcacacctcacctcctccgctcctcactgccgcaccaccatggggagctcgcccgccggcgctccacaaccagcatcggcctcagggacggcaaatccggccaccggacctccagatctgactgccgccccaaggccaatctgctgcggccaccgaccgccccgacttgggccaccggcagcggccaactccatgccccacgaacagaggcagcttcgacgctggcgtggcccacagcccacggagcatgcgcgccaccggatctggttccaagcgcggcggccaagccaagcaggggacgcggggggcgaggtcccgcggccatggccccgctgccgccatcctcgcatctgcacggactcccggctgtctgctctggcgacggcgaggctggaggaaggaggaagcggcgggtgttgtggtggtggcggagtcgccgcccgtgtcacccgcggagttgcagcattctccctttgagcacttcgggctgtgactagagctatactattaatacgtttctccctctgcagaaagagaaggaaaaaactggtggagcaaggaaacctcagaattcgaaagacaacaagtgaaattttcagaaaagctcatggatggaagtcggttgatagacgcattcaatgaagtttgtatgttagtatgtccttttggtttaaccgtgctgggagctgtattcatgtgggtgctctgttcgtaaacttgtttaagttcttagtttgcgatgtcatgctcttgtcactttcggtgtggctctttgttctctgcttttgggcaaatatgttagatggtctgaaactcctcggtggaaggctttccccgtgttatgttttctttagctgatagttgcgtgcgttttgtcggcttttcgttttctggtggccttaacggtcatgtatgaactatgtttctgtctatttcgtaatgaaatagggggtgttccccctttgt

SEQ ID NO: 129926 - DNA, 2110 bp, Zea Mays
gaaaaaatccattggcaactgccaagcgtgtactgacacggctggttcatgatcaactactccggtccaaatagtaatcatgtattgacagccggtcaaaagcatcaaaatttgccttcaaaccaacaaactgacttccaagctgtgcacacggagcatctggccatctgcacccttctcttgtgcggaaggggcagaatgattcgcaaaaatggtccgccggtgcatccgggccaagccacgagacaccccactcgagacagctccgattcttcaccagcgagacttccaaaaccttgatcctctgttctgcccccgccagcagtagcgacgccttcaggaagggagtgacgtcggggacgccaccgccgtcggtccgaaatggacggggctttcgcccatggaagacagcgctgagaagcacgacgccctcaccaggggaagcgacgcccaggggcgtcaccgtcgtcaaggcttttgccaaagaaaaccccaacacaatgccaagcgagggccccgggacaaaagcaagctacctccgccaccgccgccctgacgcacaaaccccgcagctaccgccggggccactgctgcccacttgttgttgccacacaccaccaccggggagccagatccgacggtcggcctcgccgtacccacaaagaggccacagcacacctcacctcctccgctcctcactgccgcaccaccatggggagctcgcccgccggcgctccacaaccagcatcggcctcagggacggcaaatccggccaccggacctccagatctgactgccgccccaaggccaatctgctgcggccaccgaccgccccgacttgggccaccggcagcggccaactccatgccccacgaacagaggcagcttcgacgctggcgtggcccacagcccacggagcatgcgcgccaccggatctggttccaagcgcggcggccaagccaagcaggggacgcggggggcgaggtcccgcggccatggccccgctgccgccatcctcgcatctgcacggactcccggctgtctgctctggcgacggcgaggctggaggaaggaggaagcggcgggtgttgtggtggtggcggagtcgccgcccgtgtcacccgcggagttgcagcattctccctttgagcacttcgggctgtgactagagctatactattaatacgtttctccctctgcaggtattgtttcatagattccaatttcaatttgatatcttttgccctccacttagcaatatcctttgcatgtccattccatggtaaaaaggaaaaatataaggcatatctgatacacataggccattttgaactgaatgttataatagttctctcctatgttagttaagcttcaaccaagaatttgctttgtccttcaatcttgtttaatagaagtttctaaacaactaccaaatttaacaaataatatatggccttgtgtaccacaataaaatggtcacaacaaaataaataaaatgcaatgctataaataattaccttcgttgtatctgcatattttttattcatagcatgccactgggattcaagatcacacctttgggctgattggttggccggctgtgcgaagccgggcaggcgcgagcctggccagccgcatacgcagatttcgggcgtaccggcggatatagaaaaatagcagtaaaataaattattttgtatctactcgtgcagctcacgtctgtcacatacaggtaaccaaacaggtgcttgcataaagtcaatgcatacaatagctcaggatcaaatggtgcaggtaaccaatcacatggcttgtgactcaatggggcatgtccacctcaaaaaaaaactagggccagagtgttgggacaagtgctgcagcagggggcaatagtgcaccattatggattatagtgctcatggaagctgccgccagaagctctcagattagccaaatgtgaccacatgcaacgacaggagattgtgacaccagattgctccctttctcgttcacttccatttcaaaccaaaaattagatgaagaatattatacaataaatatgatccaggtgtacaggtgaaaaaataattaaaagctattttttctctat

SEQ ID NO: 129927 - DNA, 848 bp, Zea Mays
atgggctctgtcatcggcacggcggtcaatggcgtcggctcgctcgtcggggacttcgtctcgtcgccgttcaacggtgtcgcctgcgagcgcgtttgctcgggggcatgggacttgctctgcttcatcgagtatctctgcatcacaagactgttcaagttcttcttggctgtcatactcgtcctcgtcgtgctctacgcctgttatatcctatgcaagataggcgtcgtcaagtgtttggccaagaactcctgcaaggtggtgtgcatgcccttctggggctgctgccgcgtgctctgccacctctggcgcaaggtgcgagacaccgagcgagtgtaccgcggccggcgccagcccggcgacatcgaggcgggggatctcagcacgagaagctatggctacagtggctcgtcgtcgccgtcctcctcctccgattacagtggccaccgtgggcgcgccgtagcggccaggtccaaatgggactcgtcgtcgtcggcgcgggagaggaggaaggacaggcttcggcagtccctgcgcacgaggagggccaactccaaggtggagcacgccatgagaatgagccgtgagagtgaaagagaacgccggcacccccatcatccccattcgatcggggccaggaggaaggaggcttcgtcccttcacgaacatggctcggcacctcgtgaccatgctcatgcgcaccgccgtacatgaaaggcaacctttgccgattccgcctgacattggcactgctagtgtacagtagagtacctgtagtaagtttgtatcccatcaattgattatatccttacacagggatcatacaaaaataatactttgattttggt

SEQ ID NO: 129928 - DNA, 1710 bp, Zea Mays
cgccccgccccgccccgcacatcacagcccgtcctcccaccggtcgtctccgccgcggaaatctcgcccgcccgcgagatcttctcgtcctggcgccctcccacgctcatcctcccctcgctcgcatatggcgccgtgcaacccggcacgctcggccgcctcacggcgctgcagctgctcagcctgcgctccaacaacctgtcgggcccgctccccgccgacctcccgcgcctgcccgcgctcgcgggcctccacctccaccgcaacgccttctccggcgcgctcccgcccgggctcgcgggctcgccgcgctccaggcgctcgacctctcctccaacggcttcggcggcggcatccccgacgcgctcgccaatctcacccgccttgccgcgctcgacctctccaacaactcgctctccggccgcgtcccggacctcgggctcctcgcgcttcagttcctcaacctctccaacaaccgcctcgacgggcccgtgccgccgtccctcctccgcttcgccgacgccgcattcgcgggcaacgacctgacgcgcccgcccgcagcagctcctcccaccgccgccgtcgcgcggaggcggcgggtcaggctcagcgaggcggccatcctcgtcgtcgccgtcggcggctgcgtcctcgcgttcgccgtcgccgcggtgctgctcctcgcattctgcaacagggagggccgcgacgacgacgacgacacgggaggggccggcggcggcacgggtgtcgggaagggcgggagaagaaggggagggagtcgccggagtccaaggtcgtcatcggcaaggccggggagggcaaccggatggtcttcttggatggcccggcgctggcgttcgacctggaggacctgctccgcgcctccgccgaggtcctcggcaagggcgcgttcgggacggcgtaccgggccatgctggaggacgccaccacggccgtcgtcaagcggctcagcaaggaggtcagcaccgggcgccgcgacttcgagcagcagatggagctggtcggccggattcgccatcgcaacgtcgtcgagctccgctcctactactactccaaggacgagaagctgcttgtgtacgattgctacaccagcggaagtgtatccaacatgcttcatggtatgtatgatcatttgaccatatcctcctctgtctctccttcgtcatgtcactttgatcgttttcagtgctcaatttggaattacgggcttcgtaactacaagcgtcggcctgtctgtgcgttagaattttagcaatcatgatagcgagacgtacagacgtggcgattttgaaaggaaagaaagaaactttgtaacgtctgattgataccatggtgacctggagatgcaatgttgcttgttgtttggaaagatgctcatgggttgatatgctaactggttgtttagtgcaagcaacaaccttcttaaggagaagatgaactttagcgctctgtgcttggttcaccggaagtccggatgtagcatgtgctgcccatttcttgcttattttttttgtttgctaacttgctgtcatgtattgaatctcacgcgttcatttaagttctctagctgcttggtgtgatgtgcttattagctgtcttcacttgcgacgcgtcttctaacattatgtcgtttcaattcaagttcacatggcatgcttgatgtgtggtggtcactggtcagctctg

SEQ ID NO: 129929 - DNA, 2301 bp, Zea Mays
atgtctaatgaagccagccgggtgttgtacgagactagaggacaagaaggggaagcttggggtgcttgtctcggtaaagcgatgtggccagagaaagttgagaggaagaagagagaggaggagctaggccgacgcacgaccatgtatcgtatcccctacaaagttaggtgtcatgacaaggcaaatgatgctaaatcgtcgatcaacgggtggttggccaaccgtgttaagctggtcggcgcgatagttcgatttagctatgccaaagaaattgaaacagttaaacggccaaccttcaggtttgcaatcaccggtgcgcaacaacaaaccggtgagctgtggaaaatgaattgggtacggatatcggtgcagtcgcacagagtctttcccgggcgactattgctatctttggttcggattcactcgtcttggaaatcagcctgtggtgataaacagcggaaggaaacagtttgcgatcagatagcgaactataaataaatgaaaagaaaaaaactatgcttaagaataaacggcaatatacgagcattttctcttgtcgcaatgcattttctgaatttctgttcctgctgctgaagcccccttgtgatgcttagatgaagttcagttgtacatttaaggtacatgactaatgatagaatagctgccacccaaaactaaagctacaggcccctttagaatgtgggaattttttcatacgtttttcttattaaaatgagctgattcctgtgaaattgtgtataattcctccgaaattcctgcattctaagggagacctacattcgctcgttcttttgagagtaaacatgcatactggaataagcaatggatgaaaagaatattggggaaaaactaggtccaaccgtccaggctgatccctgctcttcagtatttctgctgttctgcacttcagattcttgaccagagctttctgaacttctggttatctgtatgaatactagcagggtttttttttctttttcagtttctccattcaatatttcaattggattaaaaatgagaactgaaattagaaatatggatgatggatttacatattctctatggtgaagaggagcaagacttcacaatcttatttctctcggcgtgttggtccagatcgagagacaactcaagcccatcttatggccatgtttgttttagcttatttgctgattcaaatcacaagaagttattgtaagctgccaaacgtccaacttttcagttagcttctatgagaatcgttttagtttaagccgttcaaagttaatgtgaacacataatcaaccgtgtcgtcgcgatagtaaaaatccaccactttctagatcctaaactctgtacccattcatcttcctccgcacataatacctatgatactcagattctcttctacagccagattcttagaaaagctcatcagagaaaagctgaaacaaacaggccatatgtgtatcgtacaactttcttagattatctccagcagattccatatcccatctactattttaaacttcactctacaaatagaattaaacaatattatctacatttccgcgtcccctattttacactgtttattggagacagtcttaggaggtgtttggtttttaggaacaaatttttagtccctccatttttttagtctctaaattgacaattacataaactaattccatatttaataatttagggactaaaacggaataaaatagagaaactaaagattattccatagaaaccaaacaccctctagcaattttagtccaatcatttgatcaattaaaaaatttatctacgtcttagttatttttgtttgtgatattaatggtcacatgttggatagggtattaagagcatctccaaaaaagcctctaaatatggtcatattttaaatataggattcaaaatcataaaacatccttccaacagcggccctattttataaaatttcattaaacgtttatagggctcgatctgtcggatcctaaatagagtacccatatactaaaaccctatcttcgtttccacataatcattaaccatttatttcctgacaacatgatttatttccttaatagcatttttaaggcatggctgttggagtagacgtttcttttgaaatcctaaacattctaagggcccgtttggcaaagctccagctcctgcttctttagctctagatcttatcctcgtgaggagctgatcctcttgattctcctagaaaatcagaatcatttttaaaaccggttggcaagtaaactgattcttgtcttctgagagttg

SEQ ID NO: 129930 - DNA, 498 bp, Zea Mays
atgtctaatgaagccagccgggtgttgtacgagactagaggacaagaaggggaagcttggggtgcttgtctcggtaaagcgatgtggccagagaaagttgagaggaagaagagagaggaggagctaggccgacgcacgaccatgtatcgtatcccctacaaagttaggtgtcatgacaaggcaaatgatgctaaatcgtcgatcaacgggtggttggccaaccgtgttaagctggtcggcgcgatagttcgatttagctatgccaaagaaattgaaacagttaaacggccaaccttcaggtttgcaatcaccggtgcgcaacaacaaaccggtgagctgtggaaaatgaattgggtacggatatcggtgcagtcgcacagagtctttcccgggcgactattgctatctttggttcggattcactcgtcttggaaatcagcctgtggtgataaacagcggaaggaaacagtttgcgatcagatagcgaactataaataa

SEQ ID NO: 129931 - DNA, 1909 bp, Zea Mays
ctcagcttctcctccttttctcaccaccggccccactcgtcttcgttgcgtacgacaccagaacccggttcgagaatcgccggcggccggctaaaggagagagggtgataataaatcgataaaaggacgggcacgactttttttttcggagggtgtcgttgaacaggactgcgctgggcctgggacgaatccatttttagggcggtgccggcgcgatcgttccgggatcggcagctttatcggggggcgagggatcacggcagcggcggcggcgacgaccgaccgaccgacccaacccgccaccagtgccccgcggcccgcgccgaggaagaaggaagggataaggagacggagccggtggtcgcagtcgcagggatggccgggagcatgcaggcggcggacgcggcgggccggctgagcgcgctgctctcgctgctcgcgctgcgccggctcctcgccgtgctgcagccgctggccctgctcctgctcctgcccttccggtggcgctcgcgcccgggggccggggccgcggcctccgcgccgggggctagcgggaagaaggggaagtcggcgtcgtcgtcgtcgtcgtcgtcgtcggtggttctgcgggtgccggccgggtcgcccatggtcgccgcgcggaggcaggcttccgcgcggagggaggtagccatgcgccgggcgcgggaggccgggcgggagtacgagctcatccccaccgctcgcggcgagacgctcttcacgcagtgctggtggccgcgcccgtcctccaccgttaaaccaagggcgctagttgttgtcatgcacgggctaaacgagcacagtgggaggtacgatcatttagcgaggcgattgaatgatatcggcatcaaggtgtacgggatggactggactggtcatggtggaagtgatggtctacatggatatgtgcaatctcttgaccacgctgtcaatgacttgaaaatgtacctcaagaaagtgtcagccgagaaccctggtcttccatgcttctgcttcggccattcgacgggtgggggtatcattctgaaggctgcacttgatccagacgtagaaacgctcatcagcggtgttgtcctgacatcaccagctgtccgtgttcagcctgcccacccaatcatagcggccatggcaccgatttttgccctgatcgcgccaaggtaccagttgacggcgtcgcacaggaacggcccgccggtgtcgcgcgacccggaagccctgcgggccaaatacgcggaccagctggtgttcacgggcgccatccgcgtgaggacgggctacgagatcctccgcctgacgtcgtacctgcagccgcacctgcagcgggtcgcggtgccgctgctggtgatgcacggcgccgacgacctggtgacggaccccgagggctcgagggcgctgtacgagcgggcctcgtccgcggacaagtccctcaggctctaccacgggctgctgcacgacctcctgatcgagcccgagaaggacagggtgatggacgacatcgtggcgtggctgagccgcagggtgtgatgcgttgcggtgctggccgtaggtttcgcgcggcttcgatcgtctgctgagcgcggaggacctgcaggcggaagacgaagacgcctcgcctctggacggtgatgacgcggtctggtcggctgcggaggtagggagggagagccggtgtgcgtccttgctgccttagcgcggtgatgatccgagagcggcacaggagtatggagtactagtactacctacggtgatggcttcactcgcgcctcccgggtgtatcctgagatttttgtcggggatacgtacgaattttgtaaaaatccgacgactgaacgaagatgagagcatctccaacaacgtgacctataaaaatgccttataatttaaaaat

SEQ ID NO: 129932 - DNA, 4359 bp, Zea Mays
ccctttctttgcctctctctctctccctgggtattggggctctctccgttctcgcgtacgcacaccaccacctcgaatatgctgaccccagccgcgccggccgcgccctgacagcccccacccgatgcgccttccccgcctccgccgccgctgccacgccgctgccggatccgctcccgctcggccgccgtccgctctcggcggcgacgggtcccgctgacctcatcgtgcttgccccgcctccatctcgcgccggcgtgggttgcggcgacggccagtagggttccggggcttccgcctcgcggtcccctcccccgaggatccgcgccttcccctacggggcgcgcgttgcgcttagggtgtgggttgccttggtcttctcagcttggttgcggtcgcgcggtttcgaggagctccacggaagcttgatttgtcaggggggcttttcgaggcagaggcaccgatctgcggctgccggcgccgcggcattgggccacttcctaagcccccgagcgcccggagcttcgttcggatcggctggtctgggagctgggccgcaacaaatcagctcttcttcggcctcactgtaagcatttcttcgcagaggttctcgctcgtttctgggctagttgatattggagggaaacatgccggagaacattgatctggtgcttgagttcctgcggaagaaccggttcgccaaggcagaggcagctctccgtggggagctcaccggctgcgccgattcgaacggcatgaccgtgcagaggtgtgtcgctgagctgaaagaagacgacgagcaggaggacttggtgagctccaatggagggcccaacggtgctgtgacagagaggagtgcggactcatcgagggagttcatcgtgaaggaggttgatgttggagccctgccgaacggtttggatggaaagaagggctccgggattggccagcctcaggagaacaacgtgggggatctgtatccttggaccttcagcatagcaaacagcacggcagaacagctagctgagctgctggtgtcggaggaggtgccaagacataggcgtgctgcgatgttggcagagaagagggatcgaggcgttgggactgaacagcctggcccattgctggagcaaaaagtctcttctggaagagggaaaggaaaagttgatgctgctgggagaactgcaatcaatgaacagggtcattccagggataaaaatctagtaccagaaaaggaggagatgttaaatggttgcacagttaagacagtgcttccattccctggggaaaacccgtcatctagttacaatagcacgcaccatgaaaacgagaggaaagaggtaaggaggagcattaatgcagatggtgttggaaaaggggcaaaaggacatttcgacgaggggaacagacaaaattacttcgaaaaatccctagatacagatcaggtgtctgaccgatgcttcgatttacagcttgttggagataatcagcgtgaggagcttccaaagttacctcctgtgaggctcaagtccgaagataagctagtcaacatgaactgggaggacaagatcaatcaccatggatctggagccaagcaatctagtgctgatcatgcctttatgattgggtcttatctcgatgttcccattgggcaagacataacatcttcaggtggaaggcgtacaattggcagtagttggctgtctgtcagtcagggtattacagaagatacctcgggttttgcaagacttgatgatgattcacttgaatatccaattggtgaatactgggattccgatgagtatgatgacgatgacgatgtaggctacacccgacaaccaattgaggatgaaacctggtttttagcacatgagattgattatcctagcgacaatgagaaggcaaccgaccacacaagagggcctgatcgtcatgatcgccctacaaaggatgaagatgatgaccagtcatttgttgaggaagattcctacatatccggtgagcaatattttcatggaaagaatattgcacaaataggtacttctgagggtccaatggtcaatgggattcctgataatgatatgatagctcagtatgatgggcaacttttagatcctgaagagcttaatttgatgcattctgaaccagcctggcagggctttgtattgcagaacagtgaactaggtatgttagggaatgggaaattccttaatgattctgaacgacctcatcctgatgacccttttgtggaggatgatcagcatggctctgttaggtcaattggtgttgggataagcagtgatgctgctgacattggcagtgaggtgcgagaaagtctgattggaggtagtagtgagggggatattgaatatttcaatgagagcagcttgagtgttagtggaaagagacattctcagcaggatcctgaaaagaagagagtaggtgctaaaggagtaaaacatgaccaaatcaattacgctgctggtatccagaagggtaatctactgccaggagcggctgatggtggattttcttttcctccacctttgcattctgtgaaaaatcatgactctgatactaaaactttgtggtcaaagaaggatgaaatgtattgcattaacgatctggatgattgccaaaatggcgtggcatcagatgatatgcttgctacatggaagaaaaagaatagtgagtcttctcttaggagctctagagatgaaatgacatctgatgttgttagatcaagaaattcaagtccatcgtatggcgaaacagaggacacaacgaatgttcggcgtcacaaactagatgacgcacaagaagacactggaaccaacttggatgatgaggaagcagcagcattgcaagagcaagtcaggcagataaaggtgcaggaggaagagtttgaaactttcaatcttaagattgtgcatagaaaaaacagaactggctttgaagaagacaaaaatttccatgttgttctcaattctgtcattgctgggcgttatcatgtatcagagtatttggggtcagctgctttcagcaaagccatccaggcacatgatttgcacacaggaatggatgtatgtgttaaaattataaaaaataacaaagattttttcgaccagagccttgatgagatcaagcttctgaagtatgttaacaagcatgatcctggtgacaagtaccaccttttgcgtctgtatgattacttctactatcgggagcatttgctgatagtctgtgaacttctgaaggcaaatctgtacgagtttcagaaattcaacagagaatcagggggtgaggtttacttcacaatgccaagactgcagtcaatagctattcagtgtctggaggcgctgcagtttctgcatggtctcggtctaatccactgtgatttgaagccagaaaacatattggtaaagagctacagcagatgtgaaataaaagtaattgatcttgggagcagctgttttgagactgatcatctatgttcatatgtgcaatcacgatcttaccgtgcacctgaggttatactgggcttgccttatgacaaaaagatagatatatggtcacttggttgtatattagcagaactttgcactggaaatgttcttttccaaaacgattcgcctgcaacattacttgctcgtgtgatgggcatcattggcgccatagaacaagctatgcttgcacagggacgggacaccttcaaatatttcactaagaaccacatgttatatgaaagaaatcaggaaagtaacaggcttgaatacttgattccgaaaaagacatccttgcggtaccgcttgcccatggctgatcaagggtttatcgagttcgttgcgtgccttctagaggtgaacccgaagaagcgcccaagtgcctcagaagcattgaaacatccatggctttcttttccttacgagccaatatcttcatgacacaaattgctattggatcctgggtggcttaacatatgcgacaacacctaagcaccatgaaattttggtagatcaaggcgaaagattttctaccacggctgagccatggcaaacccagattcggtttgatcacgcgtggtgccacaatcagctggtctttgacgctgtgtgcaatcaatccatgccctgtgttgcgcttgtaatataactttattttttttttctctttctagccccgatgtaacaggccattttgttttttaggtactttgtgatgcatttttagcaatagggctgtcatgttgtacatggtgtgatcattgttgaactccgtgccatgctgtgcacatgttagggttctaacccaagcccagaatgtcattcattgcattgccaggtctttaggagattgcct

SEQ ID NO: 129933 - DNA, 1202 bp, Zea Mays
cgacgatgagcaaatgcggaaatgatcatgcctgcacgtgttcttgaaggagctgttccacgtctatcagttgggagcatttgctgatagtctgtgaacttctgaaggcaaatctgtacgagtttcagaaattcaacagagaatcagggggtgaggtttacttcacaatgccaagactgcagtcaatagctattcagtgtctggaggcgctgcagtttctgcatggtctcggtctaatccactgtgatttgaagccagaaaacatattggtaaagagctacagcagatgtgaaataaaagtaattgatcttgggagcagctgttttgagactgatcatctatgttcatatgtgcaatcacgatcttaccgtgcacctgaggttatactgggcttgccttatgacaaaaagatagatatatggtcacttggttgtatattagcagaactttgcactggaaatgttcttttccaaaacgattcgcctgcaacattacttgctcgtgtgatgggcatcattggcgccatagaacaagctatgcttgcacagggacgggacaccttcaaatatttcactaagaaccacatgttatatgaaagaaatcaggaaagtaacaggcttgaatacttgattccgaaaaagacatccttgcggtaccgcttgcccatggctgatcaagggtttatcgagttcgttgcgtgccttctagaggtgaacccgaagaagcgcccaagtgcctcagaagcattgaaacatccatggctttcttttccttacgagccaatatcttcatgacacaaattgctattggatcctgggtggcttaacatatgcgacaacacctaagcaccatgaaattttggtagatcaaggcgaaagattttctaccacggctgagccatggcaaacccagattcggtttgatcacgcgtggtgccacaatcagctggtctttgacgctgtgtgcaatcaatccatgccctgtgttgcgcttgtaatataactttattttttttttctctttctagccccgatgtaacaggccattttgttttttaggtactttgtgatgcatttttagcaatagggctgtcatgttgtacatggtgtgatcattgttgaactccgtgccatgctgtgcacatgttagggttctaacccaagcccagaatgtcattcattgcattgccaggtctttaggag

SEQ ID NO: 129934 - DNA, 3931 bp, Zea Mays
cccacaaggcccccgctatttatgcgcacttgcttgccgggagactgggagagttgtgtcgccggcggaggtgggcgtccgtcctcccgttccaccagagctcactgcttcgctccacccaccgttaagcaggagtggtacctggtgtttttttgtttttcaaaaagaagacagaaatgtcttcctcgaggcctgcccactcttcaagttcatccagcaggactcgccagagctcccgggcaaggatattagcacaaacaacccttgatgctgaactcaatgcagagtacgaagaatctggtgattcctttgattactccaagttggttgaagcacagcggagcactccacctgagcagcaagggcgatcgggaaaggtcatagcctacttgcagcatattcaaagaggaaagcttatccaaccatttggttgcctgttggcccttgacgagaagagcttcagggtcattgcattcagtgagaatgcacctgaaatgcttacaacggtcagccatgctgtgccgaacgttgatgatcccccgaagctaggaattggcaccaatgtgcgatcccttttcactgaccctggtgctacagcactgcagaaggcacttggatttgctgatgtttctttgctgaatcctatcctggttcagtgcaagacctcaggcaagccattctatgccattgttcatagggcaactggttgtctggtggtagattttgagcctgtgaagcctacagaatttcctgccactgctgctggggctttgcagtcctacaagcttgctgccaaggcaatctccaagatccagtcactaccaggtggaagcatggaggccttatgcaataccgtggttaaggaagtctttgacctgacaggttatgacagggttatggcttacaagttccatgaagatgagcatggggaggtcttcgctgagatcaccaaacctggtattgagccctatataggcctgcactatccagccactgatatccctcaagctgccaggtttctcttcatgaagaacaaagtcagaatgatctgtgattgccgtgcaagatccgtgaagattattgaagatgaggcactctccattgatattagcttgtgtggttcaactcttagagcaccacatagctgtcaccttaagtatatggagaacatgaactcgattgcatcccttgtcatggctgttgtggtcaatgaaaatgaagaggatgatgaacccgagcctgaacaaccaccacaacagcagaagaagaagaggctgtggggtctcattgtttgccaccatgagagccccagatatgtccctttcccactgcggtatgcctgtgaattcttggcccaagtgtttgctgtccatgtaaacaaggagtttgaattggagaagcagatacgagagaaaaacattctgcgaatgcaaacaatgctctctgacatgctgttcaaggaatcatctcccttgagtatcgtgtctgggagtccaaatatcatggacctagttaagtgtgatggcgctgctcttttgtatggggacaaagtatggcggcttcaaacggctccaaccgagtctcagattcgtgatattgccttctggctttcagaagttcatggggattccactggcttgagtactgatagcctccaggatgctggatatccaggagctgcttcccttggtgacatgatttgtggaatggcagtggccaagatcacgtccaaggacattcttttctggttcaggtcacatacagctgctgaaatcaaatggggaggtgcaaagcatgatccatctgataaggatgacaacagaaggatgcaccctaggttatcctttaaggctttccttgaggttgtcaagacgaagagtttgccatggagtgactacgagatggatgctattcactcattgcagcttattcttagaggtacactgaatgatgcctcgaagccggcccaggcatctggtttagataaccagatcggtgatctaaaacttgatgggcttgctgaattgcaagcagtgacaagtgaaatggtccgcctgatggaaacagcaactgttccgatcttggcagtagatggcaatggattggtcaatggatggaaccaaaaggtagcggagttgtcagggctgagagttgatgaggctataggaagacacatacttacacttgtggaggattcttctgtatcacttgttcagaggatgctatatttagctctgcaaggcagagaagagaaggaagttcgatttgagctgaaaacacatggctccaagagggatgatggccctgttatcttggtcgtaaatgcttgtgccagtcgtgatcttcatgaccatgttgttggggtgtgctttgtagcccaggacatgactgttcacaagttggtcatggacaaatttactcgggtcgagggggactacaaggcaatcatccacaacccgaacccactcattcctcctatatttggtgctgaccagtttggatggtgctctgagtggaatgcagccatgaccaagcttaccgggtggcacagagatgaagtggttgataagatgctccttggcgaggtttttaacagcagcaatgcttcctgccttctgaagagcaaagatgcctttgtacgtctttgcattgtcatcaacagcgcattagctggtgaagaggcagaaaaggcttcattcggcttctttgaccgcaatgagaaatatgtcgaatgccttctgtcggtgaacaggaaagtaaatgcagatggtgttgtcactggagtgttctgtttcatccatgttcctagtgatgacctgcagcatgcgctacatgtgcagcaagcctctgagcagacagcacaaagaaagttgaaggctttctcgtacatgcgacatgccatcaacaaacctctctcaggtatgctttattctagggaaacactcaagagcacaggtctgaatgaagagcagatgaggcaggttcgcgtcggagacaattgccatcgccagctaaacaagatacttgccgacttggatcaagataacatcactgacaagtcaagctgcttggatttggatatggctgaatttgtgttgcaagatgtggtggtgtctgctgtaagtcaagtgctgataggttgccaggctaaaggtatcagagttgcttgcaacctgccagagagatccatgaagcaaaaggtttacggggatggtatccgactccagcagatcgtctctgacttcctatttgtttcggtgaagttctctcctgctggtggctctgttgacatctcttccaagctgactaagaacagcattggggaaaaccttcacctcatagacttcgaacttaggatcaagcaccgaggagcaggagtcccagcggaaatattgtcgcaaatgtatgaggaggacaataaagagcagtcagaggagggcttcagccttgctgtttctagaaaccttctgaggctcatgaatggtgacattcgtcacctcagggaagctggcatgtcaaccttcattctcactgctgaacttgctgctgctccttcagcagttggacgatgagggcaaactgcaacaagtgtcaaatgctctctcagagttcattcggaaagccacggtggtttgcggagaatgagaaatgttggagcggcgtgtaggatcaccgaatgcatagtacggctccatacttctgctctgtttctgcctgtaactcaactgtgaaaagttttaaactttcagaaagaaaaaccgtgtgaggtgcaggttcaagttaatatgaataataaagtgttttttattaaaataaaaaacatgatgaaatgtcaaatttagcggcagctttggtgccttctttatgtccatgcgtgtgcatgtggttgtatactggtgtaactgcttggtgggctacccatggctcttgt

SEQ ID NO: 129935 - DNA, 973 bp, Zea Mays
atgccgaggaccggaggcgccgccgcgtccgctgccaaggtgctgcccatcgacgtgccggccgtcgcgctgtcggagctcaaccgcctcacgggcaacttcggggacagggcgctggtcggggaaggctcgtacggccgcgtctaccgcgccacgctcgccaccggggaggtcgcggcggtcaagatgttcgacaacggcagctcctccggccagtccgaggccgaattctgcgagcagctgtccgtggtgtcgcggctcaagtgcgagcacttcacccagctgctgggctactgcctagagctcaacaacaggatcgtgctctaccagttcgccaccataggctccctctacgatatactccacgggaagaagggggtgaagggcgcggcgcccgggcccgtgctgacgtggatccagcgcgcgcggatcgcctacggggcggcgaggggcctggagcacctgcacgagaaggcgcggccgtcgatcgtgcaccgcgacgtgcgctccagcaacgtgctggtgttcggcggccacgacgccaagatcggcgacttcaacctcaccaaccagtcccccgactccgccacgcgcctgcactccaccaaggtgctcggcacgttcggctaccacgcgcccgtacgcgatgacggggcagctgacgcacaagagcgacgtgtacagcttcggcgtcgtgctgcttgagctcttgacggggaggaagcccgtggaccacaccatgccaaagggacagcagagcctggtcacctgggccactccgaggctgagcgaggacaaagtgaagcagtgcgtggaccccaagctcaaggacgactacccgcccaaggccgtggccaagctcgcggcggtggcggcgctgtgcgtccagtacgaggccgatttcaggcccaacatgaccatcgtcgtcaaggctctgcagcccctcgtgaacgctcggccaggaggagagtag

SEQ ID NO: 129936 - DNA, 218 bp, Zea Mays
ccgtcactgcctgttctgtgtacacacacatcacggcgaccctcctcggcgcgacgctgctgctgctcgcctcccccgccgtcgtcgtgcgcgcgcagcaacgagggggcaacccgtgcccgacgagcgcggtggcggacctcaaggtgtgcgcggacgtgctggtcctgctcaagctcaggatcaacgtgccgcagggcaaagagaggagaccctga

SEQ ID NO: 129937 - DNA, 1203 bp, Zea Mays
acggaccgggaccgactctctcctgtcgagctcccacgtactcgtgcacacaacacagctgctgctcaaagagccacatgcctagtagactagtcttagtagctagcttagagagagagagagagggagggagaggatcagaggaggcgaggggagggagggagaggtcgagaggagaagaagcaaccaaaccaagaacaagagaaggtaagaaggcgagttaggctaccggagaggaggagagccggcgcaccatggatcaacagcagcaccaggagcggccgtgggaggtgtaccgggagtgcatgcgcaaccacgcggcgaagctcgggacatacgcctccgacggatgctgcgagtacacccccgacgacggccagcccgcagcgatgctctgcgccgcctgcggctgccaccgcaacttccaccggaaggcgttcctcgccgacgctgcggcgggagcgcacggcggcgcgcacggggcaatgctgccctctcccggcgcgtccccgggctacggcatgcaccacatggcgattgctgcggccggcatgggcggtgacgccggcgcgcacggctccgggtccgggggcaggcgccggacgcggaccaagttcacggacgagcagaaggagcgcatggcgcggttggcggagcggctcggctggcggatgcccaagcgggagcccggccgcgcgctgggggacgacgaggtgggccgcttctgccgggagatcggggtcaccaggcaggtcttcaaggtatggatgcacaaccacaagtccggtggtggcggcagccagggcgagggcgccagcgctggcgctgccggagccgctcagacgacgtcgtcgtccacgacgcgtggcggcggcggcggcggcgttgttggaggaggcgggagcatgtccacggcgatgatgggcgccgacgtcgaggacgacgaggaggtgaggggcagcgagatgtgcatgtaggctgtagccgcgccccgcgttacgtacgtggcatgcgcggcggcaatggcacggcacggcattgcctcgcccttggctgcgatcgaggattaacatctccttttgctgctaattcctttgggtccttttgcttcgatgtgttgatgattgattgtttatgatgagatattcattgttatcacggctatgctaattaatgctgtgtcagtgtcactgtgatcattca

SEQ ID NO: 129938 - DNA, 1989 bp, Zea Mays
gacgtagcgtcggggctggccgtccccgtccgcccgcgagtgggaggccaccgtttcctctcgcaccgggtcgcgtggagggagggcatggggccatggttcccagcgcggggcgccgagcgcgctcctccgctcgcgcagcgccagcgccacccccgcgccgggctttatataccaccctctcccaaccctacagaatcatcgcctccaccgttctctcttcctctgctcttctctgcctgcctgagctcaccgcacctcgcctcctcaccgcgtttcctccgttaatccggtagaaaatggccgatgccgaggatatccagcccctcgtctgcgacaacggaactggcatggtcaaggctgggttcgctggcgacgacgccccgagggccgtcttccccagcatcgtggggcgcccgcgccacactggtgtcatggtcgggatggggcagaaggacgcctacgtcggtgacgaggcgcagtccaagaggggtatcctgaccctcaagtaccccatcgagcacgggatcgtcagcaactgggacgacatggagaagatctggcatcacaccttctacaacgagctccgcgtggctcccgaggagcaccccgtcctcctcaccgaggcgcccctgaaccccaaggctaacagggagaagatgacccagatcatgttcgagaccttcaacaccccggctatgtacgtcgccatccaggccgtgctctctctgtatgccagtggccgtaccacaggtatcgtgctcgactcgggagatggtgtgagccacaccgtccccatctacgagggatacgccctcccccacgccatccttcgtcttgacctggccggtcgcgacctcaccgactacctgatgaagatcctgactgagcgcggctactccttcaccaccaccgctgagcgggaaatcgtgagggacatgaaggagaagctcgcctacatcgccctggactacgaccaggagatggagaccgccaagaccagctcttccgtggagaagagctacgagctccccgacggacaggtgatcaccatcggcgccgagcgcttccgctgccccgaggtcctcttccagccatccttcatcgggatggaagctgccggcatccacgagaccacctacaactccatcatgaagtgcgacgtggatattaggaaggatctgtacggcaacatcgtcctctccggtggcaccaccatgttccctgggatcgctgacaggatgagcaaggagatcactgccttggctcccagcagcatgaagatcaaggtggtcgctcctccagagaggaagtacagtgtctggatcggaggatccatcctggcatccctcagcaccttccagcagatgtggatcgccaaggccgagtacgacgagtccggcccatccatcgtccacaggaaatgcttctaattctttgggcccgagaaatgcaagccgtgggggagccgttaccgccgccagcctctcctgcccccgttttcgttgccgtttcttcattagcgcgaacaaagttttgtgccggtctatcggccgccgctttcctcccctattcatcaagactgcaataactgtcgctacctatgcttctcacttgtgattttttggacacaatatgttaaggtccattcaattctaatgagacgcctgatgaggctacttcggattgtcattggttattgatgtcttatgaatgaataatataatttttttttgtcactttgagctctctgtatctgcactgttgttacatttttcccttgagaattgaaattgagacgctgtaatttgcgcatcgttgcagcagctgcctttcgattccagtcccctgttccatcagattccctcctgccttttgtctttgaaagcaccttttgctcacgcctcacgagtcacgacacatccctcgggcctagtttgggtactctagtattgaagtggtttggagggattggagagtgtataaatc

SEQ ID NO: 129939 - DNA, 1887 bp, Zea Mays
gacgtagcgtcggggctggccgtccccgtccgcccgcgagtgggaggccaccgtttcctctcgcaccgggtcgcgtggagggagggcatggggccatggttcccagcgcggggcgccgagcgcgctcctccgctcgcgcagcgccagcgccacccccgcgccgggctttatataccaccctctcccaaccctacagaatcatcgcctccaccgttctctcttcctctgctcttctctgcctgcctgagctcaccgcacctcgcctcctcaccgcgtttcctccgttaatccggtaaccgtctctcaccatctctgcagtcaccctagagtccctctctgcctgcccctgccagcgcgggggcgcggtgtggctctcccagatccgcctggcattgctcgctcggggtcgtgccaagccgatccgatctcgcgcttgcgcgctcctgccgcggatccggctggatctcgctggaattggggcgcgcgtttatttgaaatgcagcagatccgcgtgcttgcgcgcgtgatctggcgtcgtcgcgggcctttcgttaacgaaatggcccgatctgtggtttggtggtcaatgccatgtttttttttattattactgtcttatgctgggagaaaaatagaaacagagaatagcttcaattgatgccttttagaacggattctatagagcaactcatggatactttctgcttgttttaacaaaatgtggcatcgggcgagctctggtgtaggtagaaaatggccgatgccgaggatatccagcccctcgtctgcgacaacggaactggcatggtcaaggctgggttcgctggcgacgacgccccgagggccgtcttccccagcatcgtggggcgcccgcgccacactggtgtcatggtcgggatggggcagaaggacgcctacgtcggtgacgaggcgcagtccaagaggggtatcctgaccctcaagtaccccatcgagcacgggatcgtcagcaactgggacgacatggagaagatctggcatcacaccttctacaacgagctccgcgtggctcccgaggagcaccccgtcctcctcaccgaggcgcccctgaaccccaaggctaacagggagaagatgacccagatcatgttcgagaccttcaacaccccggctatgtacgtcgccatccaggccgtgctctctctgtatgccagtggccgtaccacaggtatcgtgctcgactcgggagatggtgtgagccacaccgtccccatctacgagggatacgccctcccccacgccatccttcgtcttgacctggccggtcgcgacctcaccgactacctgatgaagatcctgactgagcgcggctactccttcaccaccaccgctgagcgggaaatcgtgagggacatgaaggagaagctcgcctacatcgccctggactacgaccaggagatggagaccgccaagaccagctcttccgtggagaagagctacgagctccccgacggacaggtgatcaccatcggcgccgagcgcttccgctgccccgaggtcctcttccagccatccttcatcgggatggaagctgccggcatccacgagaccacctacaactccatcatgaagtgcgacgtggatattaggaaggatctgtacggcaacatcgtcctctccggtggcaccaccatgttccctgggatcgctgacaggatgagcaaggagatcactgccttggctcccagcagcatgaagatcaaggtggtcgctcctccagagaggaagtacagtgtctggatcggaggatccatcctggcatccctcagcaccttccagcagatgtggatcgccaaggccgagtacgacgagtccggcccatccatcgtccacaggaaatgcttctaa

SEQ ID NO: 129940 - DNA, 1950 bp, Zea Mays
gaaaaaaatcaatccgccacctgttctaacacgcgaggagaagaacatggcgactgctgtttcgttaccgtccgcgtgctctgacccctagcgagcccacggcgtcgccctataattggggtcccaaccgaaacctctcctcgccgcaacgaattcccggtctccaaccagccgggcagccaccgcagacgatccctagttccgcgtccccgacccgaaccctcgagttcgcacgggctccggccagattcgcgcggtctaagcttcgaatcggcgcatggaggcagcagtagccgccgcactcaagtcgcccaccgccgcacgtccctcgtggcggcccgcggccccgggcgccacctcgctcccctttgaccggaggcgcagctttgccttcggctccatcaagggtctcgggcggcagcagctcacctctaggactaggaggcgaagcagtgtggtcagggcctcctggtccccctcggagtctctgccaccgtcctcgtcgatggcgccgctcaggatggaatcgcccgcggggcagctactctcccagattcttcacacgcacccgcacctgctgcctgccgccgccgagcagcagctcgagctgctccagaccgaccgcgaggcagagaagaataaggataaggagagcgatgctggcgacaagctggctccgacaggtgtcgacctcgtgctgtacaggcggattgctcaagtaaaggagaaggaacggaggaggactttggaggagatactctatgctctggttgttgagaagtttgttgaagccggcgtttccttggttccggcactctcacgctccatcgactcttctggaagagttgatcagtgggcagaaactgtggaaggaaggctccagcgtttgcactcgcctgaggcctatgaaatgatcgagaaccatctcgccctcattctggggcagcgtcagagtgatgccactattgcagccataagtaagctccgtgttggccaggtctatgccgcatctgtgatgtatggctatttcctgaagagagttgatcagaggtttcagctcgagaagacaatgaagagcctcccttggggatcagaagaggaagacggcgctttgtatcaagttatgacgaccgactcgatgccttcagctcagtcttctagctctcacccagagatgggctcctggaccgccgcgcctgacttcaacgcaggaggtcctagcgaatctatcaagccttgtcgccttaggtcgtatgtcatgtcattcgatccagatacgcttcagaggtatgcaacggtcaggtcaaaggaggcctttggtatcatcgagaaacacacagaagcgctatttgggaaagcagagattgtagtcacacctggaggcacggttggttcatccaaggatgagcacattaggataagctttgccgggctgagaaggctggtcctggaggctgttactttcggatcattcctctgggacgttgagagctttgtggattccagctaccattttgtgaccagctaagattgtcatcctaagtaaagaaaggttcgtggtttacgtctctggtctgaatgtctgtgggcttcggaaagacttgtacaatgatgctaggctgttaccacaccccttactgatgcgatggtatcaatgatttgcgcagttctatggcatcgcattatttgtaaagaccaactgccattatcctgatatttagccgttatgttctattaacatctgtgctgcccggggggcgtagcgatgtatttttttggctatcccctctgcaaattgtaagaggaattctaggctcatagccaattctttggcgaagctattattctcgttttacagattgccgttatgatgatttgagtctttctttttgagagcacagccatttcgtactacagaatacttgtgcgtatttgaatagggatgaagtt

SEQ ID NO: 129941 - DNA, 3092 bp, Zea Mays
cgagccgtccccggcgcaggacgagtacgcgcccgttgtatactcgcaggagaccgtctcctacatcgaggggctcgacatgatgtccggcgaggaggaccgtgagaacattctgaggtcaagagcatcggggaaggcagttctcactcgaccattccggctcatgtcgaatcacctgggtgtcgtattgacttttcctgtctatcatgcggatcttccttctgatgccaaggaggaggatcgtgttgctgccaccgcaggataccttgggggagcatttgatgtagaatcattagtggaaaatttgttgaggcagctagctggcaatcaggaattggtggtaaatgtttatgatgtcacaaacatttcgaaccctcttgtcatgtatggatcagaagttcctcttggcaacccctcaccatcgcacatctgcatgctagattttggtgatccattcagaaagcatcatatggtttgcagatacagaaacaagcctcatgtcccatggtctgcaatttctaccccatctggtgtctttgtcatatgtatgcttgtggggtacatcgcgggtgccgcttggagtcgttatgataatgttaaggaagattgccggaaaatggaggagctgaaaaaacaggcggaagcagccgatgttgctaaatctcagttccttgcaactgtttctcatgagatcagaacgcccatgaatggagttctaggaatgcttgatatgctgttagacactgacctaacctcaactcagagggattttgcacaaaccgctcaagtctgtggaaaggctttaatatcgctaatcaatgaagtgcttgacagagcgaaaattgaagccagaaagttggatcttgaatctgtaccatttgatctgagatccatccttgatgatgtcatctcattattttcttcaaagtcaagagagaagggaattgagcttgatgtatatgtctctgaaagagttcccgaaatcttgttgggtgatcctggaaggtttcgacagataattacaaatttagtgggcaactcaattaagttcacagaacggggacatatttttgtacaagttcatctggcagatcattcaaatcttgcaacagaatccaaagttgagccggtggctaatgggatgaatggacatacagatgagaaaactgctgtagcaaccagtgtttctctcaacacactaagtggttttgaagctgctgatagccgaaatagttgggaaaacttcaagcttttgctttcttatgagaaaaatgagatgccctatgaaagtgtatctgataaagttactcttgtagtaagtgtggaagatacaggaataggtataccattggatgcacaagccaaggtgttcacacctttcatgcaggctgatagttcgacttccaggacatatggtggtactggaattggattgagcatcagcaaatgtcttgttgaactaatgggtggtcagataaactttgtcagccgaccacatgttgggagtacgttcacatttactgcggttctcaaaagatgtgacagaagcgctattggtgacagtaagcctgttatgttgcatcctcttccatccagtttcaaaggtttatctgcactattggttgatagaagaccagtaagagctactgtaactaagtatcacttgcaaaggctgggaattgcctgtgatgttgttgcaaccattgaactggctcttggtgtgctgtccgggagaaatggcagttccctaaccagtatgaagcaaccatgcatgttattgatcgagagtgattcatggggcttcaatattgatgtttctttacgatctagactcctggagatgaagcagaatggtcacacacatgtattacccaaaatcatccttcttgcagctgcagaatcgggcaaactcaaagaacactatgcagttgattctgtgatcacgaaacccctgaaagcaagcgcacttgccgcttgtctgttccaaacacttggcatcaaacagtcaagcaacgagagaagtgacaactcaggttctctttacgggttgcttcttggcaagaacatattggtggttgatgacaacaaggtaaatcttagagtggctgctggcacgttaaagaaatttggagcaaaggtggagtgcgtggagagtggaaaagatgccctcgccctcctacaggtcccatataagtttcatctttgtctcatggacattcagatgcccgaaatggatgggtttgaggctaccaagcaaataagggcaatggaagcgaaggcaaatgagcaggcagtcgcctgtgacaattcagaaatagatggtgcgacaagggcagcaagatggcgcctgcctgttcttgcaatgaccgccgatgtcatccaggccacccatgaagagtgcacgaagtgcggtatggatgggtacgtcacaaagcccttcgaggagaagcagctcttccaggcgttgcagaagttcttggaccccggcatgtcctgctaacgccgaagtgatgcgttggagaccgtgcagcgcgggctgctcgtcgatcatgccagcggggaacagcaggcagacaaggcagcacgcaccacgggccttcgctggtctgcctgcctgtgcaggcgtcgtgtaaatgtattgtatttgcagggatactgtttacagcgctagtatgccccgtgccacaatgtccgagctacctgtggctgatgcacgttgcgcataggtggttttttttgtacagcttccaccatttttgtgctccagatcagaccaccgaaggaggcaagcatgctcgctggtgcagtgcagcactggaaggaaaacctgacttcctgagagtagatttttgctgtttaattgcattgggatttatgatgtattataatcagataaatgtgtgatgtaagctggcgtaattggcccaatgcatttccattgttatggatgagttgaaatggcattggttagacacttagactacactattgggtgtatgcccttccacagttccattttccctgcaaaatatcaaaatgtgcaaagggatagtggaatcatggcttgaattatatgaattttctttggtgtt

SEQ ID NO: 129942 - DNA, 1715 bp, Zea Mays
atggaacttgacccggtagccgaggccgagcacgaggagcacttgttggaaacccataacgaggaagaagatgctgctcaagccctgttcggttgtagctctgctgctctccgtcgggatgctgcagcggctccttccggcgatgttgggggaacgggctccggcagtgcgacccgtaccgaggcaagcacggataaccaggggcctccagttctccagtctgggaggactttgaacaggtgttcaactttgagaatggtaagaggtctttccgtcatgaaggtcattgagataaaagatgagatgaccacagcctccgacctgacccttgtctacgtggctatgctatacgaagttaggatatgttaaaaaaaacttaagtaagccaggtgtgttgctgctgctcgcgatatgcaaaggtcgttcgactgttttttaaaaaaaaaacatgccaactcgcttctcttccattcgtgtgctatcttgattgagcgtagtttgtatcagtgttctcagtgtgcgggcccgggaagagaagcgcgggaagtagatagaatcgacgcgggcccgccctgggccgcccgctctattccattgagcgcatcatcacataccgagccgaactgaacactgagctgcggtgcagaaggataaacgcgagcatggcatgatggtgcctttagaagccagaacgccgaacgcgcatgcgtggcgcgaagcttgcttgccggtgaatggtgatgggctgtgcgttgtgtatccaagtcacacgggcatacagtatatatcatcattgcgagctgcgacggcaaattggtttcgctccctttcacaacacgaaaatgtccgatcgtatacgtgtggccctgaaaaggggacgggaaaaaagcctttcttagcggatgcggatcgtctggtcagtcagtccccaaccaaataaataaaactcacctgatatgccgatcgttttctcatcatatggaaatcgaaacatctcgacttcgcagctgccgatcgttcccgtacgtgttgccatgcggccatgcccatgatgtcgcttttcaagctcccgcgcccgtggcaatacaagcgcatgcgcatccggcgtcccggcggcgagtcgagaggacggcgtcgcattgaggaggcagtgtaagcaggcggcgccatgcacggttccttccttgcccgtgcccccgcgatgagattcagatgtcgctttggcgagacgacgagatcgtcagagggagatcgatcatcgccgggcccgccaccaaaagaaagaggcctcggactgttgcacatgcagacatgcagtagtgcatgcatgtactggaggggactttgattggtttggcggcctctgcatcgctgcctgcctgccaccaccaaaatagaccgaaatttagtgggcggaaaaacgcatgggacgctttctgcacttggaaacagcacgcatcggactatggtcggaggatccctgggccgtcgtcccgatcacgatcggtgtcgccaacgaacaggccatcgcgtgtccgttcaatccaagtgagcttgggggacgtgttttgtttcagctttattttttctgattctgaccaacaaaaatttgttgctgcaaaacgcctatcttttcgatctgttgtttttatgaaaatcgattgatgaaaagcgttcaaaatcaatataaatacacgatcggtcaattagtcggg

SEQ ID NO: 129943 - DNA, 651 bp, Zea Mays
atgcagagaaacaatggtggcaccggagcaccatctgcaatgccgacacagcgtgtatggtgccagacattgcatgcatcgcatgccaccatgcgctccccatcgtcgtcctgtgcaccacaaacgcactgcacctcccacgcatctgcacctccctggcaccgcagcccagtctccatgtcagctccgtggccgtgcacaccaatggtgtcaccagactctgctccaccaagcatcaccggatcccatttatccccagtaatgccatccagtgactcggcctggaaattctcaaagaagcagtatgtatccctcagtgcatgctctgcctcaacaagcagctcgcctatggatgcatgcagtggtactaccacaatatccccaggcggcattggccttgtaagttcagtagcctcccatggctgtggtcgccactcaacaaggaaccttagctggtcatcagactcgtccctgaggccccaccatttcacccagtgcttgcagtccagtacagcctgtgctgcttcactgcgtgcccccaccattgctcggtacacagcacgcagatcccgctccgcctcggctgcgtttggccatcggactgcaggaggggtgttctctgcatcaagttccactggttcaagctcatga

SEQ ID NO: 129944 - DNA, 450 bp, Zea Mays
atgaattggtttacaagccgcctgaagtctgtaaatgtagaacaggtttggtttggattattgtggtgcatgtgcatgcttcttgtcgatccttcgaggctcaaatatgctgattccgacgtggctgcggccaacgacggcgtcattccggggcccaacaggttcagcctcgagttcggcagccactcagtatctacactctcttgtttcgtttgtgcatttctaaatttcctgccttttggaattaactgtcacatgctcgagggagatgcaaccactctcagaatggttattggattaatgtacacaattgtgatgtttgtcggcatcaacaattgttcaactgtgcagccaattgtttcaattgagaggacggtcttctacagagagagagctgctgttgggatgtactctgcaatgccatatgtcgtttctcagatgctaatttag

SEQ ID NO: 129945 - DNA, 1642 bp, Zea Mays
tttgtgtgcccactgaaccaccaaatggcatcgctcccaccgccgccgaaacgcttcgtgcagccggagctttcgcccggcgcccgcagccgtggctacacaacacagctgcgagcctgcgagaaccaccaccagtggcgtagtagtacccgtggcattccaacgggcggtcgcggccggaaccatagccaacctgccggttggtcttacacctcacgcgcctcgtaaacgaaaataaaaacacgcgccccgcaaagtcgtcctctttcttccgctcgccgacacggcgcaaatccccacaaccccaggccggcggacgggcggactcccacccacctcctcgcgacgacgtgctcggctcgcttccagccacctggctcgccgcccgcctcggaaaccccgccgcgagatcccgtcccccgggccgggaggatggaggtgaaaacggtaaaagttagcaacctttcattaaatgttttgaaaagagagctcacagagttctttagtttctctggggatatagaatatgttgaaatgcaaagtgaatctgaatggtcacagcttgcttatgtcacatttaaagactcacagggagcagacactgctgttcttctctcgggggcaacaattgttgatcgtgctgtcattataactcctgctgagaactatcagctgcctcctgaagcacacaaacaattatcgggagcaaacgtctctactgaatcagcagtcaggaaggcagaagatgttgtcagcagcatgttggccaagggatttgtgctcagcaaagatgctctcaacttggcaagatccttcgacgagcgtcacaatatcctatccaatgctactgccactgttgcatctctagaccgccagtatggcctgagtgaaaagatcaatctgggaagggccattgttggcagcaaggtcaaggaggtggatgaacgctaccaggtctcagaactcacaaagtctgccttggctgctgctgagcagaaagccagctttgcaggttctgctatactgagtaaccaatatgtctcagttggtgcctcttggctaacaagtgcattcactttggtaacaaaagcggcaggtgacatgacctccatggccaaagacaaggtagagagagccgaggaggagagaaaggccatcatgtgggaggagaggaatgggctggtgagcgattatgcaaagatccatcttgacgagccctcttcatgggagcccgcagttctgcctttggaatcagtggatgaacagaagctccaggctgtctgatccacaaaaccgaatgccaatcgttgtcgcacgtaattcttttgcagctcgtcctatatatagatttattctttttcgtcgatgcagtggatcaaaacaaatgcgcttatcagccatagcgccatgtaaattttctgaaagttgctcccgtgttattaccaggttttctttctttcttagtttggagaaagagtggtgctaccagcattgctgctctaaactactgtgtgtgtgtgaatggagtactactgtacttgtgtctacttgagtactacagaaacagaatacaacttccttcgttagatacagattgatttaaaattgagttgaaccacttgtgcaaaaaaaaaaaaaaaaa

SEQ ID NO: 129946 - DNA, 342 bp, Zea Mays
ctccggtcgtggctgtggcagaagctgttgatgctgctcgtgctgcggctgttgcagttgcagaggctagatgtgcggcgttggtggctgagaaggaggcacgagcggcggtgcaatctgccagtattgccgcggataaggttcaacttgtcgtcgaagctgtgaagtatcgaagctttgttgaagataactccatggtggaatccttggtgactgattttgtttctcttttcctttgccgcatgtggaatgatagggtttagggctgttgttcattcaaaatagggttagttcttcacaagcatggtaacttagtcgtccacttgatcaagaactagtttt

SEQ ID NO: 129947 - DNA, 392 bp, Zea Mays
agtatagcatggtgtattgctcgaatcgggtacccttgtctttgtcaaaccaggtttggttgatgccagcttgtggaattccttctcttggctttcacactggatctggagtggactgcctcagactgcttcagacctttataaccgtgcgtgtgtactcgctctctgttttctggcgagcgtattgaaaaactgggagccccctctgttttggttttcttgtatagaatgtaaatgacactgtaaagtttcagtcatcagattgatggtcttgattatagtgctgcaatgtgtgctccaaagaggtttgggcattatatatatccctttgtttttatcatgtcagtgatagcgacagcaatgtgtgtgtgctgtagaaagttccacattgg

SEQ ID NO: 129948 - DNA, 574 bp, Zea Mays
cctgaccagcgtgcttcagtacctgaccttctcaaagtctgacatcgcctacgccgtctaacaggtgtgcctgcacatgcacccgacatcgcccacgcctctctctttatgttcacaatcttcagatgccagagcgagcagttgcatattgtgaccgcgtttacgggaaaagagaacaacaaacatccaagtcaaatatctattttaatcttctacaaatttatctgaacccaagaaatgctgaaaaggaatttgagcagaaatatattccaatcgcatcgcaatactctggaatcgaaaaggctagtgctactaagctcaaaggggggcgcatgggtaaaaaggtcgttgagattgagggggctgatgaaatacgctttagccctagtggaacagattagtggccgaagtgatggctatggagaggatgtaaatgacagaggccctataatgttaaatgaagcactggaactgttaagccaacggtgggacagaataaatggtgctcaggctcttaggctgttactaagagacactaaactccaggtattttttcctggtatactatgtatga

SEQ ID NO: 129949 - DNA, 81 bp, Zea Mays
gtgcaactgtacctttctgaagttctagattggtacaagattctgaaggaagagggaaactggacagagaacatattcccc

SEQ ID NO: 129950 - DNA, 2423 bp, Zea Mays
acagttttcatgtcctacctacagagattcagcttaccggcatcggcgctcggaccccgaccgtcggctggtcggcacgcgcactctcgcaagcaaaactacaagctcgcttttttaaaatctgtccctgcaattctctcctctgttcccactcattaagatcccaccgcctcccgccggccgccgccgacgagcaccgcagcctgacacagagccgcgggcgagccatcgcgtgcggcctcgcccgggatggcgaccatggagagcctgatcgggctggtgaaccggatccagcgcgcgtgcaccgtcctcggcgaccacggcggcggcggcggtgagggctccctctgggaggcgctcccctccgtcgctgtcgttggcgggcagagttccgggaagtcgtcggtgcttgagagcatagtagggagggacttcctgccccgtggatctggtatcgtcacgaggcggcctttagtgctgcagctccacaagacagatggtgggcacgagtatgctgagtttctccacgccccgcggaagcggttcaccgactttgctgctgtgaggaaagagattgctgatgaaacagaccgcattactgggaaaactaaagctatttcaaatgttcccatccatttgagtatatattcgccacatgttgttaacttgacacttattgatcttcctggactgacaaaggtcgctgtagaggggcaagcagaatctattgttcaagatattgaaaacatggttcgatcttatgttgacaagccaaattgcatcatcttggctatctccccagctaaccaagatatagcaacgtcagatgctatcaagcttgccagggatgttgatccttcaggtgacaggacatttggagtcttaacaaagcttgatttgatggacaagggtaccaatgctgttgatgtacttgaagggagacaatatcgcttacaacacccctgggttggaattgttaatcgctcacaagctgatatcaacaagaatgttgatatgctttcagcaagacgcaaagaaaaagagtactttgagagtagtcctgaatatggtcacttggcacataaaatgggtgcagagtatcttgccaagcttctgtcacagcatttagaggctgtgatcagggccaaaattccaagtattatagccttgattaacaaaacaattgatgaaatagaagcccagttggatcgacttggtagaccaatcggaggtgatgctggggctcagttgtacacaatcttggatatgtgtcgtgcatttgaccgtgtctttaaagagcacttggacggagggcggccaggtggagatcggatttatggtgtctttgacaaccagttacctgcagcactgaaaaagcttccatttgaccggcatctttcaatgcaaaatgttcgtaaagttatttcagaggctgatggttaccagccccacttgattgcccctgagcaaggatacagaaggcttatagatagttctttaagctactttaagggtccagctgaagcgtctgttgatgcggtccatttggtcttaaaagagcttgttcggagatcgattgcagcaacagaggaattgaagcgatttccaacacttcaatcggatatagcagctgctgcaaacgaaagcctggaaagattccgcgaggatggacggaagactgttcttcgtctagtagagatggaagccagctacctaacagtagaatttttccgcaagcttcctactgaaccagagaaagcggctgataagaacactccagtgagtgatagatatcaggacaatcatctcagaagaataggatcgaatgtgtcatcttatattaacatggtctgtgagactctgaggaacacaattccgaaagccgtcgtacattgtcaagtgaaagaggcaaaaagaaatttgcttaaccgtttctatgctcatgtgggaagcaaggagaagaaacagctgagtgcgatgttggacgaggaccccgctttgatggagaagagggatgccctggtcaagaggctagagctgtacaaatctgcaaggaatgagatcgactctgtcgcatggaaatgattggtttgtgacagccactggtggatcgtagaatgtacaaccgcagcagcacacgtatggattgcagtagaatgatcaattctttttttacatttgaatttaccctggaggccttgcacgtgattttcgcgagtcttttgccgaacacatgcttatttggccgtcttggcccattcacgcgattgtgttatgggaggatgttctggtctccagttgatataagagtatatatgtattctttgttgattttactgccttgatggcctccatacttttattgggtggggtgccaggctggacaatctgtcagatgctacaaaatgaaattgtgggatagg

SEQ ID NO: 129951 - DNA, 2420 bp, Zea Mays
acagttttcatgtcctacctacagagattcagcttaccggcatcggcgctcggaccccgaccgtcggctggtcggcacgcgcactctcgcaagcaaaactacaagctcgcttttttaaaatctgtccctgcaattctctcctctgttcccactcattaagatcccaccgcctcccgccggccgccgccgacgagcaccgcagcctgacacagagccgcgggcgagccatcgcgtgcggcctcgcccgggatggcgaccatggagagcctgatcgggctggtgaaccggatccagcgcgcgtgcaccgtcctcggcgaccacggcggcggcggcggtgagggctccctctgggaggcgctcccctccgtcgctgtcgttggcgggcagagttccgggaagtcgtcggtgcttgagagcatagtagggagggacttcctgccccgtggatctggtatcgtcacgaggcggcctttagtgctgcagctccacaagacagatggtgggcacgagtatgctgagtttctccacgccccgcggaagcggttcaccgactttgctgctgtgaggaaagagattgctgatgaaacagaccgcattactgggaaaactaaagctatttcaaatgttcccatccatttgagtatatattcgccacatgttgttaacttgacacttattgatcttcctggactgacaaaggtcgctgtagaggggcaagcagaatctattgttcaagatattgaaaacatggttcgatcttatgttgacaagccaaattgcatcatcttggctatctccccagctaaccaagatatagcaacgtcagatgctatcaagcttgccagggatgttgatccttcaggtgacaggacatttggagtcttaacaaagcttgatttgatggacaagggtaccaatgctgttgatgtacttgaagggagacaatatcgcttacaacacccctgggttggaattgttaatcgctcacaagctgatatcaacaagaatgttgatatgctttcagcaagacgcaaagaaaaagagtactttgagagtagtcctgaatatggtcacttggcacataaaatgggtgcagagtatcttgccaagcttctgtcacagcatttagaggctgtgatcagggccaaaattccaagtattatagccttgattaacaaaacaattgatgaaatagaagcccagttggatcgacttggtagaccaatcggaggtgatgctggggctcagttgtacacaatcttggatatgtgtcgtgcatttgaccgtgtctttaaagagcacttggacggagggcggccaggtggagatcggatttatggtgtctttgacaaccagttacctgcagcactgaaaaagcttccatttgaccggcatctttcaatgcaaaatgttcgtaaagttatttcagaggctgatggttaccagccccacttgattgcccctgagcaaggatacagaaggcttatagatagttctttaagctactttaagggtccagctgaagcgtctgttgatgcggtccatttggtcttaaaagagcttgttcggagatcgattgcagcaacagaggaattgaagcgatttccaacacttcaatcggatatagcagctgctgcaaacgaaagcctggaaagattccgcgaggatggacggaagactgttcttcgtctagtagagatggaagccagctacctaacagtagaatttttccgcaagcttcctactgaaccagagaaagcggctgataagaacactccagtgagtgatagatatcaggacaatcatctcagaagaataggatcgaatgtgtcatcttatattaacatggtctgtgagactctgaggaacacaattccgaaagccgtcgtacattgtcaagtgaaagaggcaaaaagaaatttgcttaaccgtttctatgctcatgtgggaagcaaggagaaacagctgagtgcgatgttggacgaggaccccgctttgatggagaagagggatgccctggtcaagaggctagagctgtacaaatctgcaaggaatgagatcgactctgtcgcatggaaatgattggtttgtgacagccactggtggatcgtagaatgtacaaccgcagcagcacacgtatggattgcagtagaatgatcaattctttttttacatttgaatttaccctggaggccttgcacgtgattttcgcgagtcttttgccgaacacatgcttatttggccgtcttggcccattcacgcgattgtgttatgggaggatgttctggtctccagttgatataagagtatatatgtattctttgttgattttactgccttgatggcctccatacttttattgggtggggtgccaggctggacaatctgtcagatgctacaaaatgaaattgtgggatagg

SEQ ID NO: 129952 - DNA, 1993 bp, Zea Mays
ttcaaggcttctgaggtgcgtctcccgaccgcgaccacctcgacttcggatacctcggcatctaggggctaacgtcttcttggagcacacaccggtctctactccagccggtgttctcattcaaattgcggggagcatacaacatgatggcaaagctctcccgtgagcagttagagaggggcgtcatctgctcctctgctggaaaccatgccccagggcgttgctctttctgctcagagactgggttgtgatgctgtcatcgtcatgcccgtgacgacaccagaaatcaagtggaaatcagtggagcggttgggagcaacggtggtccttgagggggactcatatgatgaagctcagtcatacgcaaaattacgatgtcagcaagaagaccgcacattcatacctccctttgaccatcctgatgtcatcactgggcaaggaactgtcggcatggaaattgttcggcaactgcaaggtccactgcatgcaatatttgtacctgttggaggcggtggattaattgctggaattgctgcctatgtaaaacgggttcgcccagaggtgaaaataattggagtggaaccctccgatgcaaatgcaatggcattatccttatatcatggtaagagggtcatgttggagcatgttggtgggtttgctgatggtgttgctgtcaaagctgtaggggaggaaacatttcgcctgtgcagagagcttgtagatggcattgttatggtcagtcgagacgctatttgtgcttcgataaaggatatgtttgaggagaaaagaagtatccttgaacctgccggtgcccttgcattggctggggctgaagcctactgcaaatactataacttgaaaggagatactgtggttgcaataactagtggggcgaatatgaactttgaccgacttagacttgtaactgagctagcagatgttggccgaaaacgggaagcagtgttagctacatttctgcccgaggagcatggaagcttcaaaaaattcacagaattggttggcaggatgaatattactgaatttaaatacagatatgattttaatgcaaaggatgcccttgttctttacagtgttggcatttacactgacaatgagcttggagcaatggtggatcgcatggaattggcgaaactgaagactgttaatctaactgataatgatttagcaaaggaccaccttagatactttattggaggtagatcagaaataaaagatgaacttgtttaccggttcatttttccagaaaggcctggtgcccttatgaaatttttggatgcattcagccctcgttggaacatcagtctttttcattaccgtgcacagggtgaaactggagcaaatgtattagttggtatacaagtgccgccagtggacttcgatgaattcaagagtcatgctgataatctcgggtacgagtacatgtcagagaacaacaatgagatatacaggttgctgttgcgtgacccagaggtctagtataataggtgccgatgggttcctttgctcctataatttggtgtcacttttgaagtaaggttccactccaaggtagaaggtgcaagtttcttcttcagttggaatgcagtcattgccaaatataccttcaatgtgccatctcaccatctgtttactcagttagattttagcgtatcagtcgtgtatttttgttgttgtgcttcgtgaactcacttatccgtttgcggcacctagagtgtgtcaaataatgataactaatatgatatcgaaatgtctgataatatatatgtatttgtgatttgggcagcatcgttgttgtaaagtgtaaacccttgtccctttgcaatattgagttcttttaacaaatttgagatatttgaatttgtttgtttatagtctaatacgagttgtaaaagtagatgaaggcgtattaaacctcgtttgtgccgttagctgttgtctagagttaaaccacgaaaaaatcttccattttatt

SEQ ID NO: 129953 - DNA, 1450 bp, Zea Mays
ttcaaggcttctgaggtgcgtctcccgaccgcgaccacctcgacttcggatacctcggcatctaggggctaacgtcttcttggagcacacaccggtctctactccagccggtgttctcattcaaattgcggggagcatacaacatgatggcaaagctctcccgtgagcagttagagaggggcgtcatctgctcctctgctggaaaccatgccccagggcgttgctctttctgctcagagactgggttgtgatgctgtcatcgtcatgcccgtgacgacaccagaaatcaagtggaaatcagtggagcggttgggagcaacggtggtccttgagggggactcatatgatgaagctcagtcatacgcaaaattacgatgtcagcaagaagaccgcacattcatacctccctttgaccatcctgatgtcatcactgggcaaggaactgtcggcatggaaattgttcggcaactgcaaggtccactgcatgcaatatttgtacctgttggaggcggtggattaattgctggaattgctgcctatgtaaaacgggttcgcccagaggtgaaaataattggagtggaaccctccgatgcaaatgcaatggcattatccttatatcatggtaagagggtcatgttggagcatgttggtgggtttgctgatggtgttgctgtcaaagctgtaggggaggaaacatttcgcctgtgcagagagcttgtagatggcattgttatggtcagtcgagacgctatttgtgcttcgataaaggatatgtttgaggagaaaagaagtatccttgaacctgccggtgcccttgcattggctggggctgaagcctactgcaaatactataacttgaaaggagatactgtggttgcaataactagtggggcgaatatgaactttgaccgacttagacttgtaactgagctagcagatgttggccgaaaacgggaagcagtgttagctacatttctgcccgaggagcatggaagcttcaaaaaattcacagaattggttggcaggatgaatattactgaatttaaatacagatatgattttaatgcaaaggatgcccttgttctttacagtgttggcatttacactgacaatgagcttggagcaatggtggatcgcatggaattggcgaaactgaagactgttaatctaactgataatgatttagcaaaggaccaccttagatactttattggaggtagatcagaaataaaagatgaacttgtttaccggttcatttttccagaaaggcctggtgcccttatgaaatttttggatgcattcagccctcgttggaacatcagtctttttcattaccgtgcacaggtacatgaggagttttgtctgtagttttcctatagtagtgtctattatgcagtcttataatttgaaacaatgatccttttgctacttatttgaaagacggaacttg

SEQ ID NO: 129954 - DNA, 502 bp, Zea Mays
acacgaggtaaacaaatcagaggaatttgacgaggccaccgtcaccaccatggcggccgccgccaccaccgcttcgccctcggcctccttccctgcggcatccctccgtcgcgacgcgcgcaggacctcatgcgtagccgccgccgccgcggcgacgacggccgctgaggcggggctcgcggccgtcccggcgccgccgccaacgccgatggttcgggtggtgccggagtcactgcagcgggaaagcgggtgcctcgtggagggatttagggcgcgcggtgcgtgcgcggcggatggggaggggtttggggacgccgcgggggaaggaggaggccccggcgcgatggagtacctgaccagcgtgctgtcatccaaggtgtacgacgtggcaatcgaatcaccgctgcagctcgcctccaagctctcccaccgcctcggggtcaacatctggatcaagcgcgaggacctgcagccggtaatcgacgtcgatgtgcagccctag

SEQ ID NO: 129955 - DNA, 2445 bp, Zea Mays
agcagaaaccacagcagcctacctctgcggttgcattcttcgcgtccacagaccgcagggaccgcggtaaacaaatcagcaacgaaaccactgcaggatttcgaaaaggtgagataaaacgctaggagccgaggagaacaactgaatgatccaacaccgccctcttgtgctctccctgccctcccccgctataataccgccacgccctcgtcgccatcgtcaccacaccaccactccctccctgccctctcactcccgatccctcctccaccaccgcttcctccgcgtcacccatctcgtcgtcgcctcacgaggcgaccagcggcggaccctccgcggcgcaaccatggggctcttcactgtgacgaagaaggccaccacgcccttcgacggccagaagcccggcacctccggcctccgcaagaaggttactgtattccagcagccccattatctgcagaactttgtccaatcaacattcaatgcccttcctgtggatcaagtaagaggtgcaacaattgttgtctctggtgatggccgctatttctcaaaagatgctgttcagatcataacaaaaatggctgctgccaatggagtaagacgtgtttgggttggacaaaacagtctcatgtctactcctgctgtatctgctgtcatccgtgaaagagttggtgcagatggatcaaaggctactggtgccttcatcttgacagcgagccataacccaggtggtcctaaggaggacttcgggatcaaatacaacatgggaaatggtgggcctgctcctgaatctgttaccgacaagattttctctaatacaacgacaatctctgaatacctcatctctgaagacctaccagatgttgatatttctgttgtcggtgtcaccagcttcagtggacccgaaggcccctttgatgtggatgtttttgactctagtgtagattacataaagttaatgaagacaatttttgacttcgaagcaataaaaaagctgctgacctccccaaagtttacattctgttatgatgcactccatggtgttgcgggagcttatgccaaacacatctttgtggaagagcttggtgctgatgaaagctcactgttgaattgtgtcccgaaagaggactttggaggtggtcatccggatcctaaccttacctatgcaaaagagttggttgaacgcatgggtcttggaaagtcatcctcaaatgttgagcctcctgaatttggtgctgcagctgatggagatgctgaccgcaacatgattcttggtaaaagattctttgtgacaccgtcggactctgttgccattatcgcagccaatgctgttcaatcaattccttactttgcttctggcctgaagggagttgccaggagcatgccaacatctgctgcccttgatgttgttgcaaagaatttgaaccttaagttctttgaggtgcctactggatggaagttttttgggaatttgatggatgctggaatgtgctcaatctgtggtgaagaaagctttggcactgggtctgaccacattcgtgagaaggatggcatctgggctgtgcttgcatggctttcaattattgctttcaagaataaggacaaccttggaggagataagcttgtcactgttgaagatattgtccgtcagcactgggccacatatggtcgccattactacacacgctatgactatgagaatgttgatgcaggggctgctaaggagcttatggcaaacctagtaagcatgcagtcatcactttctgatgttaacaagttggtcaaggagatccggtctgatgtttctgaagtagttgcagctgacgagtttgagtacaaggatcctgttgatggctctgtgtccaagcaccagggcatccgatacctctttggagatggttcacgactggtgttccgcctctctggaaccggttctgttggtgccaccatccgtgtctacatcgagcagtacgagagggactcctctaagaccggcagggattcacaggacgcccttgctccgctggttgatgttgcgctcaagctctccaagatgcaagagtacactggacgctctgcccccaccgtcatcacataaattttgaagagtgttttagaatgagttgaggcgcttacacaaactttcattccggcctcttgttccatagtttttcttgcatgttacatctcaccgatgaataaaatgtatgtatcagacttgtctcgtttttttgcccatccaagcagcaaattagccgctggcacagcatgcggtaataatcttgtcacagtgctgtaattgggagcgtttttcttgttagaagtgtttctggtttgtttgagcatttgcggatcgatttttctttctgaagagtatataaacattttactcacctgtatacactgtcgcagtgtcactaatgttctgatggctgtttagactat

SEQ ID NO: 129956 - DNA, 282 bp, Zea Mays
gcattgaatggtctatcactctatcgtacatacatctggtaattttgttacgcgcttaatataatgggaggatgcaaaactatatgttttttttttcacaggtgaaccaagttcattttggttggaaggatgtatggattaactcattatgatctattttggaagactggtgtttagttcaaaattcttataccctatgtcattggattttatactcttgtgtgccattgaattgaatggtatttatgagatatctagtaatttcagtggcattgttgtgca

SEQ ID NO: 129957 - DNA, 1404 bp, Zea Mays
gtcgtcccgaacgttccttttccgagcacctcagccgacgcgcgcagcaggtcctccagcttgaaagacgccacggcggccgctgaaccaaagaagaccagcttcttaccggacgtcgactggacaataggagcgttggggtggcctatcgtggtcaacggcgctacagcggcagcgctagtcatctcgggaggtttcctgccgccggcaggcgctggggaagaaggcggcatctccagagaccgcgttctgatgccccccgacctgcgacagaggcagacaaggaggaagaggagaagtgcggcgcccaaggcagagcctatggcgattccggcaatggcgccaccggagagcttcttgcccttatggccattttctacgccgcttccaccgttggtgccgccgccgccgccgctgccactgggaacaggcgtcggcgacggtgtctgccccgctggagcaggggacgggggaacctcaccagggcaaggccccaagggtccgccgcacaagcccgtccccaggaacgcggagcgcggctgcgaccgaagtgaggccgggatggatccgttcagttggttgaacgagacattgaactgctgcagcggcggtagcttcacatcggaaatctcgccggaaaagcgattattctcaaggagcaggaccctgaggtgtgtgaggttgccgagctccgtcggaatgggcccggacaggtcgttcccgccgagcgagagcctgacgagccccgggagagcgagaatcgcctgcgggaacccgcccgacagcctgttcccgttgaggaagacgttacgaagcgcggcggcggaagacaggtcggctgggagcgcgccggagagcccgttgaggcggaggctgagcgtgtgcagcgccgtaaggttcccgagcgtccccgcggggactgtccccgagagcgtcgccccgggaagccgcagcaccgccacgcggccgtgctcgcaggtgacccccgtccacgagcacgcgcccgcgacgtccgaggcgttccacgccaggcgccgccccacggcgtcacggaacgccacgagcgcccgcgcgtcgctcgcgaggtcgtcggcccccgccagcgacgcgacgacgaggagcatggggaacgcgaaacggatgcgccggagccgccacggcggtggcgaaggcgaccgcatcgcggcggcggctgaggtggcgagagcgggcccggtccggaacgagccgaggttgagagtggtctcgtccgtttcttcgtttcttgcgtctggcgtgcggggagagaaaaaccctaaaactcccgtgcgcatttcgtggaatgggcctcggggagtttagtaaattcgcgggtgggaggttgcgccgctcggggtggtggggccgggcgagagggatgggaat

SEQ ID NO: 129958 - DNA, 1294 bp, Zea Mays
gtcgtcccgaacgttccttttccgagcacctcagccgacgcgcgcagcaggtcctccagcttgaaagacgccacggcggccgctgaaccaaagaagaccagcttcttaccggacgtcgactggacaataggagcgttggggtggcctatcgtggtcaacggcgctacagcggcagcgctagtcatctcgggaggtttcctgccgccggcaggcgctggggaagaaggcggcatctccagagaccgcgttctgatgccccccgacctgcgacagaggcagacaaggaggaagaggagaagtgcggcgcccaaggcagagcctatggcgattccggcaatggcgccaccggagagcttcttgcccttatggccattttctacgccgcttccaccgttggtgccgccgccgccgccgctgccactgggaacaggcgtcggcgacggtgtctgccccgctggagcaggggacgggggaacctcaccagggcaaggccccaagggtccgccgcacaagcccgtccccaggaacgcggagcgcggctgcgaccgaagtgaggccgggatggatccgttcagttggttgaacgagacattgaactgctgcagcggcggtagcttcacatcggaaatctcgccggaaaagcgattattctcaaggagcaggaccctgaggtgtgtgaggttgccgagctccgtcggaatgggcccggacaggtcgttcccgccgagcgagagcctgacgagccccgggagagcgagaatcgcctgcgggaacccgcccgacagcctgttcccgttgaggaagacgttacgaagcgcggcggcggaagacaggtcggctgggagcgcgccggagagcccgttgaggcggaggctgagcgtgtgcagcgccgtaaggttcccgagcgtccccgcggggactgtccccgagagcgtcgccccgggaagccgcagcaccgccacgcggccgtgctcgcaggtgacccccgtccacgagcacgcgcccgcgacgtccgaggcgttccacgccaggcgccgccccacggcgtcacggaacgccacgagcgcccgcgcgtcgctcgcgaggtcgtcggcccccgccagcgacgcgacgacgaggagcatggggaacgcgaaacggatgcgccggagccgccacggcggtggcgaaggcgaccgcatcgcggcggcggctgaggtggcgagagcgggcccggtccggaacgagccgaggttgagagtggtctcgtccgtttcttcgtttcttgcgtctggcgtgcggggagagaaaaacc

SEQ ID NO: 129959 - DNA, 1145 bp, Zea Mays
ttggcccctctgctgtatcccttcccctatctgcagcagagcagttcctttcttgctctcctccgctagtccggtaccctctcgacctcggcgtcccaccgaagacgacctcacgcggagctgggaatattccttcgcctccgtgctccctttagcaccaactgtcacggccgcttccagcacgcatcattctcgtctcccgtctcgagagattgcagggggcggcgctcgaagctggaggaagcggacgggttcgcgatggggtccgagggatcctcgggtccggtcgtcgttcccagaaactttaggctgctagaagaactagaacgtggtgagaagggcattggtgatggaactgtgagctatgggatggatgatgctgatgacatatatatgcggtcctggacaggaactatcattggtcctcccaatactgttcacgagggacgaatctaccaattaaagctgttttgtgatacggattatccagataaaccaccgacagtccgattccagactcggatcaatatgacatgcgtgaaccaagaaactggattggttgaaccaagtctatttcctatgcttggcaagtgggaaagggaacatacaatggaggacatcctgagcagcttaaaaagggagatgtcaactcctcagaaccgcaggctgtaccaacctcatgaagaagctggcaaggtggctagatacaggaaccagatgagcatggccgtcagcgatcttctgcattatgcgctgtagttaatattaattagttaactttgaggtaatgaagatcaaagagtagagcagaaagggctgtcccttagatgtgccgtcatgtaataatgtacatttgaattgagcagcgagatgccgagcttgagcgaaccctctcagggcatgtttaggaacaatcccgttcaattgccttgcttccaaacaagccctgtattaaatcctcctgtagctcaccttattcatgccgccatcgcaataaagtgtcgatgaaactgttaaattgactgcacaccatgtaacatgcaaccgattcgatttctgtgaaggacaacgtgttcagtgtcggctgttccacatgttacactgtgtagtctgttctgtctaggcggctaggcctgttattcttt

SEQ ID NO: 129960 - DNA, 1046 bp, Zea Mays
ttggcccctctgctgtatcccttcccctatctgcagcagagcagttcctttcttgctctcctccgctagtccggtaccctctcgacctcggcgtcccaccgaagacgacctcacgcggagctgggaatattccttcgcctccgtgctccctttagcaccaactgtcacggccgcttccagcacgcatcattctcgtctcccgtctcgagagattgcagggggcggcgctcgaagctggaggaagcggacgggttcgcgatggggtccgagggatcctcgggtccggtcgtcgttcccagaaactttaggctgctagaagaactagaacgtggtgagaagggcattggtgatggaactgtgagctatgggatggatgatgctgatgacatatatatgcggtcctggacaggaactatcattggtcctcccaatactgttcacgagggacgaatctaccaattaaagctgttttgtgatacggattatccagataaaccaccgacagtccgattccagactcggatcaatatgacatgcgtgaaccaagaaactggattggttgaaccaagtctatttcctatgcttggcaagtgggaaagggaacatacaatggaggacatcctgagcagcttaaaaagggagatgtcaactcctcagaaccgcaggctgtaccaacctcatgaaggtaatgaagatcaaagagtagagcagaaagggctgtcccttagatgtgccgtcatgtaataatgtacatttgaattgagcagcgagatgccgagcttgagcgaaccctctcagggcatgtttaggaacaatcccgttcaattgccttgcttccaaacaagccctgtattaaatcctcctgtagctcaccttattcatgccgccatcgcaataaagtgtcgatgaaactgttaaattgactgcacaccatgtaacatgcaaccgattcgatttctgtgaaggacaacgtgttcagtgtcggctgttccacatgttacactgtgtagtctgttctgtctaggcggctaggcctgttattcttt

SEQ ID NO: 129961 - DNA, 1803 bp, Zea Mays
ctaagttggagaaaaagggtagttgggtaacttgaaacctgcctgagtccacctgccggatgcaccgccgccttgccaccgcggccacagcgcccgcgctccggcggttctcgcaccacagcgcgcgtccccagcctgacccaaggttcgccttcctatgctccgaggtcgacaacctcgacctctccccctctcataaatcatcgccacggcctccccatagagagcaattccaggtgttagaagagctaagaagcgaccttgctcttgctggagacgctccggcgggtgtggctatagcgcatccgtggccggagtggatttctctgatggagcacctcctccgtcaaggccacgttgacccctccaccttcgccgccgcctcgctgtcttctaaggacgccaacgctgtccgcaccgcctgcctccgattcgggcgccagcggccggagctcatcaggcatgtatcaagatgggatattcaggttgccatgcgatgtggttgtcccagcattgacagaaaggttgtaaactctgggaagcgattgcgggcttatgtaggacttgatgaaggagaggtttgcagccaatgcaatttaagaggaagttgtgatagggcatatgtgaaggctcggaaagaggacgttggaagaactgtggatgttatgcgcatccttttgacttacggtcttgatgttattaccggcaatgtagataatagagcatgcctgaacaaatctgtcaaggaatcaataaagatcctactaagcgaggttgttgaggtggattctaggggacctggttccagcactgtgaaagctgcacagcgcaaaggtcaatctgctgtacccatgaagcagggtgattggaattgtcccaaatgtgactttctgaactttgcaaagaatatcaaatgtttgcgctgcgatggagaattccaagagaggtatcagttgttgcatgaagaccgagagcatctgcctctcaaaaagggtgactggatatgcaaaaggtgcaactttttgaattttgctaagaatacaagatgcttgcaatgtcatgagaaaccaacaaaccgtttactcaacccaggagaatgggagtgtgtctcgtgtaactatgtgaacttcaagaggaatgggttctgcttgaaatgtggctggaaaagaccaaagtctctaaacaatcaagatagtgtcaaattgtgtcatgatttagagcatagtaagaatccacgtatttcatttgttcaagatggtgtccagatgaaggggtggcaaagtctgcaaaagaagggttcaccatccgacacagatttggatttctggagtgcagacgacgaagagggtggtagcagggataatgatacgctgctgcgacagaaggactacagatttcttgagagttttcccattgtcggtggcaggactgctaattcccaagatcttcttgcaagggagaagtggaaggatgaaatgtccaggagaaataaaggccttcaaactacggaatcgcaagaaagcaatcggccttctagccactgccgtcttccaagaagcatggagctggttgactctgatgatgatattgcttcttggttttcgggtggggataataataataggaacctggataaggtataaccagatcttgtaagtggatgcagctcatcaataaaagttgcatcctttggaattattgaaattcaggcaaaaagaattattaaagctcactggagaactgtacaatttaatgtttcggaactttgtttatgggctgctcagagatgatatgattttttgc

SEQ ID NO: 129962 - DNA, 1712 bp, Zea Mays
ctaagttggagaaaaagggtagttgggtaacttgaaacctgcctgagtccacctgccggatgcaccgccgccttgccaccgcggccacagcgcccgcgctccggcggttctcgcaccacagcgcgcgtccccagcctgacccaaggtgttagaagagctaagaagcgaccttgctcttgctggagacgctccggcgggtgtggctatagcgcatccgtggccggagtggatttctctgatggagcacctcctccgtcaaggccacgttgacccctccaccttcgccgccgcctcgctgtcttctaaggacgccaacgctgtccgcaccgcctgcctccgattcgggcgccagcggccggagctcatcaggcatgtatcaagatgggatattcaggttgccatgcgatgtggttgtcccagcattgacagaaaggttgtaaactctgggaagcgattgcgggcttatgtaggacttgatgaaggagaggtttgcagccaatgcaatttaagaggaagttgtgatagggcatatgtgaaggctcggaaagaggacgttggaagaactgtggatgttatgcgcatccttttgacttacggtcttgatgttattaccggcaatgtagataatagagcatgcctgaacaaatctgtcaaggaatcaataaagatcctactaagcgaggttgttgaggtggattctaggggacctggttccagcactgtgaaagctgcacagcgcaaaggtcaatctgctgtacccatgaagcagggtgattggaattgtcccaaatgtgactttctgaactttgcaaagaatatcaaatgtttgcgctgcgatggagaattccaagagaggtatcagttgttgcatgaagaccgagagcatctgcctctcaaaaagggtgactggatatgcaaaaggtgcaactttttgaattttgctaagaatacaagatgcttgcaatgtcatgagaaaccaacaaaccgtttactcaacccaggagaatgggagtgtgtctcgtgtaactatgtgaacttcaagaggaatgggttctgcttgaaatgtggctggaaaagaccaaagtctctaaacaatcaagatagtgtcaaattgtgtcatgatttagagcatagtaagaatccacgtatttcatttgttcaagatggtgtccagatgaaggggtggcaaagtctgcaaaagaagggttcaccatccgacacagatttggatttctggagtgcagacgacgaagagggtggtagcagggataatgatacgctgctgcgacagaaggactacagatttcttgagagttttcccattgtcggtggcaggactgctaattcccaagatcttcttgcaagggagaagtggaaggatgaaatgtccaggagaaataaaggccttcaaactacggaatcgcaagaaagcaatcggccttctagccactgccgtcttccaagaagcatggagctggttgactctgatgatgatattgcttcttggttttcgggtggggataataataataggaacctggataaggtataaccagatcttgtaagtggatgcagctcatcaataaaagttgcatcctttggaattattgaaattcaggcaaaaagaattattaaagctcactggagaactgtacaatttaatgtttcggaactttgtttatgggctgctcagagatgatatgattttttgc

SEQ ID NO: 129963 - DNA, 2138 bp, Zea Mays
ctaagttggagaaaaagggtagttgggtaacttgaaacctgcctgagtccacctgccggatgcaccgccgccttgccaccgcggccacagcgcccgcgctccggcggttctcgcaccacagcgcgcgtccccagcctgacccaaggttcgccttcctatgctccgaggtcgacaacctcgacctctccccctctcataaatcatcgccacggcctccccatagagagcaattccaggtgttagaagagctaagaagcgaccttgctcttgctggagacgctccggcgggtgtggctatagcgcatccgtggccggagtggatttctctgatggagcacctcctccgtcaaggccacgttgacccctccaccttcgccgccgcctcgctgtcttctaaggacgccaacgctgtccgcaccgcctgcctccgattcgggcgccagcggccggagctcatcaggcatgtatcaagatgggatattcaggttgccatgcgatgtggttgtcccagcattgacagaaaggttgtaaactctgggaagcgattgcgggcttatgtaggacttgatgaaggagaggtttgcagccaatgcaatttaagaggaagttgtgatagggcatatgtgaaggctcggaaagaggacgttggaagaactgtggatgttatgcgcatccttttgacttacggtcttgatgttattaccggcaatgtagataatagagcatgcctgaacaaatctgtcaaggaatcaataaagatcctactaagcgaggttgttgaggtggattctaggggacctggttccagcactgtgaaagctgcacagcgcaaaggtcaatctgctgtacccatgaagcagggtgattggaattgtcccaaatgtgactttctgaactttgcaaagaatatcaaatgtttgcgctgcgatggagaattccaagagaggtatcagttgttgcatgaagaccgagagcatctgcctctcaaaaagggtgactggatatgcaaaaggtgcaactttttgaattttgctaagaatacaagatgcttgcaatgtcatgagaaaccaacaaaccgtttactcaacccaggagaatgggagtgtgtctcgtgagtgcctatttctactacactattatatatctccttatttgttgaacatgttcatgaaggacaagcctggcacagtggtgacaagccttttcactgagtcggttattccttcctcagaccccacttgtgtggaagccgccagcactcggtctgtccttttatttgtttgaacatttgaagtgttctgatgcctactgccaatacaagttacaagcttatagttggagatgatgttagcgctgtgtggctatcctttcactgctgtgattttatttctaatacatttgagaaaatggaagataactatgttcatgtgttatgttcaatttcaggtgtaactatgtgaacttcaagaggaatgggttctgcttgaaatgtggctggaaaagaccaaagtctctaaacaatcaagatagtgtcaaattgtgtcatgatttagagcatagtaagaatccacgtatttcatttgttcaagatggtgtccagatgaaggggtggcaaagtctgcaaaagaagggttcaccatccgacacagatttggatttctggagtgcagacgacgaagagggtggtagcagggataatgatacgctgctgcgacagaaggactacagatttcttgagagttttcccattgtcggtggcaggactgctaattcccaagatcttcttgcaagggagaagtggaaggatgaaatgtccaggagaaataaaggccttcaaactacggaatcgcaagaaagcaatcggccttctagccactgccgtcttccaagaagcatggagctggttgactctgatgatgatattgcttcttggttttcgggtggggataataataataggaacctggataaggtataaccagatcttgtaagtggatgcagctcatcaataaaagttgcatcctttggaattattgaaattcaggcaaaaagaattattaaagctcactggagaactgtacaatttaatgtttcggaactttgtttatgggctgctcagagatgatatgattttttgc

SEQ ID NO: 129964 - DNA, 1059 bp, Zea Mays
atgtcgacactcgacacccaccctcctgtcgagccacgggtctccccactagtgcaaccgctttctcctccacgggtgacccctccccccagcgcacggcctgcgacaccgcagccatgcccgacgccatctacctcttcctcgcgtccagctagacctcccccgtgcctacgcccatccctggtgcgcccgcgctgccccctcatgcggccaacatcgacatccctctcccagtaccggctgcaactgcaggcatcaaccccttcctcacgcccagttcatctgcttgtggcggcggcgcgccctcctccccgcacgttggccttgcgtcggacagctcctccgacgccagcgtcccctcctccaaagatgacgagtgcggcgtcccctcccccagctccagcgagcgcaagccagggaccacacccacgcctccccctccctcctggtcgcggcttcgcccggcgccgccgcccactcccttcctccgcctgcaccccagtgcgtcggtgctagccccagcgtctgtttccctgcattggcacccacaccaccaccatcccctctccactcagcgacatgcctcccctgcatgatgcgtgggtcgggctcccctcccctgcagagcagccccactcctccccacgcctgctggcaacgatctctacggctaagggtgaaaatgggacaggtacggaatagcattgtcaagttgctgctacacaggaggagagagttatggaagaggaagagaaggcaacgagggcaatgaacaagatgatgaagagtacctgcctaatgatgatgaagaagtggatgactttggtgaatccccacataacagtccaactcaagctggtgttggtggtgaagaaaatgcaatggatgatcttgatttgggagatatatagggtatctagtatctatctagctgcagcagcagcttagctatctaatggagtttatttcctttcaagtttgaactatattttcttgctatttgttttccaatttgaactaaatggctgttatgacttatgagtttatgacttatcactt

SEQ ID NO: 129965 - DNA, 4720 bp, Zea Mays
cgagtcccgactcgcccctccagatccaccaccaccacctcttctcctccagatccaccaccccatcctctccgcagctacagccaggtggagctcggcttagccgtcgacgtggctgggcacgccgggacgggaggatgctgaccaagttcgagacgaagagcaaccgggtgaaggggctgagtttccacccgcgtcggccatggatcctggcgagtctccacagcggggtgatccagatgtgggactaccgcatgggcaccctcctcgaccgcttcgacgagcacgacgggccggttcgcggcgtccacttccacgccactcagcctctcttcgtctccggaggtgatgattataagattaaggtctggaattacaagacgcaccgctgcctcttcacacttcatgggcatcttgactacattcgcaccgtgcaattccatcatgagtacccatggattgtaagtgctagtgacgatcagacaatccggatctggaactggcagtcacgcacctgtgtggctgtgctgactgggcataaccattatgtcatgtgtgcatctttccatcccaaagaagacctagttgtatcggcatcacttgatcagactgtgcgtgtttgggatattggagctctaaggaagaagacagtgtcacctgcggatgacatcctccgtctcacccagatgaacacagatctttttggaggtgttgatgctgtagtgaaatatgtcctcgaaggccatgaccgtggggtcaactgggcctcgtttcatcccactttgccgctcattgtttctggggcagatgaccggcaggtgaagctatggagaatgaacgataccaaggcttgggaagttgatactttaaggggtcacgtgaataatgtgtcctgtgtgatgttccatgcgaagcaagacatcattgtgtctaactcagaagacaaaagcattcgcatttgggatgccacaaagagaactggtatccagacatttagacgggagcacgaccgtttctggattcttgctgctcaccctgaaatgaaccttcttgctgctggccatgacagtggcatgattgtgttcaaattggagagggaacgcccggccttctgcgttagtggtgacactgttttctatgtgaaagatcgatttctccgtttctttgagtactccacccagaaggaagttcaagtggctccaataagaagacctggatcggtcagcttgaaccagtcacccaggatgctgtcctacagcccaaccgagaatgctgtcttgatttgctctgatgctgacgggggttcatatgaactctacattgttcccaaggattctgctggcaggtctgattacttacaagaggcaaagaaaggggcgggtagttctgctgtttttgtagcgcgtaacaggtttgcagtccttgagaagagtagcaatcaagttttggtgaagaatcttaagaatgaaattgtgaagaaaagcccccttcccattgcgactgatgcaatatattatgctgggaccggtaacctgctttgcaaagctgaagatcgggtggccatctttgatcttcagcaaaggttagttcttggtgagcttcagacacctgctatcaaatacgttgtttggtccagtgatatggaatccgttgcactgctgagcaagcatgcagtggttatagctaccaagaagcttgtccataggtgcacactacatgaaaccatccgtgtgaaaagtggtgcctgggatgagaatggtgtgttcatttacactacactgaaccatatgaagtactgtcttcccaatggagacagtgggatcataaaaaccattgatgttcctatttacataacgagggttgttgggaacaatattttctgcttagatcgtgatgggaagaacaagctggttgcagttgatgcatcggagtacattttcaagcttgcccttctccgaaagcgctatgaccatgttatgagtatgattaagaactcccagttgtgtgggcaagctgtgatttcttatttacaacagaaaggtttcccagaagttgctctacactttgtgaaggatgagaagaccagatttaacttagctcttgagagtggaaacattcaaattgcagttgcttctgcgaaggagattgatgacaaggatcactggtacaagttgggaattgaggccctgaggcagggaaatgttggtatagtggaatatgcttaccaacgaacaaagaattttgagaggcttgcttttctgtatcttattaccggttacttggacaaggtgggcttcatgtgcaaaattgctggacagaacaacaatttgatgggacagttccacaatgcgttgtatcttggggatgccaagaagcgtgttgagatcttggagaatgctgggcagctgcctcttgcttatgttaccgctgccactcatgggctcacagaatttgctgagaggattgctgctgaattaggcgagaatgttccttctctacctgaaggaaaacccaaatcactactgatcccccctgcacctctcacagcctgtggtgattggccattgctgagggtaatgcgcggtatttttgaaggtggattggatgctactggaagggcggatcttgaggaagatgatgaagctgctggtgctgattggggtgatgaggagttggatattgttgatgcaagtgaggttgtggccaatggtgatggttttgatgtagaagagggtgaaccaaatgaggagggtggtgaggaaggtggctgggacctggaagatctggaacttccgcctgaaactgagactccaaaagctgttggcaatgctcgttctgctttatttgttgctcctacaccaggtattcctgtcagccaaatttggactcagagatcttctctggctggggagcaagcggctgcagggaactttgacacagcaatgaggttgcttagccgccagttgggtatcaagaactttgttccactaatgcccttgtttcttgatctgcacatgggcagtcatacatatttgcgtgggcttgctgccgctcctgttatatcagttgcagtagagaaaggttggaatgagtccgcaagtcctaatgtgaggggccctcctgcgcttgttttcagcttctcacggatggaagacagactcaaggctgcctacaaagccacaactgagggcaagttcccagaagcactgaggcagttccttagcatcttacataccattccagttatcgtggtggactcacggagagaagttgatgaggtgaaggagttaatcgagatagtgagggagtatgtccttggtctgaggatggaactcaagagaaaggaactgagggatgatgtgacccgtcaacaggagttggctgcttacttcacaaactgcaagcttcagagagttcatatgaggcttgtgctcgctagtgccatggctctttgcttcaagcagaaaaactatgcaactgcggcacactttgctaggatgcttcttgagaacagccctcaggaggcccaagcaaagaaggcccgacaggtgctgcaagcttgccatgacaaggacgattcccaccaactgaactatgacttcagaaatccattcgttgtttgtggcgctacgtatgttcctatctatcgtggccaaaaggatgtttcgtgcccatactgtggatcccgatttgttccttccatcgaaggacagctttgtaccatatgcgagcttgctgcggttggggcagatgcatcaggcctcctctgctctcctacacagtcgagataagcgatggtagttagaggtcccctatattctttctagcgtctcaagttccaagatttcatcatatatatgttaccagagagtttactgattgtaaggaataagtattatacatgctgttgagtttttcttttcttttttgttctgttaccataatttttgtttgccttaggggctgctgtcatcacctgccgtatggtttagatttctgatcgacttccaatatgctggaaattgatgtatgagatgtttctttcgttcttcaaaaatcttttttgggatgcctcagctttgcttttagtctggaggtgatctctgctcgctaggcgggctaatgtgacgtcaaaattcctcaagcctgaaagagtttacatgctagagtgccaatctcagatctcttagtacacacgaagagacatgggaattagtggtgagagttgacaagagttaaggtgagaaattgactttcagtgttaggacttgttcagttatttccattccatgtgggtcggggtggattgagatggattaggatgtattttgacttgtatgaatttaaactaacccaatatcattcaatccatatggataaacggtgaatcgataagtcttcaatctcttgtttgattcatgagagggaaataagagaggcagttgaagatggatttacattcatggtttgtgtttggtgtgtgggattaaagcatgaaattagtaaacaataaaacatgataaacgatgaggttatctataccactatataatccatcactttaaactttttaaaaaacacccaaccaaattatctacatatttacaaccactactaaattcatcaaataaataacactcagatgtaacacaaactcaatccatcattaaaaactacggtttaaatcactgaataattttttctcttacttaaatctaat

SEQ ID NO: 129966 - DNA, 1873 bp, Zea Mays
gccacactgttcccgttttttttgttaagctctcgcttaacctaaacgccgggagcacaagtgctcggcgaaatgacgagcgccggagcggcgacaggcgccgcgctaggcgcgcggacggcgcggtcctgcgacggctgcatgaggcggcgggcgcggtggcactgccccgccgacgacgccttcttgtgccagacctgcgacgtctccgtgcactcggcgaacccgctcgcgcgccgccaccaccgcgtccgcctcccctctgcgtcctgctcctccccaccgcgcgacccggacgcgccaacgtggctccacggcctcaagcgacggccacgcacgccgcggtccaagccaggggggagcaagagcaacaagcatgaggcgactcccagctttatcgccgcggctgcgtcgtcggcagcggtccccgacctcgaggcggaggagtccggctccggtatcctgggcggtaacgacgaccaccacgggttcctgcaggatgacgacgaagaccttctgtaccgcgtgccggtgttcgaccctatgctcgccgagttctacaaccccgtggccgacgagggggagcagaagccggcctgcagcctgctgatgccgtctctcgcggaaacatcgccggagttcgcctccggcggctcggcggaggcggacgggctctccgtgtcgttccacgtcccggacatggagctcgctagcttcgccgcggacatggagagcctcctcatgggagtcgacgacgacgggtttgactgtttgggtttcttggacgaagagaaacctcaggtgaacgcggacttggacgccatagtagcgccggcgcctgaaccagaggacaagaaacggaagcggccggagatgatactcaagctcaactacgaaggcgtcatcgcctcatgggtccgtgacggcggctcgccgtggttccacggcgagcgtcctcacctcgactgtcacgagctatggtcggacgacttcacgacgggtagccgggaactcctcggcggagccgtgacaccggtgaccggtggcgagcgtgaggcgcgggtgtcgcgatacagggagaagcggcggacgcgactgttcgccaagaagatccggtacgaggtgcgcaagctcaacgccgagaagcggccgcggatgaagggtcggttcgtgaagcgcgccacgcttccgccgctgccaaggccgccgccgccgcagcagcagcagcagcagaagcagctgccacgcgcaccgccacacgtgggcatggtgctcccaccacctccggtatcgaacgggcgcttgtggttttgagaccatatgcatgcatggaagcatgcatgaagcaacgtatgtgcgtgatgcatcgatgcatctatctcgctcgtagcatgcgcatgttctttctactctacttttaattcgtgcgtgcgaattagggcaccccacaagataatgctccctgcttacgactgaaatatatttgtttgtacatgtgcagaatagttaagaaagtatatttatagcctaggtttgttgtttatcttttctagttgttgtaaagaaggatgcactaaatacaagggaagggtgtagattttgatagatgcagagccatgcgtgctacactatagcgtcctttgattcacatatttgtaacgtaatagttaaataataacgttaaattatgtttgttttagtccagccgtactaaaaattgatactgaccaattcaaacttgttaacggcgataatcgaatgtaaattattaacattaccattaccatttatattatattttatgaacaaacaacaactatgcaactctgagcttagactttgtaagattgaagtgatgatatactgtagtgtt

SEQ ID NO: 129967 - DNA, 211 bp, Zea Mays
gccaccaaccgctcccgcggacgcggcaaggcaggtctgggcctgtgcgcacggcagccggccggctgtagccgctagccgtggccatggcggcggccagccctgcccccagccgacctcgaccctccggcgagctgccctccatgtcccggtcgcttggtcgttcgccgtgccgatcgccctgcgctgctctcgtcgtcgccggggttag

SEQ ID NO: 129968 - DNA, 1074 bp, Zea Mays
tcacccttttcccttccccctccccaaccccccacacagactagcaagccgcgcgcggaggcgaggcgttcgcacacctcgccgcgcgtccttggcctctccccgcgccaccaccgttccgttgcgcccgctaacgatcacgcgtttccggtgggagagagagtaggtagggagaggacgggacaggatgctcgggttcaggcagatgtcgtggtcgtcggcggaggcgcaggcgccgtcggagcagctgtgcgaaggggtggcggctgtcgtggcggcgcgccaggggatggagacgccgctgacggcggtggccgaggcgttcgaggagctggtgcgcgggatggacgccgacggcggcgagctccgcgtcgcgcccttcagcgacacctgtgccctcgtctccgtgctcttcagcagcctcgggatggccttcaggttcgccgagatggagtacgtcaccaaggtgaacgatctcatcggtgccggcaagtcgtaccgcacgctgagcgacatcctcgacaaggacatccagaacgactgcgtgaagaagcagggaagccactcccggaacctgcgcagggtccgtctcggactcggcctcatcaaggccctcttcgagcaattcctcgccaccgagggttcattgtatgatgctgctacgatagcttacgggcaggtctgcgcgccgtttcatagctgggcgatcaggaaggctgttggcgctggcatgtacacccttccaaccagggagcagttggtagtgcggctgaacgaaactgatctctcggtgcagaagcagatgaggagatacattgacgcttctagtcctatcatagagtacatcgataaccttttcctctcgaggaacattagtctagattggtgaactagtttttctgagctgtactgaaagtcaagtttgtaacttgttcacaagctgttgttggtaccatcgatttatttcttcatagttgtttactaggtatgtgtccgtgcgttacgaaagaagtaaaaaatttatattaaacatatatacgaaacgacaaacgtcactatgatatgcaaaatttg

SEQ ID NO: 129969 - DNA, 685 bp, Zea Mays
ggaagctccaggaaagaaagttgtcgcgttgatttgactcgcggtcgattgcgtgcagactctttcagtatttcaatggtcggcgttattagcaccactgcaccaatcaaaattgctcccgcgtactcccggcaacggaacgtaacgccgcttctccgcgtgaatactgcgtactcataccacccatctatccttccaggtgaacgatctcatcggtgccggcaagtcgtaccgcacgctgagcgacatcctcgacaaggacatccagaacgactgcgtgaagaagcagggaagccactcccggaacctgcgcagggtccgtctcggactcggcctcatcaaggccctcttcgagcaattcctcgccaccgagggttcattgtatgatgctgctacgatagcttacgggcaggtctgcgcgccgtttcatagctgggcgatcaggaaggctgttggcgctggcatgtacacccttccaaccagggagcagttggtagtgcggctgaacgaaactgatctctcggtgcagaagcagatgaggagatacattgacgcttctagtcctatcatagagtacatcgataaccttttcctctcgaggaacattagtctagattggtgaactagtttttctgagctgtactgaaagtcaagtttgtaacttgttcacaagctgttgttggta

SEQ ID NO: 129970 - DNA, 2164 bp, Zea Mays
gaggaattcttcgttgccatgcgtacaaagaacccttaaaccctaatcctcccccgctacacgttcgcttgatctttacggccgccgctactcgttcgccatggctgcctgctcctccaggctcctatacctcactctgagctcctctttcctccgctcctgccgcctcgcgtccagctccctacttcccaccgcctcccgctgccacccggggtcgctccactccctccgcttctgctctgctgtccccgagtttgtcgatgtcgccgccgaccctgccgaggcggctgtatcctccggacacccgtggccggagtggggcaacttccttgataagctgcgggccaaggggtacttcgagcaaggtttgccctccagcgtgagttctggcgagggagccgccggagatggggatccagcaactgcatctgagaacgcagcaacggctgcttccggtaatacggtggtggatgcggaggatagcgcggtgacctcggaagatatctatcattttctcaaggacgagaacagggtgaagaatgcgtgcctcaaatttgggcgagaccgcttcgatctcctcagcttgcttcccaagcaggatattcaagctattgttatgtctggctgtcctaataacaatcggaagcccgtctattctgcaaaaaggttgagagagtacgtgcaggtcaaagaagaagatgcatgcagcatttgcaaatttaaggcatcttgtgatagagcttatgtcactccaaagggtgaggttgaagttaggactgttgatgttgttcgtatactgttaagttatgcaatggataaaaaccattcaggagataactctgttatcgaagaaagtgtgcaagaatctgcaaaaaagcttctctcaaagcttactgaatttagtgacacaacaatcgatccatctcttccgaaacctgcatttcaagttgctaggaaggctcagggctcagtggggaaggggagagaaacgactgcagttgaaatgaagaagggtgactggttgtgcactaactgtaacttcttaaattttgctcgcaatcgtcactgtctcgaatgcaaagcagatggaccaaagaagatagaagcggccgtggatgcaatgaaaatgggcgattggatctgcacacagtgtcagtttatgaacttctctcgcaacaagatatgttttaaatgtgaagaacctcacccgaagaggcaactcaatcctggagagtgggagtgcccctcatgcgactttgttaacttccgacgcaacgctatctgcaagaagtgcaatcaggaccgccccgaggatgatacccgagatagtcagcggggactgagaaaaaccagaggggctggcaagtttagaagattcgactatattgatcagaagagcgatgacgatgatgacaatgcctggttccagaagcgtggggcaagcatgaggtcgaaaccggaccagagaaccaccactgccaagagcagaggctctgacggtctggatgatattcttgttaccaccaagcgtagaagcaccaagcaagacgaggacgacgaggtcttgccgtacgagggtgcgcgcaagcatgttgtgagcagaagggcaacgccttcccagaggaggttcacggctgcccgtaaccagtaataatacccgagcttggagctttgatgactccgttctgtgaacaaatttcacagcgtcgctcgctctgctgctgtgatgcagacgaatagatgatggacataacacataagcgtgttcgatctgtagtgttattatacaaattattagggaacacacattgataaagctggtcctttacgatgatttttttgttgtcacttatgtaatgacgagttatggcgcttgccctttggccagttggcggagctgaagttccaccgaccgtgtacaccgtcgacccggcgagctcgccgtggaggagcatgctgataggcacaaggacgaaccgaaacggatgggaaaatccctttccgttttcgcattttttttcactggtaacggatttgaaatagtcgggaatgaagtaggataaacaggtgtatgaaaaacgaacgagaacgaaaatattaagtttaatattaatagataactagtacgtgattgactgggaggataacactacgaaacaattaa

SEQ ID NO: 129971 - DNA, 2249 bp, Zea Mays
gaggaattcttcgttgccatgcgtacaaagaacccttaaaccctaatcctcccccgctacacgttcgcttgatctttacggccgccgctactcgttcgccatggctgcctgctcctccaggctcctatacctcactctgagctcctctttcctccgctcctgccgcctcgcgtccagctccctacttcccaccgcctcccgctgccacccggggtcgctccactccctccgcttctgctctgctgtccccgagtttgtcgatgtcgccgccgaccctgccgaggcggctgtatcctccggacacccgtggccggagtggggcaacttccttgataagctgcgggccaaggggtacttcgagcaaggtttgccctccagcgtgagttctggcgagggagccgccggagatggggatccagcaactgcatctgagaacgcagcaacggctgcttccggtaatacggtggtggatgcggaggatagcgcggtgacctcggaagatatctatcattttctcaaggacgagaacagggtgaagaatgcgtgcctcaaatttgggcgagaccgcttcgatctcctcagcttgcttcccaagcaggatattcaagctattgttatgtctggctgtcctaataacaatcggaagcccgtctattctgcaaaaaggttgagagagtacgtgcaggtcaaagaagaagatgcatgcagcatttgcaaatttaaggcatcttgtgatagagcttatgtcactccaaagggtgaggttgaagttaggactgttgatgttgttcgtatactgttaagttatgcaatggataaaaaccattcaggagataactctgttatcgaagaaagtgtgcaagaatctgcaaaaaagcttctctcaaagcttactgaatttagtgacacaacaatcgatccatctcttccgaaacctgcatttcaagttgctaggaaggctcagggctcagtggggaaggggagagaaacgactgcagttgaaatgaagaagggtgactggttgtgcactaactgtaacttcttaaattttgctcgcaatcgtcactgtctcgaatgcaaagcagatggaccaaagaagatagaagcggccgtggatgcaatgaaaatgggcgattggatctgcacacagtaacttgcaccttacattataccattctttttccatttctttccagcaccgtttgatttgcatcaccctgtctgtgccttctaggtgtcagtttatgaacttctctcgcaacaagatatgttttaaatgtgaagaacctcacccgaagaggcaactcaatcctggagagtgggagtgcccctcatgcgactttgttaacttccgacgcaacgctatctgcaagaagtgcaatcaggaccgccccgaggatgatacccgagatagtcagcggggactgagaaaaaccagaggggctggcaagtttagaagattcgactatattgatcagaagagcgatgacgatgatgacaatgcctggttccagaagcgtggggcaagcatgaggtcgaaaccggaccagagaaccaccactgccaagagcagaggctctgacggtctggatgatattcttgttaccaccaagcgtagaagcaccaagcaagacgaggacgacgaggtcttgccgtacgagggtgcgcgcaagcatgttgtgagcagaagggcaacgccttcccagaggaggttcacggctgcccgtaaccagtaataatacccgagcttggagctttgatgactccgttctgtgaacaaatttcacagcgtcgctcgctctgctgctgtgatgcagacgaatagatgatggacataacacataagcgtgttcgatctgtagtgttattatacaaattattagggaacacacattgataaagctggtcctttacgatgatttttttgttgtcacttatgtaatgacgagttatggcgcttgccctttggccagttggcggagctgaagttccaccgaccgtgtacaccgtcgacccggcgagctcgccgtggaggagcatgctgataggcacaaggacgaaccgaaacggatgggaaaatccctttccgttttcgcattttttttcactggtaacggatttgaaatagtcgggaatgaagtaggataaacaggtgtatgaaaaacgaacgagaacgaaaatattaagtttaatattaatagataactagtacgtgattgactgggaggataacactacgaaacaattaa

SEQ ID NO: 129972 - DNA, 731 bp, Zea Mays
aaaccctaatcctcccccgctacacgttcgcttgatctttacggccgccgctactcgttcgccatggctgcctgctcctccaggctcctatacctcactctgagctcctctttcctccgctcctgccgcctcgcgtccagctccctacttcccaccgcctcccgctgccacccggggtcgctccactccctccgcttctgctctgctgtccccgagtttgtcgatgtcgccgccgaccctgccgaggcggctgtatcctccggacacccgtggccggagtggggcaacttccttgataagctgcgggccaaggggtacttcgagcaaggtttgccctccagcgtgagttctggcgagggagccgccggagatggggatccagcaactgcatctgagaacgcagcaacggctgcttccggtaatacggtggtggatgcggaggatagcgcggtgacctcggaagatatctatcattttctcaaggacgagaacagggtgaagaatgcgtgcctcaaatttgggcgagaccgcttcgatctcctcaggtggaagaaaccttgcgactcttttcctctttccctctatagaggaatcaaatttctcggtcgcgtactttattatgtaatatttaggatacatggatctcggatttcagtttttcggatgctgcacgaataatcatgccacttatttagtggagatgcagccgcaaattgctaactaggcctttt

SEQ ID NO: 129973 - DNA, 105 bp, Zea Mays
atgtgtgattttacctatctatttagtcatttgtacaacaggcgtagtctgatttgttctacattagtacattgttcccaagcacacaataaggtgtacttagac

SEQ ID NO: 129974 - DNA, 116 bp, Zea Mays
ttttttttgaatgttcgctacatataatgaatatgggttgggtttagaaggtgctagacagagacgggaacacagtttggggggacatactaacctgagggggtactattacagaa

SEQ ID NO: 129975 - DNA, 657 bp, Zea Mays
taatccagtaatcgtagattagtactgctcaaattgttaaactcggaaataatagcccgaggctttctagaccggaaaggtaagagcaaaactgacgaagacgtaacaaagccagcctaacttcaatacatgtagtaacatatgggcaacgggtggcagcagcacatcaccaaaaagccaacaaaatatctgcttcattgcgcagcccctgcatcaacctcaacctccggctttaagaaatcaagtcccgtccatcctccggcttaagacgtcaagttcatccatcctctgcactctccacggcttggcaagctcgctttcctcaacacctccatccacatggtcaccattgatatcctgttaacctttgcgtccctcaggcactcaaatacgtccagcacagcatttgccattgggtgttgctgctgcaatgcactgccattttgcagtccacattcgtctcattgccagttccattgttctaattggggagagcagccacggcctgatgtgtggtgtaagactatctccagcagactctttatcctgctccttatctcactcactatttcaaacttcactctgcaaacaatgcaatctacagtgtaaaacagtattttgcactggcgtttacacggcctgttggagatgacctgt

SEQ ID NO: 129976 - DNA, 252 bp, Zea Mays
ttccagagttcaataactatatatataaagcagcactcgcaccgaaagattgcatatccggaataaaatgagcgaaaaagaacaaaaggcaaagaccacgctcttatcgaacaatagtcatgctattgctatgcacacacccaacaccctccatcattccagaagcccaaagcacattacatacagctagaggatttacaggaaaagaatttaggagggaaaaaagaaatatataaaaaaactagtgaagcc

SEQ ID NO: 129977 - DNA, 720 bp, Zea Mays
atggcccgagaagatcttactcaggtcttgggcaagcgggtggtttctgatgaggacactttaagcaaggctcagcgtcttgcggcaaagcgcaatttagaaatcagtgagtattcatttcttccttttaagcctaaagttattgctaccaagttaaataatgttgggattcgcttgggcagaaacgataaagaggttcttacctcagctatttctattaagaatatagaggtcgatcgactcatggcttctagtatttcatccccatccattcgtcgtgctgttttaaatgaagaagatgataatgacattgatgaacatctttcacatgctattaagcgatgggatgaaaattttgagcatgatgatctagagtggggatacgaccttagtgttgttccatgccgtaagaaggcgaatcgctttacttatgcagggaggatccggtctacacctcaaatttctcagcctctgttggctgggaacacgatgatgcgagggaagaaggcggcggcaggggctgtacatggcggcgaggtcacaagggcacaggaaacccgggagggcgcgagatgtacacggcagcgaggatgcaagggtgaaggcacagaaaccagagcgagagcgcgcgggcatgggaaccagagggggagggcgcgggagggagcaggaggggtgggacagcgtgtcggcctagagatggcgagtctcgagggctag

SEQ ID NO: 129978 - DNA, 1819 bp, Zea Mays
caagcattcgcatagcccgcgccgcaagtattcgcggtcgcacaggctggtccagtccaacactggcctccctgtttcgatgctggccacaagctcgcccggccgcccggggtgaggatgactgccactcccaccgggctcctccggctccacatctgccgtcgaccaaacccgccctgctaaatactcgctccctacagctctcctcgcaattaacacctccgttagcacgagctgcagggagggagttgggaggagaaacagagctaccggggcgatgggcaccgtgctcgattcgcacttcctggcgctcaccgccatcgttactgtggggtaccagctgctgttcttcatcatcacagctctcctccggttcgataaggtcaccgatttcgcaggcagtacaaattttatcataatcgccatcctaacattagctttgaagggagcatggcatttccgtcagattgtgctgacagtgcttgtcaccatttggggtcttcgtctaggattatttttattgatgaggattttgcaatggggtgaagaccgaaggtttgacaaaatgcgtgataatttggggaaattagcagttttttggattttccaggctgtgtgggtttggtctgtcagcttgcccgtcactgttgtgaatgcaagtgacagaaacccctcgattgaagccagggatataatcggttggataatatggttggtcgggatatgtgtagaagcaacagctgatcagcagaagcttgtgttcaaaaattctccaagtaacaggggaaagtggtgcaacgccggtctttggaagtactctcgccacccgaactactttggggagatattcctttggtggggagtatttgtagcatcgaccccagttatctcagatgccgaatggcttgtgattcttggacctatattcctgactcttctgcttcttttcgttagtggaatcccactcctcgagtcatctgctgataagcgctatggacgattggaggaataccgtgcatacaagaacactacaagccctcttatcccattgccacctgctgtgtatggttccctgcctgcgtggttcaaggttgccttcctccttgagctcccgctctacaatcctgggccgggaggtgatccaatcaaaccagaatgagcccattgatgggtcagcctgatgtttatgttgctattgtgtgcgtggcagttattccaccttcgattccaaggggttacagtggagtttggcccctgatttatcgctcgcgaggctcaaacatgtatcttgttggttgaaagttagatttcttttgttgccctccctgcctccatgtgcagatgaatagatgcttagaaacctgaacgtggaacgtgttcaccttcctcgctccaaaaaagtgggaacggaacaatcttgtccatatagtgttaaagtatttttttttaagtacggtaccacgttcctgtttctggttcccatcaatccgagaactgattagatgatcacgcgaactgaactctgagccgatacttgtcccaatttggtagtatttgttatgcaatgtattttcgtattttacattctcggttagtactgggactgaaccttttaaactcttgtttatgtgtgtgttggttagaccttggggcaggggttcagggaaacaagaggcttaaagaaagtcaataaatttggaagaaggaaaataattaaaaacaaaccgagaatgtgaccagttcacggggtaccagtgcggaagctcaaaacgagcttggtttgcaagctccagaaatctctctgctcttttgggagatc

SEQ ID NO: 129979 - DNA, 1556 bp, Zea Mays
caagcattcgcatagcccgcgccgcaagtattcgcggtcgcacaggctggtccagtccaacactggcctccctgtttcgatgctggccacaagctcgcccggccgcccggggtgaggatgactgccactcccaccgggctcctccggctccacatctgccgtcgaccaaacccgccctgctaaatactcgctccctacagctctcctcgcaattaacacctccgttagcacgagctgcagggagggagttgggaggagaaacagagctaccggggcgatgggcaccgtgctcgattcgcacttcctggcgctcaccgccatcgttactgtggggtaccagctgctgttcttcatcatcacagctctcctccggttcgataaggtcaccgatttcgcaggcagtacaaattttatcataatcgccatcctaacattagctttgaagggagcatggcatttccgtcagattgtgctgacagtgcttgtcaccatttggggtcttcgtctaggattatttttattgatgaggattttgcaatggggtgaagaccgaaggtttgacaaaatgcgtgataatttggggaaattagcagttttttggattttccaggctgtgtgggtttggtctgtcagcttgcccgtcactgttgtgaatgcaagtgacagaaacccctcgattgaagccagggatataatcggttggataatatggttggtcgggatatgtgtagaagcaacagctgatcagcagaagcttgtgttcaaaaattctccaagtaacaggggaaagtggtgcaacgccggtctttggaagtactctcgccacccgaactactttggggagatattcctttggtggggagtatttgtagcatcgaccccagttatctcagatgccgaatggcttgtgattcttggacctatattcctgactcttctgcttcttttcgttagtggaatcccactcctcgagtcatctgctgataagcgctatggacgattggaggaataccgtgcatacaagaacactacaagccctcttatcccattgccacctgctgtgtatggttccctgcctgcgtggttcaaggttgccttcctccttgagctcccgctctacaatcctgggccgggaggtgatccaatcagttgagtggtgcttgcaaactgttctgctgcccttcagtgatgaacttgtatagaatatccctgcagtatgtttacgttttttgtttttgttttggtttgacagaaccagaatgagcccattgatgggtcagcctgatgtttatgttgctattgtgtgcgtggcagttattccaccttcgattccaaggggttacagtggagtttggcccctgatttatcgctcgcgaggctcaaacatgtatcttgttggttgaaagttagatttcttttgttgccctccctgcctccatgtgcagatgaatagatgcttagaaacctgaacgtggaacgtgttcaccttcctcgctccaaaaaagtgggaacggaacaatcttgtccatatagtgttaaagtatttttttttaagt

SEQ ID NO: 129980 - DNA, 1311 bp, Zea Mays
caagcattcgcatagcccgcgccgcaagtattcgcggtcgcacaggctggtccagtccaacactggcctccctgtttcgatgctggccacaagctcgcccggccgcccggggtgaggatgactgccactcccaccgggctcctccggctccacatctgccgtcgaccaaacccgccctgctaaatactcgctccctacagctctcctcgcaattaacacctccgttagcacgagctgcagggagggagttgggaggagaaacagagctaccggggcgatgggcaccgtgctcgattcgcacttcctggcgctcaccgccatcgttactgtggggtaccagctgctgttcttcatcatcacagctctcctccggttcgataaggtcaccgatttcgcaggcagtacaaattttatcataatcgccatcctaacattagctttgaagggagcatggcatttccgtcagattgtgctgacagtgcttgtcaccatttggggtcttcgtctaggattatttttattgatgaggattttgcaatggggtgaagaccgaaggtttgacaaaatgcgtgataatttggggaaattagcagttttttggattttccaggctgtgtgggtttggtctgtcagcttgcccgtcactgttgtgaatgcaagtgacagaaacccctcgattgaagccagggatataatcggttggataatatggttggtcgggatatgtgtagaagcaacagctgatcagcagaagcttgtgttcaaaaattctccaagtaacaggggaaagtggtgcaacgccggtctttggaagtactctcgccacccgaactactttggggagatattcctttggtggggagtatttgtagcatcgaccccagttatctcagatgccgaatggcttgtgattcttggacctatattcctgactcttctgcttcttttcgttagtggaatcccactcctcgagtcatctgctgataagcgctatggacgattggaggaataccgtgcatacaagaacactacaaggttgccttcctccttgagctcccgctctacaatcctgggccgggaggtgatccaatcagttgagtggtgcttgcaaactgttctgctgcccttcagtgatgaacttgtatagaatatccctgcagtatgtttacgttttttgtttttgttttggtttgacagaaccagaatgagcccattgatgggtcagcctgatgtttatgttgctattgtgtgcgtggcagttattccaccttcgattccaaggggttacagtggagtttggcccctgattta

SEQ ID NO: 129981 - DNA, 273 bp, Zea Mays
ccatgcattttaacaaatgaacatcaaacagatgttaaggatgttgagtggagaccaaagagtgggaagatgattgcagttgcctgcaaaggagggatatgcctttggtcggcatcatatcctggcaatgtcccattcatgaaatctggggtcacttcttcctttagtgccttcactagaggttctggtggtcagtggatacttgtggatgttcttcgtggctcttctgctgaactcgttagtgcactttgttggaaacctgatggaagatat

SEQ ID NO: 129982 - DNA, 2473 bp, Zea Mays
gatggctgatgccttcgccgccgtcttcgcctgccgctgccgctgctactactagttgccttgctcgcttccccccctctcgccccagccgcttccgccctctcccttccgtttccttcccaactcccaattcccaaccctggatccaaatcccaagctatcccggaaccgatacggaggggcgcaagcaattattagctggctagcccggcctgtagctccgagatcatgaagcgcgagtaccaaaacgccggcgggaacgacggctacaggggctcctccaaggacaagtcgatggcggcggcggcgggggcaggggagcaggaggaggaggtggacgagctgctggcggcgctcgggtacaaggtgcgttcgtcggatatggcggacgtcgcgcagaagctagagcagctcgagatggccatggggatgggcggcgcctgccccaccgctgatgacgggttcgtctcgcacctcgccacggacaccgtgcactacaatccctccgacctgtcgtcctgggtcgagagcatgctgtccgagctcaacgcgcccccgccgccgctcccacccgcgacgccggcaccaaggctggcgtccacctcgtccaccgtcacaagtggcgccgccgccggtgccggctacttcgatctcccgcccgccgtcgactcgtccagcagtacctacgctctgaagccgatcccctcgccggtggcggcggcgtcggccgacccgtccccggactcggcgcgggagcccaagcggatgcgaactggcggcggcagcacgtcgtcgtcctcttcctcgtcgtcatccatggacggcggccgcactaggagctccgtggtcgaagctgccccgccggcgacgcaggcggccaacgggccggcggtgccggtggtggtggtggacacgcaggaggccgggatccggctggtgcacgcgctgctggcgtgcgcggaggccgtgcagcaggagaacttctctgcggcggacgcgctggtgaagcagatccccgtgctggcctcgtcgcagggcggcgccatgcgcaaggtcgccgcctacttcggcgaggcgctcgcccggcgcgtgtatcgcctccgcccggcaccggacggctccctcctcgacgccgccttcgccgacctcctgcacgcgcacttctacgagtcctgcccctacctcaagttcgcccacttcaccgcgaaccaggccatcctcgaggctttcgccgggtgccgccgcgtccacgtcgtcgacttcggcatcaagcaggggatgcagtggccggctctcctccaggccctcgccctccgccccggcggccccccgtcgttccgtctcaccggcgtaggcccgccgcagcccgacgagaccgacgccctgcagcaggtgggctggaagctcgcccagttcgcgcacaccatccgcgtcgacttccagtaccgtggcctcgtcgccgccacgctcgctgacctggagccgttcatgctgcgaccggagggcggcggcgacacggacgacgagcccgaggtgatcgccgtaaactcggtgtgcgagctgcaccggctgctcgcgcagcccggtacactcgacaaggtcctgggcaccgtgcgcgcggtgcggccgaggatcgtgacggtggtggagcaggaggccaaccacaactccggcacattcctcgaccgcttcacggagtcgctgcactactactccaccatgttcgactccctcgagggcgccggctcaggctccggctccggctccggctccggccagcccaccgacgcctccccgccggccggcacggaccaggtgatgtccgaggtgtacctcggccggcagatctgcaacatcgtggcgtgcgagggcgccgagcgcacggagcgccacgagacgctggtccagtggcgcggccgcctcggcgggtccgggttcgagcccgtgcacctgggatccaacgcctacaagcaggcaagcacgctgctggccctcttcgccggcggcgacgggtacagggtggaggagaaggacgggtgcctgactctgggatggcatacgcgcccgctcatcgccacctcggcgtggcgcgtcgccgctccgtgacgtgcccaccgtccggcacagcacagcacagcacagcacagtggaagctaagacgtcagtgaacgctgctgaactgcagatagcgactgtggggccacaacggtcctcgccggagcgacgagatggacacttggagtccgaccggatcggcctgtgttcgttcctgtttccggtccccctctctcttccccgttgttccttcaacccgtcaactatggtagccctgctacgtttaaatgtgtattactattacgtgtaattcctccaagcgctgatatccaataaggacgaaccggatttcgttagctcgaatgagaattttgtatacagtgcgtccgatccgaaccttggctatgctcacatctct

SEQ ID NO: 129983 - DNA, 85 bp, Zea Mays
cctaaccgtcatcacccatggacaggggcagccgccgcctgctccggcggcgcggacccggccgggctctggcggcctcggtgcg

SEQ ID NO: 129984 - DNA, 1578 bp, Zea Mays
atgaccgagcaagaaactccaaagcattattatttgttaacttgtaaaaaggcagagggaaagcagagcatggttgatgcaaacagctcagagacactagctccagagtcaggactaactactagccaaagccaagatcacacaacttccattccaagaccaagagcgcttccaaattgcgggcttctcctcgcggtgcaacagtgtgtatgctctgcctgctattctgatcttagggggcaagcgcgactgccacttcacaccttcctcaaggcggcgaagatgtcggtggccgtgtaccgtggcccagctgctgttccggcgttcgaggcgccctgctggctgcgccctgctgagccgtacaagcagccggaggccgtcgtcgacgaccggcctgcgcaggtggacatatggaacgccatccaggccgacgtggacagggcgtccgccggcgctaagaaggcgtcgaagccgtacgtgcaccggtcgcggagcctgatgagccagaagagcctcgaggtctgcacagagagcctgggcaacgagaccggctctggcgacttcacgtcgtccctggacatggccttcctgttcgactcgccgctgccggcgggtgctgccgcagaggaggagtccttctggcagcacgacgggtctcgccgctgcgaggaggagcagtgggaaagcgaggacctcgcggcggtgaactaccactgctcggccgggacgcggccgctgaaccgccgctcgttcccgccgccgctgccgtccatgtcgcgccgcgacgggccgtgcctgcagatgcgcccacgccgccaggacgggcgcctcgtggtcgaggccgtggcggtgaggccgcgcggctacctccacgcgaagcgccagggcgggcgcctccgcctctccttcgtcgagtgctctgctcgcgcccagagcgcggcgagcaggatcaccgcggcggcagctgaggcgccgtatttccccgccgtggagcccaagaacgcgcaagaggaagaggcggccgtggaagtggtggacgacgacgacgaggaggtgatggaggaggaggaggaggaggtggaggtgctggacaggggcaccgtcgttgaggtcaaggtgagcacgcagccgcaggcgcccaccgcgggcaaggtgcaccgctcgaggctcgtgatcaacaagttcgtcggcagcacgccgctgtccgtggaccagccccggtgcgatgacggcgcgagacagcccgaggcgaacacccgcgacgacgagacgacggcggcggcacagccgtcacgcccgaccatgcgacgggtgccgtcgtctacgacgacgctggcggccgcggtcgccgcagcctcgacagggaccgacgtcccgccggctccggaggacgacgacgagtgcggcgggctgcaccttcccgccccggccgcggccgagaccaaacagcttctgctgctgtcgttcacgtcgcggaggggggacaagcaggacctgctgcagagcgtgcggcggtgccggcagctgcggcagaagaagctcttcatcctggagccctactgcattgccacctcctga

SEQ ID NO: 129985 - DNA, 163 bp, Zea Mays
gcctcgtgttctttcttatccgagtttcagagcctcgtgtatgtatgttggcatgttggcatgttgtgtcctttcaggtcatcatcgaagtgaaacaaaaaaaatataacggaaatttagctccggcgagtggattgtttgcattggaaaaacaaaaaaaaaa

SEQ ID NO: 129986 - DNA, 584 bp, Zea Mays
caaatttgtagtttagtaggcttgtaagtagtgaacgaaacatgttcagattacatgacttgagttctacttgcagtttggtttgattagtgaaggttaactgggctgtatcaattgtattgcaggcacgaaagatgcaggatagcggatggaagcctcggtggtttgcaaaggataaagctactgacacataccgttacctcggtgggtactgggaatccagagaaaagagcagctgggaaggctgccccgacatcttcgggcaagaccctaacgatctgatgatagctgactaggtttgagtaggttataggtcttttggttctctttttcgggaacgcataattccggaaatttttagtggttcatattatagagcaattaaatggccgttgatatgtaagcattggcagtgcctcagggagtattgatctcgtacataataattagacaatggttcgtctcacatgtcaccttatttttttggcaaagtatttttagccctcttgtgaggttttcacgctcacaagttcagtcttcagagtggtggtataaggtgggcgatcagtgattcaccagtatat

SEQ ID NO: 129987 - DNA, 627 bp, Zea Mays
ataaggtgcgagaatatcctatatgtgttggagtttttgcacctgttgcaaactgcgggctacagtatagtttttgcgtttctaagggaaactggattgagatttgagaaggatgcagtttgtaggaatttgcatgaacagttgagaacagatggcaaaatttacagggcacgaaagatgcaggatagcggatggaagcctcggtggtttgcaaaggataaagctactgacacataccgttacctcggtgggtactgggaatccagagaaaagagcagctgggaaggctgccccgacatcttcgggcaagaccctaacgatctgatgatagctgactaggtttgagtaggttataggtcttttggttctctttttcgggaacgcataattccggaaatttttagtggttcatattatagagcaattaaatggccgttgatatgtaagcattggcagtgcctcagggagtattgatctcgtacataataattagacaatggttcgtctcacatgtcaccttatttttttggcaaagtatttttagccctcttgtgaggttttcacgctcacaagttcagtcttcagagtggtggtataaggtgggcgatcagtgattcaccagtatat

SEQ ID NO: 129988 - DNA, 451 bp, Zea Mays
agtagcattatatcgcccgcaaaaagcatacaccaattgatatcacattgtatgtttcttgtgaccttattcatcaccaaggcaaaaaggtaaggactcgcaagattacaccccctcccgtataactacaatggtgtgcgcaagcaccaaggggttgatggtgtttatcctcacttctaacaattaggggttaacttagagcaagcgttgcatagcgctttaactggccgaagttcttcgtaaagcacctatgctgataaccgagtgattctctgagcaattggatgtctagagctataagaatggagtctcaactcagtagctatgtttctcggctcccacacatctcaaatgaccggttgaggtaaaatataggctccaatctccaaactagccgttggaagcaaagcagataatctctaaattgtaggtttcatgaagtttgcgaggt

SEQ ID NO: 129989 - DNA, 2243 bp, Zea Mays
gtcctgttcaccacccttttcgttctcgtcttcctggctcccggcggcacccacccgttcccggagcaaaaataaaacgatcccaaaacacaaaagaatccgccacctcgccggcgacaggggcgacctcgcgcgccccggccggtgctgaccccgacttctccatgcatccattctgctgcgcgcctctcgtgcccgtatcgcccgcggcctctgccgcccccgctgcgtcctccgctgtggcgggcacccaggccgtgatgccgccaccgcagcccccgccgttgccgcctccgccgcctcgaaacaactccgccactggcggtgagaggcgcgcgcgcgcagcgggggtcagcggtggtggaggaggcgattcctcgccgctcgagggggtgaagctgaacgagatcgtcggcggcggcatctcgggaatcatgtacaagtgggtgaactacgggcgcgggtggaggccgcgctggttcgctctccacgaaggcgtgctctccttctacaagatccacgggcccgaccgcatcatcctatcgcgcgagaccgagcggggcgccaaggtcatcggcgaggagtccctccgccgcctcaaccgcccctccgccttctcgccgtcccactccaacggccaccaccaccctcgaaatcccatcggcgaaatccacctcaaggtgtcaaccgtgagggagagcagatcggacgacaggagattctccatcttctcggggacgaagacgttgcacctgcgggcggagaccagggaggacagagctgcgtggctcgaggcgctgcgggtgaccaaggacatgttcccgaggatgtcctctagcgagatggtcgggccaggggacaccgctgcggcagtggccgtctcaaccgagcgcctaaggcagcggctgcagcaggaaggggtcagcgaggcggccattgctgacagcgagaggatcgtgcgagaagaattcgaggctctgcacaagcagcttgtgctcgccaagcagaagcatgcgctcctcttggaaactcttcgccagctagagtgcagggtgtgtcatgcactcatgcttgtgatattctgcatcttgtacatgattgagttcattgaagaaaaaagtacgaagctactgacagaaaaggttgatttggagaatacccttgttgatgagagccaaaggcagtcaaaagagtatggatctgcttctaaaccaaggcatgagaagtatagtgaaggaagtgctagcgaatctgatgattataatgaaccacaagatccagctgaagagactgacgatgaagcaaatctttactttgatacaagagattttctatcctcaagctcttttaaaagtagtggatctgatttccaaaggtctgaagctggttcggatgatgaagatgattatccaatggatggaattaatccttctatgaagtctatcggagttagttatgcatatgtaagaagacggaacaggctgccagatccagttgagaaagaaaagggtgtaagtttgtggtcaatgatcaaggacaacataggaaaggatcttacaaaagtttgtctgcctgtttacttcaatgagccactctcatcgctacaaaaatgttttgaagatcttgaatattcctaccttattgatcgtgcatccgaatgggggaaaagggggaatagtcttatgaggattcttagcatagcagcatttgctgtttctggatatgcctctacagatgggaggagctgtaagccttttaatccccttcttggggagacatatgaagcagactatccagacaaaggcctccgttttttctctgaaaaggttagtcatcaccctatggttattgcatgccactgtgtgggaactggctggaggttttgggctgatagcaacctgaagagtaaattctggggtcgttccattcaacttgatcctgttggtgcattaacactggagtttgatgatggtgaagttttccaatggagcaaggtgacaacttcaatttacaatctcatattgggcaagctatattgcgatcactatggtactatgcgcatacaaggtaattgtgaatattcatgtaagcttaagttcaaggagcagtcaattatcgatcgcaaccctcaccaggcaagtgttacatttctcactatggaaagacacattcttttaaacaattttgtcgagaagattgcatgggaacatgtttttgaaagcgctgggaattatggcatgtag

SEQ ID NO: 129990 - DNA, 1336 bp, Zea Mays
gtcctgttcaccacccttttcgttctcgtcttcctggctcccggcggcacccacccgttcccggagcaaaaataaaacgatcccaaaacacaaaagaatccgccacctcgccggcgacaggggcgacctcgcgcgccccggccggtgctgaccccgacttctccatgcatccattctgctgcgcgcctctcgtgcccgtatcgcccgcggcctctgccgcccccgctgcgtcctccgctgtggcgggcacccaggccgtgatgccgccaccgcagcccccgccgttgccgcctccgccgcctcgaaacaactccgccactggcggtgagaggcgcgcgcgcgcagcgggggtcagcggtggtggaggaggcgattcctcgccgctcgagggggtgaagctgaacgagatcgtcggcggcggcatctcgggaatcatgtacaagtgggtgaactacgggcgcgggtggaggccgcgctggttcgctctccacgaaggcgtgctctccttctacaagatccacgggcccgaccgcatcatcctatcgcgcgagaccgagcggggcgccaaggtcatcggcgaggagtccctccgccgcctcaaccgcccctccgccttctcgccgtcccactccaacggccaccaccaccctcgaaatcccatcggcgaaatccacctcaaggtgtcaaccgtgagggagagcagatcggacgacaggagattctccatcttctcggggacgaagacgttgcacctgcgggcggagaccagggaggacagagctgcgtggctcgaggcgctgcgggtgaccaaggacatgttcccgaggatgtcctctagcgagatggtcgggccaggggacaccgctgcggcagtggccgtctcaaccgagcgcctaaggcagcggctgcagcaggaaggggtcagcgaggcggccattgctgacagcgagaggatcgtgcgagaagaattcgaggctctgcacaagcagcttgtgctcgccaagcagaagcatgcgctcctcttggaaactcttcgccagctagagggtgtgtcatgcactcatgcttgtgatattctgcatcttgtacatgattgagttcattgaagaaaaaagtacgaagctactggtaaaaaattggtttacagaacgtgctattctgcagtagattgcatccactgaccatattgtacctggagatctgaatgttagctgttactctgtggatggtgctgtaaatttttcaattcgtctactaccttccctacgctgttgtttttgtcaatcgccaaacgtacttgggcatttgataatgaatctgctactgaagctagctt

SEQ ID NO: 129991 - DNA, 810 bp, Zea Mays
acatcatcaccatattctccagaaccagaaagagcacacatggcagagaaggtgtccacgctggtcgtcacactcaaccatggctgctgccgctgcttcaccaggatccggaagaccgtgtgcaagctgcaagaaaccgaggacatccgggcgatttccttcgacgaggtgtccgggacggtgacgatctcgggagccttcgacccgctggtgctcccctgcaagctccggcgcaaggcgggctgtgtgatcagggacatccagctcgtggcggcagaactgaagctcacgccgcaacgaccagccatgccgtcgaaaccgcccgggccggctcctgctccgccgtgctgctgcggtatgtgcatatgcgggtgtggaggctacggctacggctacggctgccgttgccagttcgtggaccacccgccgtgctacgaagggctgccgttgaggcagtacccaaagatcgaggtcacctgcgactgcgaggaggcgtcgtctgcagcgtgcaagatcgtgtgatatttgttaagtgagtttgtttgctacctagtctgtcttgacttggagttgtgttactgtggttctggacggaagaacatggaagggtgatttattagacataaattcagagctaagcattattcatacttcatagaaaggtgattaggcataaaagataaattcagagttggtcatttgtatctaggatatcactgtttggtttaagaattggatctacgtagttcatctattatggatcctcatcattgtgtatcaatggcagagtttggctttccatagaacata

SEQ ID NO: 129992 - DNA, 1431 bp, Zea Mays
cagctttgtgctgatgggggttaccagctgagaattaggagccttgagggtacccctaattatggtccccgacaaactgatatcatcatcttggcagttttctttagtgttttcttggatattttggacttggcaaaatatgcatatgtacctgtcataaatggtctcactgactataaccatccatgccagataatggctgatgcacttactatgcttgagcagattggtcgtattgaaaacactaaggttgtctatgttggagatgggaacaacattgtgcactcatggctgttattggctgatgtgcttccttttcactttgtatgtgcttgtcccaagggatttgagcctgatgcacacatagtggagatggccaggggtgctggaatcagtaagattgaaataacaaacagtcccagggaagcagttaagggagcagacgttgtgtacacagatgtttgggccagtatgggacaaaaggaagaagttgattatagaaaacagaagttccagggattcacggttggagtttggaagggtgtggttggagttcagtgtgtttggttggtagatagaggatgcatcgtatatcctgttggagcggatgcatatttcataaaatctgagatgtttggttgcttatatgccaaatctgaaaggctgtcacacttgaaaacatctcagacaaagtgcgtacacaatcttttggtgcacggttctgtcgatacgccatcaacgtgcacgtggccgtcaaggaaggttgtcgcgccgcgaatcccccacctcctccccctctgctccccgccatcaacgtgcacgcgtcgcatcgagccgcagatcccccaccctcctccccctctgcacgccgcccgtggttggaccacttcagctttccaggggtcgaggacgaggatgaggcggtagtgttcttccagcagcggtacctggtaggccgcgacagtggatgggctggacccggtggccccatcttcttctactgcggcaacgagggcgacatcgcctgtgctagctgcttggatgagactcaaatatccccatattgctattggggtcttgcatcatcagctccgatcctgcagtttgaggacattgttccttctactatattctatgatctcgtatctgatgattttagggaccctgaaaacaagtggagacctttcagattggttgagctcagcgtacagttatctggccatggtggattacccacttccatcagaatttctcaggcctttgccagccaatcctattaaagaagtatgcggaaatatcgacagtcaacctaagggcattggtactctggaacgtatatatgcaggagtaaatgtatattacaattatactgacattgttgactgctttgatctaaatgatgatccccatggaatgggtggatgggactga

SEQ ID NO: 129993 - DNA, 514 bp, Zea Mays
ttatgatgatgctgatgatgtgggtacttctgttggtatgcattcttttgcttctactctaaacattgctagagatacctctgcaactgctctactgcatgctgcaagctcttcagcttctactgcttctgaactcatttcttacttagattgtgacactgtcaaccaattaactgatgatttcaatatcttgcactggtggcatcagcacaaactcacttatccagtactgtcaattatggctaaagatattttaattgttcctgtgtctaccatctattcagaatccacttttagtttaactggcaggatcatcgacgagcggaggaggagattgaagtctgatgtggttgaaatgttgacatgcattaaagattgggaggatgctgaagcaaggatgcaacacatggtggatgacaaagagcttgaagaaacatttgaagatctttatcttgattagtcttactctctttgtgaccatttctgtaatgggactgtaatattatgcacctgg

SEQ ID NO: 129994 - DNA, 141 bp, Zea Mays
tatcttttcagtggataaccaaagtcacgaccgacctgaaaacgggcacacaccacacctttctttctttctttgctcactgcagtgggttgcttgtttcagaagcaggtaacagtaaccacccacaaaacaaaacaaaaa

SEQ ID NO: 129995 - DNA, 411 bp, Zea Mays
cagggagctgtgaactttgctcttatgatgtcacaaatggagggaggctgcccagtagattataatacaataactgatcttttccttcagttatgcttatattcataatcataggtaactgtcttgttgtctatttacattccttggttttatgagtccttatggatttttgctttatgcatctgttaacagagaaatatgatacgggaggcaacaacttttctgttggatgttctgaaaccaaacttgccagagcatgcttttcttcaaaccaaggttttggagataaacttagtgacttacccaaatgttgttgatgccattcttgctaatggtatgttcagtcattatgatcgccctcgtattgcttacctgtgtgaaaaggctgggttgtacttgcgagccctccag

SEQ ID NO: 129996 - DNA, 660 bp, Zea Mays
tcatttctttggcaatgctttctcccatcccccgcaggaatcgtcacaacagctctcctcgcctatgaccctgttgatcgtcctcccaacgcagctcgccgacgagcacccgctgtcccgggcgttgtcgaagtccggcacaaaccccatgaagatgggcggctgcacgtcattctccccgttcgtctggtacaccttctcgacgccgccatccttgcgaaacctgaccgtgcagccgccgatcagctgggagcagaagaggttgtcgtggcccgggttctcgaacacccggacgccgtgcgcccagcaccggtttgcgccgcggtacgagcagagcacctcgaacacctcgtcgccgtgcacggcggggaacgtcaggttggcctccgcgccgctggggatgtcggcgtgcgccgaccacgccgaccggttgtggttgtgctcgccgaagccgtagcagcgcagctccacgttgccgtcggccaggtccatctcctcgccgacctcctgctcgttgctcaccacgatgaggcggagcacctcggtggagacgaagggcgacggcaggtggcggcactggtagtggaacaaggagctgagcgtgaccgcggtgactatggcgacggcgagcgccgcgaacttgacgggcgccgtggccat

SEQ ID NO: 129997 - DNA, 1704 bp, Zea Mays
tgcttatgttcaatcacttatgctttccagcttctttgttcctctctttgtctgatgctcttggtcatcacatctggtatttatgcagggtgattcaagtactctgctttcaccaatatgtctgacggtcaggaaactgacaaaaacattgagatttggaagatcaagaagttgatcaaggcattggaatctgctagaggcaatggcaccagcatgatctctctgattatgccaccacgtgaccaaatttcccgtgtgaccaagatgttgggtgatgaatatggtactgcttcaaatattaagagtagagtcaaccggcaatctgttttagcagccatcacctcagctcagcagaggctgaagctgtataacaaggttcccccaaatggacttgttctctacactggaacaattgttactgaagatggcaaggaaaagaaagtcactattgattttgagcccttcaagcctatcaatgcatccctgtacctttgtgacaataagttccacactgaagctttgaatgaactcttggaatctgatgacaagtttggtttcattgttatggatggtaatggaactctttttggtacactgagtggcaatactcgtgaagtgcttcacaaattcactgttgatctcccaaagaagcatggaagaggaggtcaatctgcccttcgctttgctcggcttcgaatggaaaaacgtcataattatgtccgaaagacagctgagcttgctacacaattttttatcaatccagctaccagtcagcctaatgttgctggacttatattggctggttctgctgattttaagacagaactgagccaatctgacatgtttgatcagcgtctccaggccaaaatacttaatgttgttgatgtttcatatggtggggagaacggttttaaccaagctattgagttgtcagctgaaattctagcaaatgtgaagttcatacaagagaaaaagctgattggaaagtattttgaagaaattagtcaagatacgggtaagtatgtgtttggtgttgatgacacactgaaagcccttgaaatgggcgctgtggaaacactgatagtgtgggaaaaccttgatgtcaacagatatgtgcttaagaatactgcaactggagaaactgttatcaaacatctgaataaagagcaagaagctgaccagagtcatttccgtgatccatctaccaatgctgagctggaggttcaggagaaaacttcgctcttggaatggtttgccaatgagtacaaaaagtttgggtgcacacttgagtttgttaccaacaaatctcaagaaggatctcagttttgcagaggatttggtggcattggtggcatgttgcgctatcaactggacatccgttctttcgacgagctttctgatgacgaaggtgtctatgaagattctgattaagcaaacgtcattcatatggctgtgctggaccctggattgatgcaattgctcgtgttgttcttctatttttttgcttgattagtcggtttttgaggagatcgccacttgagacacttgctttgtttcctatgccgcagcatacaattgcaatgtcaagcacatcattacaatctggttgatacctcatgtactgttgttatgttgacatcggctctgtccaatatttatcaagatttggtgtagcgaatcatctacatgtttccacaaagttag

SEQ ID NO: 129998 - DNA, 1725 bp, Zea Mays
ctctttctcctccattccccactgcatgcgcgctaccttggcgacgactggttgaccgccgctgccgctctagagcaggtgcccactgcccaggtattcttctggtccttcgccggcgacaagcacaaccagggtgattcaagtactctgctttcaccaatatgtctgacggtcaggaaactgacaaaaacattgagatttggaagatcaagaagttgatcaaggcattggaatctgctagaggcaatggcaccagcatgatctctctgattatgccaccacgtgaccaaatttcccgtgtgaccaagatgttgggtgatgaatatggtactgcttcaaatattaagagtagagtcaaccggcaatctgttttagcagccatcacctcagctcagcagaggctgaagctgtataacaaggttcccccaaatggacttgttctctacactggaacaattgttactgaagatggcaaggaaaagaaagtcactattgattttgagcccttcaagcctatcaatgcatccctgtacctttgtgacaataagttccacactgaagctttgaatgaactcttggaatctgatgacaagtttggtttcattgttatggatggtaatggaactctttttggtacactgagtggcaatactcgtgaagtgcttcacaaattcactgttgatctcccaaagaagcatggaagaggaggtcaatctgcccttcgctttgctcggcttcgaatggaaaaacgtcataattatgtccgaaagacagctgagcttgctacacaattttttatcaatccagctaccagtcagcctaatgttgctggacttatattggctggttctgctgattttaagacagaactgagccaatctgacatgtttgatcagcgtctccaggccaaaatacttaatgttgttgatgtttcatatggtggggagaacggttttaaccaagctattgagttgtcagctgaaattctagcaaatgtgaagttcatacaagagaaaaagctgattggaaagtattttgaagaaattagtcaagatacgggtaagtatgtgtttggtgttgatgacacactgaaagcccttgaaatgggcgctgtggaaacactgatagtgtgggaaaaccttgatgtcaacagatatgtgcttaagaatactgcaactggagaaactgttatcaaacatctgaataaagagcaagaagctgaccagagtcatttccgtgatccatctaccaatgctgagctggaggttcaggagaaaacttcgctcttggaatggtttgccaatgagtacaaaaagtttgggtgcacacttgagtttgttaccaacaaatctcaagaaggatctcagttttgcagaggatttggtggcattggtggcatgttgcgctatcaactggacatccgttctttcgacgagctttctgatgacgaaggtgtctatgaagattctgattaagcaaacgtcattcatatggctgtgctggaccctggattgatgcaattgctcgtgttgttcttctatttttttgcttgattagtcggtttttgaggagatcgccacttgagacacttgctttgtttcctatgccgcagcatacaattgcaatgtcaagcacatcattacaatctggttgatacctcatgtactgttgttatgttgacatcggctctgtccaatatttatcaagatttggtgtagcgaatca

SEQ ID NO: 129999 - DNA, 577 bp, Zea Mays
cgagtgcagataggccaaagctccaaagcgaagcagtgtcactgaagcggaaaacgcgtcgccttcaggggtcagctgagagagtgttgatctcacctttgctggtggtctggtcggcggcgatggagcctctggaggtggccataacgatcatattcgacgcgctgctgctggtgttcatggtgaagctcttcttcgccatgttccagatgaagctcgtcgtcatcctcttctacctcgtcatcctcctcttcgccatggccttctccggccgggcgcccagcagcttctagctcgtagcagctggcagagaactttcttctcccccctccccccccccccctcttccgtttcttctcctttggggcttgttcggttctaccccaatccatatggattgagggggattgaaggggttttaatccctagcaagtcaaaatctctctcaatccatatcaatcccctccaatccatatggattgaaaataaccgaacaagcccttggagggtagatcggaggagtcgtgcagcagtagcactacgtcctgtgaaaagagtatcatctcggtttttgttt

SEQ ID NO: 130000 - DNA, 2803 bp, Zea Mays
agcgaagtttttcgaagttcaaaagttcgaatcatggaagcatgagagcggtccgcacgaggcggccacggccgccacggccatcgccggagctggcaaaggcgccgatttcgccgacaacaaggagtaaaccggaggaagacccttctcccttaaccctcccgataaaggcgttcaagctccgcctggctaacggtccaccgctggcgcccacggcgaaggacttcaagacgtactctgagacctgtgcctctctcctccgcctctgccgcgctatgagcgccacctccaccaccatgccctcttacgcgccctcctccggttgcctaccgcttgtactctccctacacgcgcatgccctccgctctggactcgccaccgaccgctccgtcgcatcgaacctcctcacagcctacgctgccttcgcgcgcgccggagaccgtgaccaggccttccgagactgcgttgccgccgatgcggcatcgtccttcacttacgacttcatggtgtcagaacacgtgaaggccggggacattgcctccgcccgcaggctgttctacggaatgcccgagaagagtgtcgtgtcgtacacaaccatggtcgacgcgctcatgaagcgtgggtctgtaagggatgcggttgagctgtatgaacgatgcccactccactcggttgccttcttcacagccatgatttctgggtttgtccgcaatgaactccataaggatgcattcactgtttttcgaaagatgctaacctgcagtgtgagacctaatgtggttactctgatttgtgtcatcaaggcctgtgttggtgctggtgaatttgatcttgccatgggtgttgtgggattggcagtcaaatgcaacttgtttgaaaagagtatcgaggtacacaattctttgatcactctgtatctaagaatgggagatgcagctgcggcacgcagggtgtttgatgacatggaggtgagagatgttgtttcatggactgcattacttgatgtgtatgctgacttgggtgaccttgatggagcacgacgggttcttgatgcaatgcctgcgaggaacgaggtctcctggggtacattgattgcaaggcatgagcagaaaggtgatactgcagaagcattgaagctttacagccagatgcttgctgacggttgcaggccaaacatttcatgcttctctagtgtgctcagtgcttgtgctacccttcaagacttaaggggaggaacaagaatacatgccaatgcactgaagatgggctctagtaccaatttgtttgtatccagctctttgattgacatgtactgcaaatgcaagcaatgcacgtatgctcaaagagtttttaattccctcccagaaaagaacacagtatgctggaactctcttatttcaggttatagctggaatggaaaaatggtggaggcagaggggctcttcaataagatgcctgcaaggaattcagtttcatggaatacaatgatttctggctatgcagaaaatcgacgatttggtgatgcactaaattatttttatgcaatgttggcttcaggacatattccaggggaaatcaccttgtcaagtgttctgcttgcatgtgcaaacttgtgctctttagagatggggaggatggttcatgctgagattgtcaagcttggaatcgaagataacatctttatggggactgctctctgtgacatgtatgccaagtcaggggatttggacagctccaggagggtgttctatcaaatgcctgagaaaaataatatcacatggactgccatggttcagggacttgcagaaaatggctttgctgaagagtctatttcgttgtttgaggatatgatagaaaatggaatagcaccaaacgaacatacatttctagctattctatttgcttgttcccactgtggtttggtggagcaagccatacattattttgaaacaatgcaggcacatggcatcccacctaaaagtaaacactacacttgcatggttgatgttctagctagagctggctgtttgccagaagccgaagagcttctcatgaaggtttcaagtgaattagacacaagttcatggtcatctcttctgagtgcttgcagcacttacaggaacaaggagattggtgagagggcagcaaagaaacttcatgagttggaaaaggataatacagcaggctatgtgctactctcaaacatgtatgcatcttgtggtaaatggaaagatgctgctgagacgaggatactgatgcaaggggctagccttaagaaagatgctgggtgcagctggttgcaattaaggggacaataccatgccttcttttcttggaaagagaagcatcctttatcattggaaatttatgagatcttggatttgctgatgttggaacttactacttgaatttattgtgatggttagtcagcagtgggacagttctgacttctgagcatatgaggactattgcatcttctcagtattcaggaaggtaaagtagcagaacagagttgatggacaattaatttcttgaatgtgggttctcctgatgcagtggcttgcacagcattcaaggatatctcctccaaacaaaagcaatcagcagattatgttggcaggtcatgaatgctttcatgctggagcattctgctctgaagttctgcaattagagtacacttattttgaacattattgtcatgatgctttattttacccagtccctgaaacttttggcaacacaggacttgatgtaaaccagctttagaagaacatttgagatactacagcttctatttccaaaa

SEQ ID NO: 130001 - DNA, 2722 bp, Zea Mays
tctgcgacgcgttggcccatccctgctccccgccatggtctctcgcccaccgaggtatgttcgaggagcaaataagatgaggagccagttttcttcttccgttcttctctcgcattagccaaggaaggcaccgtagaaagatccccaaagctttccagaaatccgctttcacgatcagtagggctcgcagtttttttttctttcctacagcgcatttctcggtcttcacctcgctcctgttgtagagttctcgtggcaggggaattccaagcggaaaaggggggaattctggaataaaaggtggctcggtcttaactgttgaggtttcagttgggaggaactacgaagacacctcatcactagttcatggttgcttatacagtgctcttataatttccataaggggcatacatgttatcatcttaggctcttagccatagtatgatagcagcccacatccctgtaagaattatgtggtgtaactctttgtgaagcaagttaaagtccacatcccttggtttttacagtgctgtggatgatcatcttctctgaggagtggcaatcgactaattggatcgtaaagagagtcaagatggcctgagtttggtttactgttcgctattaagcttagtggtctggtgtcttccatactttcgctgattaacattatttctgcaccatgaatagtgtgcatagtatagaatctctggctgctggggatgctcaacataaacttttccaaacccttggaccaacgctcttgatttcgatggcatatattgaccttggaaagtggttggtagcagtggatgctggatctcggttcggctatgatcttgtgctactggtgctgttcttcaatttctcagccattttattccaatatctgtcaacgtgtatcggcatggtcactgggaagaatcttgcagagatctgctgcctggaatacagtaaggtgatatgtgttgttcttggtctccaggcatggctatccttattgacctctgaattgacaatggataaggtggctgggatatgtaatgcctgtatagctggatttacacttctttgttttgtgcttggtttattaatcagtcacccacataccccagtcaatatgaatgcgatgtttcccaagttgagtggtgaaagcgcttattcactgatggcacttcttggcgcaaatataatagtacacaacttttatacgcattcggcatttgttcaggtccagagaagatcatctcatacccttggttccctgtttcatgaccaccttttctctatattatttatatttactgggatttaccttgtgaattatattctcctgagttcagccgcagatgaatccagtgagacagtggtcatgaactttcaagatgctacagagctaatgcaccagatattcacaaatcctgcaggaccaattgtgctattagtgatccttctcttttcaagccatatcatctcattgacatgcattgttagtggtgaagtaatttcagagaacttctttggtgttaaactgccgctttcggcacatcatctgctacctaagggtctggccatggttcttaatatctattttgcgaaggttgctggtcctgaagggatatatcagttacttattatgtgcccagttatccaggctatgcttcttccttcatcgattatacccattttacgtgtttcctcgtcaagattattgatgggaagatacaggatagctttatgtattgaaatctttgccttcctcgcattccttcttgtggtgttcacaaatataattttcacagcagaaattatgtttggtactagcacttggacaaacaacctgaaaggagatactggaagccctgctatacttccatattctgttgtagtcctaatttcatgtgcatcgattggatttacactgttacttgctgttactccactaaaatcagcaagtaatgaagctcagactcatttatcgtccatgcactcacaaagaggagctttaggcactactcagagagaagcaacatctctgaaaaaatttgagcatgaagaagttcagagctgttctgttggagctgttcttatgggttcatcggaaggtcataagaagtcagtccatctgcggagaactttatctggataattgtgcagatgaagaaattaaggggtcctctgttgatgctgttccaagggattcattggagggtcttcagaagtcaacttttgagattaagtatgattcggacgcctctgatggtggcgccgagcaatttgtggatagattgaagctgaaccatcaccatctataaccaatgaggagccaaaatcagttgtgtagtggatgcaaccagttccagaggtttgtgctatcatcgtaccagtaccataccatagtgtttcagaaaatttcgagatgaagccctcaaatgaaaaaggtggttaaacaagaaggtgaaggtaactcagatgaaggggaaatagatgagctcttaactagacattcaacctgttgatgcccttcctgttatagtgtgttcctatattatccatgtatgtggttgccgctccattaggattagggtttccataggtgtatatatgtaaccattctctattggattagggtttccataggtgtatatatgtaaccattctctatgcaatggaagtgtaatctcaatctgttacatggtataagagctaggtcttctctggcgcc

SEQ ID NO: 130002 - DNA, 3092 bp, Zea Mays
aagccgaggcgagcagccgtcgccgcctatatatcgcggcgcagggcagcaggagttccacacttccatacacgcctgccttgtgccttcccttcccttgccttgcttcgcttattgccggcacatcacatcggcaggcgagggacggagcgagcagggaagcccatccaccagccagccaccgcgttcctgagaagcgaggagcgagaaaagcgaagagcggccatgttctggcacggggtcgcggaccggctgacgggaaagaacaaggaggcgtggagcgagggcaagatccgcggcacggtgaggctggtcaagaaggaggtgctggacgtcggcgacttcaacgcctcgctcctcgacggcgtccacaggatcctcggctgggacgacggcgtcgccttccagctcgtcagcgccaccgcggccgaccccagcaacgggggccgtggcaaggtggggaaggcggcgcacctggaggaggcggtggtgtcgctcaagtccacggcggacggggagaccgtgtaccgggtgagcttcgagtgggacgagtcgcagggcatcccgggcgccgtcctggtcaggaacctgcagcacgccgagttcttcctcaagacgctcaccctcgagggcgtcccaggcaagggcaccgtcgtcttcgtcgccaactcgtgggtctacccgcacaagctctactcccaggaacgcatcttcttcgccaacgacacctatctgccgagcaaaatgccggcggcgttggtgccttatcggcaagatgagctcaagattctccgtggcgacgataatcctggaccataccaggagcatgatcgcgtctaccgttacgactactacaatgaccttggtgatcccgacaagggcgaagagcacgctcggccgatcctcggtggcagccaagaacacccgtatccccgtcgctgcagaactggccggcacccaacaaagaaagacccaaattcggagagcaggcttttcctgctgaacctgaacatctacgtcccgcgtgacgaacgctttgggcatctcaagatgtcggacttccttgggtactcgctgaagacgatcatcgaggctgttcttccaacactggggactttcgtcgatgacacgcccaaggagttcgattcgtttgaggatatcctcgggctctacgagctgggcccagaggcacccaacaacccactgatagcagagatcaggaagaagatccccagcgagttccttcgaagcattctgccgaacggtagccatgaccacccgctaaagatgccccttccaaatgtcatcaaatcagatgtgttgaaaaaggctccggagtttaagtttggctggaggactgacgaagagttcgcgagagagacacttgcaggcgtgaacccagtaatcatcaaacgtctgacggagttccccgctaaaagcaccctggacccaaggcagtacggagaccacaccagcaagatcactgaagctcacatccggcataacatgggaggcctgtcggtgcagaacgcactgaggaacaagaggctcttcatcctagaccaccatgaccatttcatgccgtacctcgacgagatcaacgagctggaggggaacttcatctacgccagcaggaccctactgttcctgaaggacgatggcacgctgaagcccctggccatcgagctgagcctgccccaccctgacggccagcagcgcggcgcggtcagcaaggtgtacaccccggctcacaccggcgtcgagggccacgtctggcagctcgccaaggcttatgcctgcgtaaacgactctgcctggcatcagctgatcagccactggctgaacacgcacgcggtgatcgagccgttcgtaatcgcgacaaaccggcagctcagcgtggtgcatcccgtgcacaagctgctgagcccgcactaccgtgacacgctgaacatcaacgccctggcacgccagacactcatcaacgccggcggcgtcttcgagcgcaccgtgttccctgcaaagtacgcgctggggatgtcggcagacgtgtacaagagctggaatttcaacgagcaggctctcccagcagatctcgtcaagagaggtgtggctgtgccggaccagtcaagcccatatggtgtccgactgctgatcaaggactacccctatgccgttgacgggctcgtcatctggtgggcgatcgagcggtgggtcaaggagtacctggacatctactaccctaacgacggcgagctccagcgtgacgtggagctgcaggcgtggtggaaggaggtgcgtgaggaggcgcacggcgacctcaaggaccgagactggtggcccaggatggacaccgtccagcagctggctagggcgtgcacgaccatcatctgggtggcatccgcgctgcacgcggctgtcaactttgggcagtacccatacgccgggtacctcccgaaccggccgacggccagccggcgcccgatgccggagccaggcagccacgactacaagaagctgggagcggggcagaaggaggcggacatggtgttcatccgcaccatcaccagccagttccagaccatcctgggcatctcgctcatcgagatcctctccaagcactcctccgacgaggtgtacctcggccagcgtgacgagcctgatcgctggacgtcagacgccaaggcgctggatgcgttcaaaagattcgggagccggctggtgcagattgagaatcggatcaagacgatgaacgacagtccggacttgaagaaccggaaggggcctgtggaaatgccgtacatgctgctgtaccccaacacgtcggacgttaccggcgagaaggccgaggggcttactgccatgggcattcccaacagcatctccatatgagcctgggcagattgtgtctcgtagtaaattgttgtgctgcgccgtgcgatgtgtttcttcattggttttgtcagtctcagggtaggggatggagatcataccatgatctttgtagggttgagagaggagtccacgcttgaatattgttgtcatgtatgtaattcttggttaataataaagttcgtcagttcatttcttagcct

SEQ ID NO: 130003 - DNA, 3292 bp, Zea Mays
aagccgaggcgagcagccgtcgccgcctatatatcgcggcgcagggcagcaggagttccacacttccatacacgcctgccttgtgccttcccttcccttgccttgcttcgcttattgccggcacatcacatcggcaggcgagggacggagcgagcagggaagcccatccaccagccagccaccgcgttcctgagaagcgaggagcgagaaaagcgaagagcggccatgttctggcacggggtcgcggaccggctgacgggaaagaacaaggaggcgtggagcgagggcaagatccgcggcacggtgaggctggtcaagaaggaggtgctggacgtcggcgacttcaacgcctcgctcctcgacggcgtccacaggatcctcggctgggacgacggcgtcgccttccagctcgtcagcgccaccgcggccgaccccagcaacgggggccgtggcaaggtggggaaggcggcgcacctggaggaggcggtggtgtcgctcaagtccacggcggacggggagaccgtgtaccgggtgagcttcgagtgggacgagtcgcagggcatcccgggcgccgtcctggtcaggaacctgcagcacgccgagttcttcctcaagacgctcaccctcgagggcgtcccaggcaagggcaccgtcgtcttcgtcgccaactcgtgggtctacccgcacaagctctactcccaggaacgcatcttcttcgccaacgacacctatctgccgagcaaaatgccggcggcgttggtgccttatcggcaagatgagctcaagattctccgtggcgacgataatcctggaccataccaggagcatgatcgcgtctaccgttacgactactacaatgaccttggtgatcccgacaagggcgaagagcacgctcggccgatcctcggtggcagccaagaacacccgtatccccgtcgctgcagaactggccggcacccaacaaagaaagacccaaattcggagagcaggcttttcctgctgaacctgaacatctacgtcccgcgtgacgaacgctttgggcatctcaagatgtcggacttccttgggtactcgctgaagacgatcatcgaggctgttcttccaacactggggactttcgtcgatgacacgcccaaggagttcgattcgtttgaggatatcctcgggctctacgagctgggcccagaggcacccaacaacccactgatagcagagatcaggaagaagatccccagcgagttccttcgaagcattctgccgaacggtagccatgaccacccgctaaagatgccccttccaaatgtcatcaaatcagatgtgttgaaaaaggctccggagtttaagtttggctggaggactgacgaagagttcgcgagagagacacttgcaggcgtgaacccagtaatcatcaaacgtctgacggttagcgttcttgcatcatttggatcggcaaaaatacaccttgccccatatattaactgagtacagagccttaaaggcctttttttatatatatatttcgtatctcaggagttccccgctaaaagcaccctggacccaaggcagtacggagaccacaccagcaagatcactgaagctcacatccggcataacatgggaggcctgtcggtgcagaacgtatgctggactgcatgaacgcacgcacgtacaaccgaaagccgcttaaaaccatcgactgatctgatttccgcgtaacgaaccctgtgcaggcactgaggaacaagaggctcttcatcctagaccaccatgaccatttcatgccgtacctcgacgagatcaacgagctggaggggaacttcatctacgccagcaggaccctactgttcctgaaggacgatggcacgctgaagcccctggccatcgagctgagcctgccccaccctgacggccagcagcgcggcgcggtcagcaaggtgtacaccccggctcacaccggcgtcgagggccacgtctggcagctcgccaaggcttatgcctgcgtaaacgactctgcctggcatcagctgatcagccactggctgaacacgcacgcggtgatcgagccgttcgtaatcgcgacaaaccggcagctcagcgtggtgcatcccgtgcacaagctgctgagcccgcactaccgtgacacgctgaacatcaacgccctggcacgccagacactcatcaacgccggcggcgtcttcgagcgcaccgtgttccctgcaaagtacgcgctggggatgtcggcagacgtgtacaagagctggaatttcaacgagcaggctctcccagcagatctcgtcaagagaggtgtggctgtgccggaccagtcaagcccatatggtgtccgactgctgatcaaggactacccctatgccgttgacgggctcgtcatctggtgggcgatcgagcggtgggtcaaggagtacctggacatctactaccctaacgacggcgagctccagcgtgacgtggagctgcaggcgtggtggaaggaggtgcgtgaggaggcgcacggcgacctcaaggaccgagactggtggcccaggatggacaccgtccagcagctggctagggcgtgcacgaccatcatctgggtggcatccgcgctgcacgcggctgtcaactttgggcagtacccatacgccgggtacctcccgaaccggccgacggccagccggcgcccgatgccggagccaggcagccacgactacaagaagctgggagcggggcagaaggaggcggacatggtgttcatccgcaccatcaccagccagttccagaccatcctgggcatctcgctcatcgagatcctctccaagcactcctccgacgaggtgtacctcggccagcgtgacgagcctgatcgctggacgtcagacgccaaggcgctggatgcgttcaaaagattcgggagccggctggtgcagattgagaatcggatcaagacgatgaacgacagtccggacttgaagaaccggaaggggcctgtggaaatgccgtacatgctgctgtaccccaacacgtcggacgttaccggcgagaaggccgaggggcttactgccatgggcattcccaacagcatctccatatgagcctgggcagattgtgtctcgtagtaaattgttgtgctgcgccgtgcgatgtgtttcttcattggttttgtcagtctcagggtaggggatggagatcataccatgatctttgtagggttgagagaggagtccacgcttgaatattgttgtcatgtatgtaattcttggttaataataaagttcgtcagttcatttcttagcct

SEQ ID NO: 130004 - DNA, 1910 bp, Zea Mays
aagccgaggcgagcagccgtcgccgcctatatatcgcggcgcagggcagcaggagttccacacttccatacacgcctgccttgtgccttcccttcccttgccttgcttcgcttattgccggcacatcacatcggcaggcgagggacggagcgagcagggaagcccatccaccagccagccaccgcgttcctgagaagcgaggagcgagaaaagcgaagagcggccatgttctggcacggggtcgcggaccggctgacgggaaagaacaaggaggcgtggagcgagggcaagatccgcggcacggtgaggctggtcaagaaggaggtgctggacgtcggcgacttcaacgcctcgctcctcgacggcgtccacaggatcctcggctgggacgacggcgtcgccttccagctcgtcagcgccaccgcggccgaccccagcaacgggggccgtggcaaggtggggaaggcggcgcacctggaggaggcggtggtgtcgctcaagtccacggcggacggggagaccgtgtaccgggtgagcttcgagtgggacgagtcgcagggcatcccgggcgccgtcctggtcaggaacctgcagcacgccgagttcttcctcaagacgctcaccctcgagggcgtcccaggcaagggcaccgtcgtcttcgtcgccaactcgtgggtctacccgcacaagctctactcccaggaacgcatcttcttcgccaacgacacctatctgccgagcaaaatgccggcggcgttggtgccttatcggcaagatgagctcaagattctccgtggcgacgataatcctggaccataccaggagcatgatcgcgtctaccgttacgactactacaatgaccttggtgatcccgacaagggcgaagagcacgctcggccgatcctcggtggcagccaagaacacccgtatccccgtcgctgcagaactggccggcacccaacaaagaaagacccaaattcggagagcaggcttttcctgctgaacctgaacatctacgtcccgcgtgacgaacgctttgggcatctcaagatgtcggacttccttgggtactcgctgaagacgatcatcgaggctgttcttccaacactggggactttcgtcgatgacacgcccaaggagttcgattcgtttgaggatatcctcgggctctacgagctgggcccagaggcacccaacaacccactgatagcagagatcaggaagaagatccccagcgagttccttcgaagcattctgccgaacggtagccatgaccacccgctaaagatgccccttccaaatgtcatcaaatcagatgtgttgaaaaaggctccggagtttaagtttggctggaggactgacgaagagttcgcgagagagacacttgcaggcgtgaacccagtaatcatcaaacgtctgacggagttccccgctaaaagcaccctggacccaaggcagtacggagaccacaccagcaagatcactgaagctcacatccggcataacatgggaggcctgtcggtgcagaacgcactgaggaacaagaggctcttcatcctagaccaccatgaccatttcatgccgtacctcgacgagatcaacgagctggaggggaacttcatctacgccagcaggaccctactgttcctgaaggacgatggcacgctgaagcccctggccatcgagctgagcctgccccaccctgacggccagcagcgcggcgcggtcagcaaggtgtacaccccggctcacaccggcgtcgagggccacgtctggcagctcgccaaggcttatgcctgcgtaaacgactctgcctggcatcagctgatcagccactggtataagaaatgtttctggtgcctttttctctttttttttccttttaattaattaatgtacatagataactg

SEQ ID NO: 130005 - DNA, 646 bp, Zea Mays
gaattccggtgtctgttcatcgccgctccaggtcgtagatgtgaatatactttgctaggggaataagtgataagtctgtctggaaggtaatgtttgagctttgctagtgtggctgggcactctggtcactggttgtgttgtgcatgcatcagctgtatgatcgtcgtctgttgtggaaaattggtcaatgtattctcttgctgaataatttgtgacatctaattgttatgtatcgtctctttgctgaataatcagtttctgatttatcttgcattattttgagaatgaaatgatgatggtagctcagtctgcagctattcgggcgcacactgggtggctcactgtttggccacccagttacttacgtttagtgttgtggcccactgttttgccacccagttacttgaacgttgttttatcgtaaatttgagtattattaagagaaacattcaaaagaaaatcatctccaacgaactctatgaatgcctctttaaattttattcatcaacctttgctctatacttttaggctatttattcctcactctctagttttatatagcctacttcatttttatatagcttacttcactcgccttggattagtctacttttctctcgtggtagagagtaacaaaattaataaa

SEQ ID NO: 130006 - DNA, 1607 bp, Zea Mays
cttcatcttcctcgcagcgccggcgttccatcttccgctcctcccttattcgcgctcggcacgcaggcggcggcggcggcactcaggctcgggatctcagcgacggcgctcaggctcgggatctcagcgacggcgcccaggctcgggatctcagcgacggcgtcagcggcttcccttcagcctcgcgccctcgccttcgatcctccgcacaccggccggtgaccctgcgttatttctctgagggcactcatgatttagcacaagtcatactgatctctaactctggtgacataagctgttgttagggtagcaaatcaagagataaaaatggcagattcaatggtagcgagcttctgggggcctgttacatcaacaactgagttgtgcgaggagaattatgcacactcatcatatatagcagaattctacaacacaatttctaatgtcccatgtgttcttttggcgcttattggattagtgaatgctttccgccaaggttttgagaagcgattcagtgtcctgcacatatccaatatgatacttgctattgggagtatgatttttcatgccaccttgcaacttgtattcagtagatgaactttcagaatattgatacacccattaagggacgaagtcgggaagaaccattagggtgtgggggcttagctatattaaattgctagcctacaacagagtgacgagactccaatggtctgggagatccttctttatatgtatgtcctttattcgccggactggcattacaggagcacaatgccaaccttccttttcctatatggtgctgcctttgctgtagttcatttctttgcccggttccaattcgtattcaagctgcattacattggcctctgcttcctctgcatcccccggatgtacaagtactacatacagaccaaagacgtggctgcgaagcggctcgcaaagctgtgggttctcacgttaacccttgggactctctgctggctagttgatcgcatcttctgcaagaagctttcgcattggtatgtcaacccgcaggggcacgcatggtggcatgtgcttatgggcctcaactcatactatgcaaacacattcctaatgttctgtcgggctcagcagcgcgggtgggaggcgcgaatcacctaccttcttggatttttgccttatgtcaaggtccagaaaccagagaagaagagggaatgatttgtctctgcttaacactgatgctactcagtccaccgccagtaagctaatgtctatcccccaccccatcccccacccaatgtgcgcagacaagttgtggcatttttgtatatgggcatccaaatgattacggactataaatgttctgatgtcacactggatttcggtaacttttgactggcacctgttttgtaccatacttaatcatcgaacggagattagttggagtggttggttggtgtcctagttttggccatctttcttttggtttctttgcaattgccttttggtggtaataggacagggttatttgtttattcgtttgtcgttgaatggagtccagttgtactagttatcatcactccgcatggggatacatccttccatatgatgaccgttaattc

SEQ ID NO: 130007 - DNA, 1508 bp, Zea Mays
cttcatcttcctcgcagcgccggcgttccatcttccgctcctcccttattcgcgctcggcacgcaggcggcggcggcggcactcaggctcgggatctcagcgacggcgctcaggctcgggatctcagcgacggcgcccaggctcgggatctcagcgacggcgtcagcggcttcccttcagcctcgcgccctcgccttcgatcctccgcacaccggccggtgaccctgcgttatttctctgagggcactcatgatttagcacaagtcatactgatctctaactctggtgacataagctgttgttagggtagcaaatcaagagataaaaatggcagattcaatggtagcgagcttctgggggcctgttacatcaacaactgagttgtgcgaggagaattatgcacactcatcatatatagcagaattctacaacacaatttctaatgtcccatgtgttcttttggcgcttattggattagtgaatgctttccgccaaggttttgagaagcgattcagtgtcctgcacatatccaatatgatacttgctattgggagtatgatttttcatgccaccttgcaacttgtcctacaacagagtgacgagactccaatggtctgggagatccttctttatatgtatgtcctttattcgccggactggcattacaggagcacaatgccaaccttccttttcctatatggtgctgcctttgctgtagttcatttctttgcccggttccaattcgtattcaagctgcattacattggcctctgcttcctctgcatcccccggatgtacaagtactacatacagaccaaagacgtggctgcgaagcggctcgcaaagctgtgggttctcacgttaacccttgggactctctgctggctagttgatcgcatcttctgcaagaagctttcgcattggtatgtcaacccgcaggggcacgcatggtggcatgtgcttatgggcctcaactcatactatgcaaacacattcctaatgttctgtcgggctcagcagcgcgggtgggaggcgcgaatcacctaccttcttggatttttgccttatgtcaaggtccagaaaccagagaagaagagggaatgatttgtctctgcttaacactgatgctactcagtccaccgccagtaagctaatgtctatcccccaccccatcccccacccaatgtgcgcagacaagttgtggcatttttgtatatgggcatccaaatgattacggactataaatgttctgatgtcacactggatttcggtaacttttgactggcacctgttttgtaccatacttaatcatcgaacggagattagttggagtggttggttggtgtcctagttttggccatctttcttttggtttctttgcaattgccttttggtggtaataggacagggttatttgtttattcgtttgtcgttgaatggagtccagttgtactagttatcatcactccgcatggggatacatccttccatatgatgaccgttaattc

SEQ ID NO: 130008 - DNA, 1601 bp, Zea Mays
cttcatcttcctcgcagcgccggcgttccatcttccgctcctcccttattcgcgctcggcacgcaggcggcggcggcggcactcaggctcgggatctcagcgacggcgctcaggctcgggatctcagcgacggcgcccaggctcgggatctcagcgacggcgtcagcggcttcccttcagcctcgcgccctcgccttcgatcctccgcacaccggccggtgaccctgcgtgcgtgcccctctctctctccgcccgcttccggtggatcgtcaacggcgcccgatccctgcgccgcgcgcagtgtgagggccgcgggagcgcgttatttctctgagggcactcatgatttagcacaagtcatactgatctctaactctggtgacataagctgttgttagggtagcaaatcaagagataaaaatggcagattcaatggtagcgagcttctgggggcctgttacatcaacaactgagttgtgcgaggagaattatgcacactcatcatatatagcagaattctacaacacaatttctaatgtcccatgtgttcttttggcgcttattggattagtgaatgctttccgccaaggttttgagaagcgattcagtgtcctgcacatatccaatatgatacttgctattgggagtatgatttttcatgccaccttgcaacttgtcctacaacagagtgacgagactccaatggtctgggagatccttctttatatgtatgtcctttattcgccggactggcattacaggagcacaatgccaaccttccttttcctatatggtgctgcctttgctgtagttcatttctttgcccggttccaattcgtattcaagctgcattacattggcctctgcttcctctgcatcccccggatgtacaagtactacatacagaccaaagacgtggctgcgaagcggctcgcaaagctgtgggttctcacgttaacccttgggactctctgctggctagttgatcgcatcttctgcaagaagctttcgcattggtatgtcaacccgcaggggcacgcatggtggcatgtgcttatgggcctcaactcatactatgcaaacacattcctaatgttctgtcgggctcagcagcgcgggtgggaggcgcgaatcacctaccttcttggatttttgccttatgtcaaggtccagaaaccagagaagaagagggaatgatttgtctctgcttaacactgatgctactcagtccaccgccagtaagctaatgtctatcccccaccccatcccccacccaatgtgcgcagacaagttgtggcatttttgtatatgggcatccaaatgattacggactataaatgttctgatgtcacactggatttcggtaacttttgactggcacctgttttgtaccatacttaatcatcgaacggagattagttggagtggttggttggtgtcctagttttggccatctttcttttggtttctttgcaattgccttttggtggtaataggacagggttatttgtttattcgtttgtcgttgaatggagtccagttgtactagttatcatcactccgcatggggatacatccttccatatgatgaccgttaattc

SEQ ID NO: 130009 - DNA, 696 bp, Zea Mays
cttcatcttcctcgcagcgccggcgttccatcttccgctcctcccttattcgcgctcggcacgcaggcggcggcggcggcactcaggctcgggatctcagcgacggcgctcaggctcgggatctcagcgacggcgcccaggctcgggatctcagcgacggcgtcagcggcttcccttcagcctcgcgccctcgccttcgatcctccgcacaccggccggtgaccctgcgttatttctctgagggcactcatgatttagcacaagtcatactgatctctaactctggtgacataagctgttgttagggtagcaaatcaagagataaaaatggcagattcaatggtagcgagcttctgggggcctgttacatcaacaactgagttgtgcgaggagaattatgcacactcatcatatatagcagaattctacaacacaatttctaatgtcccatgtgttcttttggcgcttattggattagtgaatgctttccgccaaggttttgagaagcgattcagtgtcctgcacatatccaatatgatacttgctattgggagtatgatttttcatgccaccttgcaacttgtgtaagtttccttttaaaattgaaagtttatgtatgtgaaatgatacttttaactatgtgattactagtagctacttgagaaactgttataactagaccttattcttttctcc

SEQ ID NO: 130010 - DNA, 1575 bp, Zea Mays
acggttcgttcattgctccgcacagcaacaatccctaacggcctaacccctaggagagcttccacacgcgcgcgccacagcacgctagttcttgctccacggatctgcgccgccgccagattgttctgcttctgccgctaggctgccaaacaaggaggctaacgagatggtggttggggagcaggactactactattctagttccgactccgacgacgaggacgtcagccgctacgtgttcctcgcacggcagcccgtgcccgtgggccgccaccacccggaggaggacgatcgagacgcgagctttgcgaatgatgacgacgacggtgatggtggcgatggaacggcgggggaggaggaatcggaaggaggcgtctgtaggaggaagaagaggcctctcctggagatcttggacgacgacgccccgccgccgaccaagaaggcccaggtcgaactgatcatcgcgtcgccgctggcgacgcagacgccaccgagcggttcggagtcgaacttagcgtccccgcctttggccggggagtccgggagcgaggggagccacgagcatcgcgctccaagagagcaaggaagggccaagaacgcgacaaagaaccagcggggcgcgtgcggcaagcgaggcaggagttcgggctgcgatgtggatggcgaccgggacgcgcatcggcacgctgtggcggtggcggcaaagactggcgcgtcgtccagcgcaacctcggggcgcttcaccttcacctgcagcctatgcgacaggtgcttcgatagccatcaggcgctcgggggacatgtccttggacaccaccggaagagagccaagatcgccattgccgcaggagcagttcatgacgtcgtcgatgacaaggtccatggcaagggcaagggcggcgttggggagcccgtgtttgcaggaagccatgacatcgctgtatcatcaggccatggcttcacatatggcaactccagaagcgacaagaagatggacattggcacggcaagccccaaccgaaaggtcgtcgtcgctggaacgtgccgcgagggtgccaatggcaacggcaacggccacggtgacggctgcaggacgcggtacaagtgcaaggtgtgtggaacggaatgcctcacagggcgcgcgctcggtggccatatggggaagcaccagaagcgactaccagtcggtggtggtggcaaggcagacaggtcgcctagtccagcgacgcggacgacgactgccagacctttggcgcagctgttcggcgccgagaggttgcagagagagataagacctagttgaatagttcatgcaaccgtgcgacgaaatttactaattgtgaaatttcaggatttcttagcgatgtaagcttttgtatctgcactctgcatctgcagcccttatattaacaatgtttttcaagatgaagaactcactttatcctaaaatttaaggtggtctagttttgattaaagcttctagttttttaaggcatgctatttgtgatagatgttgatgtattactatataaatctattcaatatggtttttgaaaataataaaactatacgaaa

SEQ ID NO: 130011 - DNA, 593 bp, Zea Mays
gcagcatatcaatatcatgcagcatagcagtactcagacccttactacgcaggcgttgttgctccctatggaagtcaagatgtgtgtccgaggagcctgtctatgtgaacgccaagcagtaccgcggcattctaagacggcggcagtcacgtgccaaggccgagcttgagagaaagcgctggtcaaagcaagaaagccgtatcttcacgagtccccgtcatcagcacgcgatgacgaggagggcgagagggaacggtggacgcttcctaaacacgaagaagagtgaccgtgtccctcctgatgacttgatacagctacgacgacacaacgaggcttgaagaggtagcggtctggctggcatcctagagcagcggtttctgtccacaggcacgtgcatctgagaccggatccgtagctccactccacagcatatgcgcagcccatccatctcgtgcacacttgtgtagctgctgtgttgtaacttgtaagtggaaaactgagcttgtgtccgattgctatacacaacctaagtttcctgtgacctagctctgatgtggctctgattgaactgcaccaaatcatatgaaatccct

SEQ ID NO: 130012 - DNA, 562 bp, Zea Mays
ggataagattgaggccttgttcggttattataatttcacgtggattggagtatagtatattgaaatggattgagatgtattttaacttactatagatttaaaccgactcaatatcatccaatccacatggcttaacggtgggtttaaatcccaaacaaatcaaaatcttttatattttttctaatctcatccaatccacatgggataggaataatcgaacaaggatttaatgattgttcttggcttcttgcaggggagaatatcttgcgtggttcatgttaatccacacaaccaaactatagtacatcaggactgctaccccgagtgaaatgcttacggcgtggaaggatgtgtgctatcttgcctcgcgaatgaatcgtttggttcgtttctaagcttcgcttggagccgttgtaaaagtaagaaacaactaaactctactggataatgtgcctattgtaaagccgttaacacgtcatgttaatatcaatcagtttccctacaatgagaaaattgatatttcgcattggtgttacgtacggtgatgtttgagttcactgca

SEQ ID NO: 130013 - DNA, 976 bp, Zea Mays
gcccgccggcccgccccgccccgcctcgttacccgcccacccaccgctgcttctgcccgactgctccatggaggggaccacgcaacccaccgcgggggcgcgggaaaagctgctccccacctccgccgccgcctctctgccgccctacctcgacccgcaccccgccgactcctcctcctacgcggtcctcctcgtccccgtccgccgccgcctgcgccgcggcggccgctgcatcgccccctgcctcaccgccctcctcctcgcgctcgcgggcttcctcctctggccggccgacccggacatctccctcgcccgcttccacctggggcacgtctccgtcgtggcgcgccccgccgtcgccgtcaccatatccgccgcgctcaaggtccgcgtccgcaacccggacctcttcgcgctcgactacacccgcctcgacgtcgccatcggctaccgcggcaagccgcttggcctggtaacgtccggcggcggacgggtccaggcgcgcgctgtctcgtacgtcgacgccaacctgcagctcgacggcatacgcgtcgtcgaggacgcgatctacctgctcaaggacctcgcgcggggatccgtgccctttgacgccctcgccgaggtcgagggtcaccttcacttcttcttcctcagtatcccggtcaaggggagaatatcttgcgtggttcatgttaatccacacaaccaaactatagtacatcaggactgctaccccgagtgaaatgcttacggcgtggaaggatgtgtgctatcttgcctcgcgaatgaatcgtttggttcgtttctaagcttcgcttggagccgttgtaaaagtaagaaacaactaaactctactggataatgtgcctattgtaaagccgttaacacgtcatgttaatatcaatcagtttccctacaatgagaaaattgatatttcgcattggtgttacgtacggtgatgtttgagttcactgca

SEQ ID NO: 130014 - DNA, 1566 bp, Zea Mays
acacacgcacacatacacttctcaaaaaaatccctcccgctcccaccgccgtctcctcctcccaatcacattccgtttccattcgcgcggcccgcgccgccgtcatggccgccgcctccctcctcgaggccactcgcttcctctccaccccgcacccacgctcgcgctcgcgcccgctccctttcccgcccggcagcggcctacacccccacctcctcaggacccctcgcctctccactctccgcgtccacctccaccgtcccgctcctctcggcgcgcaggagccggcgaggcctggcgcgctcctggccgtagacgcgctcaggaggtccgtgctcgactccctcgcggcgctcaagcggcccgcgctcgcgctcctcctggccggtgtgctgctcgccgcggcatcggcgggcgggccgcacgcggcggcgctggccgcctcgggcgggcgcgtcggcgggtcggccttctcctcgcgctcctcctcgcctcgatcctacgggtacagcgcgccggctcccaggggcgggtacacggccgctcccttctactctccttcgcccttcgtatccgtcggcccagccctcggcatcggcttcgggggatcggggttcctcgtgaccctcatgggtttcgcggctttcctctacctggccgggttcctgtccgactcgtccggcgctaccagtgtgctcacagagacggagaagaccaccgtcctcaagctacaggttggcttgctgggcatggcacgatcatttcagaaggagcttgatcaaatagctgagaaagcagatacatctaccccagctgggttgagctatgtgttgacagagacaacattggcattacttcggcatccggactgttgtatctcagcttactcatcggtggatgtgaaacgaagcattgataatggtgagaaacgtttcaatcagctttcaattgaggagaggggcaagtttgatgaagagacacttgtgaatgtgaacagcatcaagaggaataaaggaggcagccaaagatcaagtggttttagcaacgagtacattgtgataaccatattggttgctgctgagggagtacataaggtgccggttataaatagcagcaatgacttaaagacagctctacaaaagatgggtgccataccatcgcgcaaaatactggcagtcgaggtcctatggactccacaaaatgagaatgacactttgtcagagcgagagctccttgaagattacccgctcttaaggcctctgtagaaagaagctgctgtagattcagttttggcggttttcttattaactatagcgcagatcttgtgtttgtataaaagtgtataatttgttattgacgtcactgttagccttcatatcagaacatttagcgcatcgcagtacaagtctgcgattgtctgccggtagtcttggtcgctgttcctgacacaataacacaaaattgtaaatagattgttctgaaaagaacacgagaggctgcatctgtgcgtgtacccgttctgccatgcatatcttagataaaagatttgatgaaatattgcgtgtc

SEQ ID NO: 130015 - DNA, 1504 bp, Zea Mays
acacacgcacacatacacttctcaaaaaaatccctcccgctcccaccgccgtctcctcctcccaatcacattccgtttccattcgcgcggcccgcgccgccgtcatggccgccgcctccctcctcgaggccactcgcttcctctccaccccgcacccacgctcgcgctcgcgcccgctccctttcccgcccggcagcggcctacacccccacctcctcaggacccctcgcctctccactctccgcgtccacctccaccgtcccgctcctctcggcgcgcaggagccggcgaggcctggcgcgctcctggccgtagacgcgctcaggaggtccgtgctcgactccctcgcggcgctcaagcggcccgcgctcgcgctcctcctggccggtgtgctgctcgccgcggcatcggcgggcgggccgcacgcggcggcgctggccgcctcgggcgggcgcgtcggcgggtcggccttctcctcgcgctcctcctcgcctcgatcctacgggtacagcgcgccggctcccaggggcgggtacacggccgctcccttctactctccttcgcccttcgtatccgtcggcccagccctcggcatcggcttcgggggatcggggttcctcgtgaccctcatgggtttcgcggctttcctctacctggccgggttcctgtccgactcgtccggcgctaccagtgtgctcacagagacggagaagaccaccgtcctcaagctacaggttggcttgctgggcatggcacgatcatttcagaaggagcttgatcaaatagctgagaaagcagatacatctaccccagctgggttgagctatgtgttgacagagacaacattggcattacttcggcatccggactgttgtatctcagcttactcatcgctttcaattgaggagaggggcaagtttgatgaagagacacttgtgaatgtgaacagcatcaagaggaataaaggaggcagccaaagatcaagtggttttagcaacgagtacattgtgataaccatattggttgctgctgagggagtacataaggtgccggttataaatagcagcaatgacttaaagacagctctacaaaagatgggtgccataccatcgcgcaaaatactggcagtcgaggtcctatggactccacaaaatgagaatgacactttgtcagagcgagagctccttgaagattacccgctcttaaggcctctgtagaaagaagctgctgtagattcagttttggcggttttcttattaactatagcgcagatcttgtgtttgtataaaagtgtataatttgttattgacgtcactgttagccttcatatcagaacatttagcgcatcgcagtacaagtctgcgattgtctgccggtagtcttggtcgctgttcctgacacaataacacaaaattgtaaatagattgttctgaaaagaacacgagaggctgcatctgtgcgtgtacccgttctgccatgcatatcttagataaaagatttgatg

SEQ ID NO: 130016 - DNA, 1476 bp, Zea Mays
acacacgcacacatacacttctcaaaaaaatccctcccgctcccaccgccgtctcctcctcccaatcacattccgtttccattcgcgcggcccgcgccgccgtcatggccgccgcctccctcctcgaggccactcgcttcctctccaccccgcacccacgctcgcgctcgcgcccgctccctttcccgcccggcagcggcctacacccccacctcctcaggacccctcgcctctccactctccgcgtccacctccaccgtcccgctcctctcggcgcgcaggagccggcgaggcctggcgcgctcctggccgtagacgcgctcaggaggtccgtgctcgactccctcgcggcgctcaagcggcccgcgctcgcgctcctcctggccggtgtgctgctcgccgcggcatcggcgggcgggccgcacgcggcggcgctggccgcctcgggcgggcgcgtcggcgggtcggccttctcctcgcgctcctcctcgcctcgatcctacgggtacagcgcgccggctcccaggggcgggtacacggccgctcccttctactctccttcgcccttcgtatccgtcggcccagccctcggcatcggcttcgggggatcggggttcctcgtgaccctcatgggtttcgcggctttcctctacctggccgggttcctgtccgactcgtccggcgctaccagtgtgctcacagagacggagaagaccaccgtcctcaagctacaggttggcttgctgggcatggcacgatcatttcagaaggagcttgatcaaatagctgagaaagcagatacatctaccccagctgggttgagctatgtgttgacagagacaacattggcattacttcggcatccggactgttgtatctcagcttactcatcggtggatgtgaaacgaagcattgataatgcatcaagaggaataaaggaggcagccaaagatcaagtggttttagcaacgagtacattgtgataaccatattggttgctgctgagggagtacataaggtgccggttataaatagcagcaatgacttaaagacagctctacaaaagatgggtgccataccatcgcgcaaaatactggcagtcgaggtcctatggactccacaaaatgagaatgacactttgtcagagcgagagctccttgaagattacccgctcttaaggcctctgtagaaagaagctgctgtagattcagttttggcggttttcttattaactatagcgcagatcttgtgtttgtataaaagtgtataatttgttattgacgtcactgttagccttcatatcagaacatttagcgcatcgcagtacaagtctgcgattgtctgccggtagtcttggtcgctgttcctgacacaataacacaaaattgtaaatagattgttctgaaaagaacacgagaggctgcatctgtgcgtgtacccgttctgccatgcatatcttagataaaagatttgatg

SEQ ID NO: 130017 - DNA, 2584 bp, Zea Mays
ctcaacctctagccatttcccagggttaaccgcagaagccaaaatccggccgcccgctcactccaatccacgttcttcattcctctccctccatagggttttgtgaactctcctgtttgggcaccaccgtcggcccatggcgaccacgaccttccccacctcgaccccattctttgcggcccatcacggcccccgccggagccgaccctccatctccgccgcggtctacagccgcagtcgccggtggcgcccgctgcgggtggcgtgcgagaaggtggtaggcatcgacctggggaccacaaattccgcggtggcagctatggagggcggcaagcccacgatcgttaccaacgccgagggggcgcggaccacgccctcggtggtggcgtacaccaagtccggcgaccgcctcgttggccagatcgccaagcgccaggccgtcgtcaacccggagaacaccttcttctccgtgaagcgcttcatcggccgcaagatgaacgaggtagacgaggagtccaagcaggtctcgtatcgcgtcatcagggacgacaacggcaacgtcaagctcgattgcccggcgattggcaagcagttcgcagctgaggagatttccgcacaggtgctgagaaagctggtggatgatgcatcaaagtttttgaatgacaaagtcacaaaggcagtgatcacagtccctgcttacttcaacgattcacaaaggacagcaaccaaagatgctggccgcattgctgggctggaggttctgcgtattataaatgagcccaccgcagcatcactagcatatggttttgagaaaaagaacaatgaaacaattctggtttttgacctcggaggtggcacatttgacgtttcagttcttgaagtcggtgatggtgtttttgaggtgctgtctacatcaggtgacactcaccttggtggtgatgactttgacaagagaattgttgattggctcgctggaaacttcaagaatgatgagggtattgacttgctaaaagataagcaagctctccagcgattgacagaagcggctgagaaggcaaagatggagctgtcatctttgacccaaacaaacataagcttgccttttattacagctactgcggatggccccaagcatattgagactactcttaccagggctaaatttgaagagctatgctcagatctccttgacaggttgaggacccctgtggacaatgcccttagagatgcgaagttgcagttcaaagatattgatgaggttattcttgtcggtggctcaactagaataccagccgttcaggagcttgtcaagaaaatgacaggaaaggaccccaatgtgacagtcaaccctgatgaggttgttgcacttggagcagctgtgcaggctggagttttgtctggtgatgttagcgacattgtccttctcgatgtgaccccattgtcccttggtttggagacactgggtggtgttatgaccaagattatcccacggaatacaaccctgcctacctcaaagtcggaagttttctcaacagctgctgatggccagaccagtgtggagatcaatgttctccaaggagaaagggagttcgtgagagacaacaagtctcttggtagcttccggcttgatggaatccctcctgccccacgtggtgttccgcagatcgaagtcaagtttgatattgatgctaacggtatcctttctgtcactgccgtggacaagggtacagggaagaagcaggatattacaattactggtgccagcactctgccaaaggacgaggtggagaggatggttgacgaagctgagaagtttgcaaaggaggataaggagaagagagatgccattgacaccaagaaccaagccgagtcggtcatctaccagaccgagaaacaactgaaggaactaggggacaaggtcccaggcgacgtcaaggggaaggtcgagtcgaagctgcaagagctcaaggatgctgttgctggtggctccacacagacgatgaaggacgccattagtgcattgaaccaggaagtcatgcagattgggcagtccctctacagccagcagggtgccccaggcgccggacctggtccagctgatgcttctgctggttcagcggcgggcacttctgagaagccaggtgacgatggcgatgtaatagacgcagatttcactgacagcaaatgagtggcatgctaggtttagatgaggctgttcgctggggatgttttgccgcgagggagagatttgttttgtaggatgtgggtgtactttttggtagatttgcacctttgttcccatttggagttcggatgaaggtgagttagggaaaggtcgggttttaactgtcaaatgaatgtacataggcctatttttcttttgtgccttgccttcgaccgttcgacgttcgacctagttggtgtttgtttcaacccgttttgtcagaacccggtttgtgagactcgttttgacgagttttgatgaaaatcgtttaaaatcaaattgtatgtataaaaactacagcaaaaaaacctgtaattttataaattgtctacaataaaaagaaaaatcagataactaaat

SEQ ID NO: 130018 - DNA, 1927 bp, Zea Mays
ctcaacctctagccatttcccagggttaaccgcagaagccaaaatccggccgcccgctcactccaatccacgttcttcattcctctccctccatagggttttgtgaactctcctgtttgggcaccacccagcatcactagcatatggttttgagaaaaagaacaatgaaacaattctggtttttgacctcggaggtggcacatttgacgtttcagttcttgaagtcggtgatggtgtttttgaggtgctgtctacatcaggtgacactcaccttggtggtgatgactttgacaagagaattgttgattggctcgctggaaacttcaagaatgatgagggtattgacttgctaaaagataagcaagctctccagcgattgacagaagcggctgagaaggcaaagatggagctgtcatctttgacccaaacaaacataagcttgccttttattacagctactgcggatggccccaagcatattgagactactcttaccagggctaaatttgaagagctatgctcagatctccttgacaggttgaggacccctgtggacaatgcccttagagatgcgaagttgcagttcaaagatattgatgaggttattcttgtcggtggctcaactagaataccagccgttcaggagcttgtcaagaaaatgacaggaaaggaccccaatgtgacagtcaaccctgatgaggttgttgcacttggagcagctgtgcaggctggagttttgtctggtgatgttagcgacattgtccttctcgatgtgaccccattgtcccttggtttggagacactgggtggtgttatgaccaagattatcccacggaatacaaccctgcctacctcaaagtcggaagttttctcaacagctgctgatggccagaccagtgtggagatcaatgttctccaaggagaaagggagttcgtgagagacaacaagtctcttggtagcttccggcttgatggaatccctcctgccccacgtggtgttccgcagatcgaagtcaagtttgatattgatgctaacggtatcctttctgtcactgccgtggacaagggtacagggaagaagcaggatattacaattactggtgccagcactctgccaaaggacgaggtggagaggatggttgacgaagctgagaagtttgcaaaggaggataaggagaagagagatgccattgacaccaagaaccaagccgagtcggtcatctaccagaccgagaaacaactgaaggaactaggggacaaggtcccaggcgacgtcaaggggaaggtcgagtcgaagctgcaagagctcaaggatgctgttgctggtggctccacacagacgatgaaggacgccattagtgcattgaaccaggaagtcatgcagattgggcagtccctctacagccagcagggtgccccaggcgccggacctggtccagctgatgcttctgctggttcagcggcgggcacttctgagaagccaggtgacgatggcgatgtaatagacgcagatttcactgacagcaaatgagtggcatgctaggtttagatgaggctgttcgctggggatgttttgccgcgagggagagatttgttttgtaggatgtgggtgtactttttggtagatttgcacctttgttcccatttggagttcggatgaaggtgagttagggaaaggtcgggttttaactgtcaaatgaatgtacataggcctatttttcttttgtgccttgccttcgaccgttcgacgttcgacctagttggtgtttgtttcaacccgttttgtcagaacccggtttgtgagactcgttttgacgagttttgatgaaaatcgtttaaaatcaaattgtatgtataaaaactacagcaaaaaaacctgtaattttataaattgtctacaataaaaagaaaaatcagataactaaat

SEQ ID NO: 130019 - DNA, 900 bp, Zea Mays
atgatcatccagtcctttaagaatcaaagtgttaatcagcaagctggctggtttagcgtttatgatctccagcaggagaagaggcaacaaattctgaatgagatgagaacattatgtgaagcatgttgttatcctggtttagttgaattccagggtgcattttacatgcctgattctggacaaataagtatcgctcttgaatacatggatggtggttccttggcagatgttataagggtcaagaagtctataccagaaccagttctttcacatatgctacagaaaggtctgcgatacttgcatgaagtaaggcatctagtgcatagagatataaagccagcaaatttactggtaaatcttaagggcgaggcgaagattacagattttggtgtgagtgctggtttggacaatacaatggctatgtgtgctacctttgtaggcacagtcacatatatgtcacctgagagaattcgtaatgagaactattcttatgctgctgatatttggagtcttggactaacaatattggaatgtgctactggaaaattcccatatgacgtaaatgagggccctgcaaacctaatgttgcagattttgctagttgaatgcatggatgggtcatcaggtgagagctgtctcgttgagtcactaggtcgtgggttcgaagcaacctctccgcatttgcggggagagaaagatgctgatgcaaggcccacatgtgagcagcttctgtcacacccattcatcaagaggtatgcaggaactgaagtggacttggcagcatatgtcaaaagtgtagttgatccaacagaaaggctaaagcaaatagttgagattaatgtaggtttggtgacattctttgtccctgaaattagcccatcccatttctcaattctttaa

SEQ ID NO: 130020 - DNA, 967 bp, Zea Mays
ctcccttgctcgcccagccagcggaggttctcccatggtggcgttcccagccgcgccctcgagctccttttccctggtgcgtggagcgtcctccttgctcctcagctgcttgctcgccctctgcgcgatgcttcctgcacgccgcgacctcccagctcgccagcgcccgaccccccccaacgccgctctctcgccgtggcctctccctgcgaggacaccagccgagcgccctaccctgccctgccttccactaccgcgtctacaatttcccattcgtcttcagctcgcggcgctcctcatcttcttccccaagccgggactcccgtcgtggagcttccctggaccccagctcggatctcccatggccgtcgcgcgccctccttcttgctcggccggccgccctcctgctagtcgccctgctcggagctccctttggcgtcttcctccctgcgtccattgcttgcttcccctgtttctcctcccaatctgtcgtctctgcctctaattcctggcatcattttccaaaccccgctgctccgctttcctctcttgtgctcgctgtcccacagctcgaagccgacgaggtggcctcagcacacgcgcgcgtaaccatggcagctgctcatagtggcactgttgcgtattcatatgagaaagttgagtttctgaagcttcaaaatggcagtgatattcgtggtgtcgctgttgttaggactgaaggtgagccagtcaacctcacagaagatgtcactaaagttatagctgcagcttttgttgcatggctattaaacaagaaaccagatggcttgagacgtttaagaatctctgttggacatgattcacgaatttctacacatgaattgcagaatgcagtcactcatggaatcactgctgctggacacgatatcctatagtttggattggcttcaacacctgtaatgttcaacagtacacttatagaaggtga

SEQ ID NO: 130021 - DNA, 207 bp, Zea Mays
atggcgctggcgcccggcgagagcgggcgatatcgtctcgctctcgcccgcgctggagcgtccgcccgggcgagaggcgggcgagagggaggcgaggcactggcggggcgagagcccggcgagagcgacgtggcgcgatctgactggtccacgtgtcgcgatctgattggtccacgtgtgctagccgttgcaactagccgtttttga

SEQ ID NO: 130022 - DNA, 1029 bp, Zea Mays
atggaggctgatgagtgtcatacaaaagaaaagcaggagttatgtggtatcattaatgataaaggaatgatggttgataagcttcagcaacgcatcgttgtgctagaagaggaaaacatggtccagaaacttgatttgggaagtcttatcaagatggagtatgagaagtctattcatgaagtgaagaacaggtactatgaaattgttgaggtctccgacaaaaaacttctggagctggaagaacggattagattctttgagcagaaatttgcatgcagggagcaggagctcatggaaatgtttaatcaagagaaagcagatcggtatacactaatagcagagaaagaaattgcaatttctgatattcaacaaactgttgaatctgttcaggttgacatcgagcaccttcttgaggctgcagcaacaaaagtggcagaagttgagctagaggtgaatcaactttatggttttgcagaaactctgaattcacttaacgtcatccaagggcatgatactgttttcaaggatatgctcattgcagagtgcgaaagagaacttgactccctgcaggtgagtttattgcaagagaagcatcagtcaagaaatttgaagaatcttatggaacaactcaaagctcgcactgcttctgaaatgtcagaaaaggcaaagcagcatctggaagttgcaaacaagctgaaattgttggaggaaagaaatgaaacattagaagaacacgtacgagagctgaagtctaagacagctgatatgtctgttgttgtacttcaagagaggaatcagttggtcaatgagctgactggactaaccgataccattggggaggtaatttatggaggtgaaagtatgatgtcaaatttgagaaggatctcgcagaaaattaatgaggaggaaccatgcaatgataggcttacctcagagaaaactaacgatagaagttctgcacctgtgattaggaagaaaccaaggcatgacccagttagaagatcgcccctgaaggagcaaaactactag

SEQ ID NO: 130023 - DNA, 1422 bp, Zea Mays
atgcaaacaacctctcggcctcatcaggcccgctgccctccacctccgcctccgccgatcccctccgctgaatcgaatagaagaatcgagcgccgctactggcgaggggctagcggtcggcgcacagcgcggtatggcgagcggcagcagcaacggggagccaagcacggcaccgcaggcgaaccggtggtacgacctccggctgggctcttcctgccgtgacccctcccccaccgccaagttctgcaccctccgttatgaatttaagccagcatcaattgacaagacacaagctgggtctctgcaaagcaccaaagataaccgggttactgtggaattccataataatcagcctggcaagccaaaggtgacatttgagggaagccaagaagagtacaaggataatgatggtgtcttattttttgatggtgagacctttcgcttagagaggttgcatagggctgtcaagaggttaaggcatgtccgagttccaggagagtctgcagcacttaatttggctggtacaactactggagtgggtgcagaatcacagtctcctccattacctaaagtcagcaagtcacagaccatgagcaaacctgctgttcactcagttccagttgaggttgagcgtattgacattggtgaaccagaaaatccaggcccgaaatacaacagcaggagtacatatcaacctgttagcatagacccatttgccctttcacctgatccaaatgagcaagagaaccttgacatatttggtgatgatgatggcaatgcttcaccgaataacttggcctccggagaaggggcacctgctcgtggttttgacatcaacttaccaaatcaagacaatatggatgatgaaattgctgatgtagatgtaaatgatgaggcagatgaggggctcaatgcagccgatgcgctgcgagctcaagtgaacgcagaggggcagcaggggcaggacagctcaagctctagtggaaccagcagtagcagcagcagcggaagtgggagcggcagtggaagtgggagcagcagcagtgacagcgatggtagtgatgccgattcggcaagctccggaggtgatgttgatatatgagcttgataatgcaagcttttgttttgacagatgccttgcttcacaatttttggttcacaagggaggtgtagggtatgtatatgttcagctaatattgctccggtcagtgagtgcattaaatttccgcaattcatggcgggcttggtctgttttatgtttgttaaaacctgggctggaagaatagaaatctgtaaacatatctgtacaactatgtctatgtgcttatgtggcattgctgttaccttggatgatggatgttacaacattgttcagttgaaatgacaaaaggtataaagagtagtgcaagcaggccttaatgc

SEQ ID NO: 130024 - DNA, 1347 bp, Zea Mays
ccgaatgcgatgcgagcgccgagcagtgagcaatgccagatctggagtggtacaccgcgccgagcagtgagcaatccccgaacccgacacggctcggcctgccggctgccccgagcccccgaagtccggttcggctcggccgttcccctcccattcttctcgtacgcgatcgattgcgagttgcgcccctcgccctcgccccccactcgcccagtccctcgcaggcgcaccaccgaaactgctccgcctccacgcccgctcgcactgaccacggcgatggccgccgccgccctccgctcctccgcgcgccggctcctgcgcctcgccccggcagcctcgtcggctctgtccgctggttcccggcccaccgccggggctgcgccgctcacgcgccccatcgccgcgctctcaggtggcaacaatcctatctcatggaaactgagacggttctacagttcaaatgaaaaacacttgcccgcaatatctgatccagaaatagaatctgcatttaaggatttgttggctgctagttggaatgaacttccagattctcttgtagcggaagcaaagaaagcagcatctaaagccaccgatgatagtgctggtcaagaggctttgaaaaatgtatttcgtgcagctgaggcatgtgaagaatttagtggaactttggttaccctaagaatggctcttgatgatctttgtggcctgactggcgaaaatgtgggtcccttacctggttatattgaagatgctgttaaagctgcatataatcgctacatgacatatctggagtcctttggtcctgaggaaaactatctaagaaagaaggtggagactgagttggggacaaaaatgatacacctcaaaatgcgatgcagtggcataggttctgagtggggaaagatctccctgattggcacctcagggatctcaggttcctatgttgagctaagggcatgatgggacgtctgcaggtaaccatggaaatcatcgatgagctgaggaagtctgtagatcagaatatgccagtactgcattttcctttcccctttctagctagcatggcaataacaatgagatcatcaaacagcggcgcggtttaaggaacttcagatactcccggcccttgtgtctgtgtctttgtctgtaataagaacgtgtatatgcgtgaaacctatcagttctgttattttttggcatgcgcctgacttcttgttcaactggtgtgagttgtatgctttgttcatgaagcactgatcaatgatcatatgccttcgcccgcaacagaacttccttcagcactgcaaaaatacagtgacctgccatttttttatgaaagggtttaac

SEQ ID NO: 130025 - DNA, 1357 bp, Zea Mays
actatttgagaaatcatgaccgaatgcgatgcgagcgccgagcagtgagcaatgccagatctggagtggtacaccgcgccgagcagtgagcaatccccgaacccgacacggctcggcctgccggctgccccgagcccccgaagtccggttcggctcggccgttcccctcccattcttctcgtacgcgatcgattgcgagttgcgcccctcgccctcgccccccactcgcccagtccctcgcaggcgcaccaccgaaactgctccgcctccacgcccgctcgcactgaccacggcgatggccgccgccgccctccgctcctccgcgcgccggctcctgcgcctcgccccggcagcctcgtcggctctgtccgctggttcccggcccaccgccggggctgcgccgctcacgcgccccatcgccgcgctctcagctcaggtggcaacaatcctatctcatggaaactgagacggttctacagttcaaatgaaaaacacttgcccgcaatatctgatccagaaatagaatctgcatttaaggatttgttggctgctagttggaatgaacttccagattctcttgtagcggaagcaaagaaagcagcatctaaagccaccgatgatagtgctggtcaagaggctttgaaaaatgtatttcgtgcagctgaggcatgtgaagaatttagtggaactttggttaccctaagaatggctcttgatgatctttgtggcctgactggcgaaaatgtgggtcccttacctggttatattgaagatgctgttaaagctgcatataatcgctacatgacatatctggagtcctttggtcctgaggaaaactatctaagaaagaaggtggagactgagttggggacaaaaatgatacacctcaaaatgcgatgcagtggcataggttctgagtggggaaagatctccctgattggcacctcagggatctcaggttcctatgttgagctaagggcatgatgggacgtctgcaggtaaccatggaaatcatcgatgagctgaggaagtctgtagatcagaatatgccagtactgcattttcctttcccctttctagctagcatggcaataacaatgagatcatcaaacagcggcgcggtttaaggaacttcagatactcccggcccttgtgtctgtgtctttgtctgtaataagaacgtgtatatgcgtgaaacctatcagttctgttattttttggcatgcgcctgacttcttgttcaactggtgtgagttgtatgctttgttcatgaagcactgatcaatgatcatatgccttcgcccgcaacagaacttccttcagcactgcaaaaatacagtgacctgccattttttta

SEQ ID NO: 130026 - DNA, 1328 bp, Zea Mays
ggaagtcgctgcgacgaagaacaagtcttgtcgatactgtgaaagcccgctttgtcttggaatcagccaacgatcacgacagtgatatggatccagctcgtagtatattcagaaagttgacaacttcacccgatctttttttttttgaaaaaaaaataagtctacgctttggctttcggggataaaaataggttcttggacgccaattttaccagataatatatgccatacttatgtcaaatgtggactagttcgtgcgtgcatgctgatcacgtcaacacgcatggtgccagtgcgctcactcactagtcagtgcttgatttgcggttgcaatgtcaaatacaggcgagcggttcacggagatcgtgggcagcccgtactacatggcgccggaggtgctgcggcggagctacgggccggaggtggacatctggagcgccggcgtgatcctctacatcctcctctgcggcgtgccgccgttctgggccgagacggagcagggcgtggcgcgcgccatcctccgcggcaacctggacctgcagcgggagccgtggccgcggatctccgagggcgccaagagcctcgtccgccagatgctccagatggaccccaagaagcgccccaccgcgcagcaagtgctcgagcacccgtggctgcagaacgcgcggaaggcgcccaacgtgccgctgggcgacgtcgtccgggcgcgcctgcagcagttctccgctatgaacaagttcaagaagaaggcgatgcgggtgatcgcggagcacctgtccgtggaggaggtggaggtgatccgggacatgttcgcgctcatggacaccgacaaggacggcagggtgacgctggaggagctcaaggccgggctcaggaaggtggggtccaagctcgccgagcccgagatggagctgctcatggaggccgctgacgtgaacggcaacggttacctggactacggcgagttcgtggccatcaccatccacctgcagcggctctccaacgacgcccacctccgcaaggcgtttctcttcttcgacaaggacagcagcggctacatcgagcgcgccgagctggccgacgcgctcgccgacgaggccgggcacgccgacgaggccgcgctcgacaacgtcctgcgagaggtcgacaccgacaaggatgggcggatcagcttcgaggagttcgtggcgatgatgaaggccgggacggactggaggaaggcgtcccggcagtactcgagggagcgcttcaagaccctgagcaacagcctcctcaaggacgggtcgctccgcatggcgcgatgaccagagaagagaacgatgcttgtg

SEQ ID NO: 130027 - DNA, 1755 bp, Zea Mays
ccccaagccgagccccccacacctgacagaaaagcgccactaaaaccctagccatccgccatgtccacctccccagccgcctcatcctccgctccgaccgccttcgccgcctctgcggttacgatggctgccgaggccgccgacgggccggtgctcagcgtagtatcgaagcgtctccgcgcgctgcggaagaagtacaatcgcatcacgcagatggaggagtcgctcgccgccggcaagtcgctcaaccgagagcaggaggaggttctccgctccaagcccgtcgtcgctgctctgatcgacgagctcgagcgcctccgccccccgctcgcatcagctctcgcggaggagctctcctcccgctctgcccccgcccccgccgccaccgcttcctcctccgactcagattcgtcagtccaggacctcctcgcgctcgtctactttggctccctcttcgatgtcaagcaacaaagcgacttcgtctctttggtatacacgcgcgagctcgagcggagcagctgcctcacttatgactacgtcggggatgatccggaagacagtctcgtggagaccgatctgaacgccgtttctgcccttgccaccctcgcggcgtcgcgccctcctgctgcagctggagtctctcaccgtgatgccctccaggcttgtgcccatcacgcccgcctctggctcagccgtgcggatgaacccatccaccctgactccaccatcacatatgctggggtgagggcaaagctggatagaatcatggcatcgggctactacacagctcagctagaaatgaggacaccaatggatctggctgctgcagtggcaaactttggagccggaggtgtgcaggtgcaagagagcatggttgtgtcgcctcaggcactggaagcagtcgaggagagccaggatgttgaagaacacaaggacgagaaggaagattctgaggctacagaaatctacagtgagcatcaggctcctgttgttgacgctgaacatgtggatgatgaaggcctggtgaacccagctgatgaagttccttcagctgaggcagagcaggagacacttgacgattatgtggacgatcaggaacaaaaagaccaacaattcacccagcggcgctcttaccagaaccagcgtagtggcggtggtcgtggtggtggcaggaggggctatcctaatggtcgtggagtgcgtgggtaccagaatggccgaggtggcgggtaccagaatggccgaggtggcggtggataccagaatggccgtggcggaggcggtgggtactacgaatctggatactaccagccgaggaactacaacaacagaggccggggtggtcgcaactcttattacaacaaccatggtggaggtgcacaggcaggcggccatggccatcctgggagggttgagctgggtgcaaacgcctagctcgagctgactgttttgtttgaggagcagaggtcggggggagccattttgttattatagaactaactgagcctgttatttcttttttgctactcgcatatggaaatgctttggggaagtagtttcaggtcgactttgttcttctaagttacgtctattaatcgtgttaatatgcccttatttcttaattattatactctgctggaggcgtcgatgtcgtcaccagattgtcgttatctgctatgttctatcggaccttcgcagcatttaacggtgactgttggcccgttgcttgtcctcgaagttttctgttgcgacgtt

SEQ ID NO: 130028 - DNA, 283 bp, Zea Mays
ctcgcgctcgtctactttggctccctcttcgatgtcaagcaacaaagcgacttcgtctctttggtatacacgcgcgagctcgagcggagcagctgcctcacttatgactacgtcggggatgatccggaagacagtctcgtggagaccgatctgaacgccgtttctgcccttgccaccctagctcgagctgactgttttgtttgaggagcagaggtcggggggagccattttgttattatagaactaactgagcctgttatttcttttttgctactcgcatatg

SEQ ID NO: 130029 - DNA, 1761 bp, Zea Mays
attggctggccaccgcctgtagccctctcctgatcttcctctcgcctccctcctctgcctctgcgcttcacttcaattctcctcctcgccgagcgggagcgccgagagagatgcgaccgcgatgcccccactcgtcccctcccagctcctaccaccaatcccaaccctgatcctacccgcgccacctcgcctctcctgccgccgccgccgccacccgcccgcaccgctcgccgcgtcgtcgtcctcctccgcgtccccgcactccaggcaaccataccgccgccgccgccttgaagcccagcggcagacaccgacgcctgcgccgcgcccgccctcccagccaaagccgcctccgcgccacgcaaatgccaccgcgtcccgcgctcggggccaggaggagctggaggcggcgatttacgacttcatgtgccgctccgccaagccgggagccggaaacagaggagaccaggttcaaatcaggaatcgaggggatgctcaccaggctgcagaaggatagggagcaagcgcggccacctccacggagtagtacccacgacacacgggaacaaagtgatgatgatgctttagctggcaacagtggcgctcctagtcatatagcggctggcggcagacatattcgaagggtacctgagaatggaagtgtccgtggatctcattatcaaaatggaataatagagggcaacaacaccttagagagttcgagcaatgatgcatggaaaacatggacccttggcaagggtggtttatctcattttgaagtggctgaggtcctacctactgaaagaagaaaattatcccaacatggtgacattgcatctgtgcaaaatgatgttcaaaggtcatctaatggtgtggctgtaagtgattatcctagtgatggtgttggcactgaaagagatgagatacattcacgtcttcaaagtctggaattggacctttcttctgctctgaagacattaagatcaagatttgataaagtcttatcacatatgtcaaatagtaatggagcaactgtgctagatgacatctctgatgattgggaacttgaggagacaaaggtaatgcaagctcaggaggagcttagatcaatccgggccaaaatagctgtgttagaagggaagatcgcacttgagataattgaaaggaacaaaataattgaagataaacaaaggaggcttgatgaagttgagaaagcactgaatgagctccgtactgtttgtattatgtgggccaaccctgctacagatgttttgctggttgggtcctttgatggctggacaagccaaagaaagttggaaagatcagaaaacggcatgttttccttaaatctgagactgtaccctggtagatatgagattaagtttatcgttgacggtgtttggaagaatgatccgctgcgacccaccgtgcataacaatgggcatgaaaacaaccttctgcttgtcacttgacttgaagtttgcacccggtagcatttttgtagatcatttgcctagcaccttgtcggtcccccatgtaactaatcaactttcccttcaattttttctttcttttctagataggtgtgtgcaacataaacagtgtagggtgttattgaaacctgttgagataggagaaggaagtagatgcatattcttttgttcccatcgttctccccggtgttggtccagcttcatgattttgtttaacaatgttgtgatgtacatatgcagtgaggtggtctattatcgaaattatttc

SEQ ID NO: 130030 - DNA, 1306 bp, Zea Mays
ctccccccatcctccccgccacctctcaccccccgcaagcgagtcagccaagccaagcgacgcccaacccccgcctccattcccgggccggagacgcgcctgcctggccgcgacgccgccagccatgggaatggggccgctcgacaacgccgcgtcggccgcgctggaggccgccgccgccgccgccgccgccccctcgcgggcgggctcgtacgcggtgctgcagtgcggcgaggactcggagtacgtgcggcagaagtacggcggctacttcgccgtcttccgcgcgctgctggaggaggacggcgagaggtggcgggtgtacagcgccgtccgcggggagctccccgccgacgccgaggcagccgggttcgacgggttcgtcatctccgggagctgcgccgacgcgcacggcgacgagccctggatcctcgcgctcgtcgacctcacccgccgcgtccacgccgccggcaagcgcgtcctcggcgtctgcttcggccaccagatcctgtgccgggcgctgggcgggcgcacggggcggtcggccaagggctgggacatcggggtgagctgcatccacccgacggcggcggcggcgcggctgttcgcgccgctgaagctgcccgtgcacatgccggtgatcgagttccaccaggacgaggtgtgggagctgccccccggcgccgaggcgctggcgcggtccgacaagacccgcgtcgagatgttccgcctcggcggccgcgccatgggcgtccagggccacccggagtacagcaaggacgtcctcatgagcatcgccgaccgcctcctccgccacaaccacatactggactgccaggtggaagtggccaagacgagcttcgacgtgcggcagccggacaaggagctgtggagcaaggtgtgcaggggcttcctcaagggaaggctccagtcgtcgcagcagcaaggtgtggcgctatagcaggaggaaattgggggggcattggatgcctaggttaatccgtcatattgtttgttttttatatatcaagagttgtacagaaactgctatcgtcgtccgaagcattaataaaaaaaaggagggaaaaaatagttcgttggtttggttccatctttccgtggcaccagttcattctcgtagtgcctttgcatccacttcttttctttgtaacacacgttgcatatgctgcttgcatcttcggctcatttgtggactcaaacaaaacgactacgacagcgctgtccgcttaccgtcggggtatctgtcgttggaactgatttttacggaggacaaaaaaaaatacaa

SEQ ID NO: 130031 - DNA, 1056 bp, Zea Mays
attgcttttgggatgacgatgctactagcgtaccaacccagcagctcaggggatcagatcacgcccaagggcgtgcgggtagcgcccaagcccaagcgcacgcaatcgcccgcgcgaaccacgcttttgtcagagacgtgcctcgacgcgtgaggacgtactgacctcttctcctaattattacttggttctatgttaataacactcgcaacttcaaagagctcttacactgtcgctgtccctgtggtccgagagccagagccttggatttggattgctcttgtggccgcgaagtcttccgtcgtcgtactcgtacgcaggaacaggagacaccaattgtttagcagtggaatcctaggaggttcccaatatcgtactacaaacagaagggggacagtctgtgtgcacatgaatcaattacttggcgtgttcccgaagaaaacgttttagttgcgtccatcggccctgtcggtggtggggcgccgatgccaggcagacttgcacgcgtccacgttacgcacacgtacctctaaactcctgtggctactacacttccgtcttaactcctgaagctgtttgattgcggcacgcagatcctgtgccgggcgctgggcgggcgcacggggcggtcggccaagggctgggacatcggggtgagctgcatccacccgacggcggcggcggcgcggctgttcgcgccgctgaagctgcccgtgcacatgccggtgatcgagttccaccaggacgaggtgtgggagctgccccccggcgccgaggcgctggcgcggtccgacaagacccgcgtcgagatgttccgcctcggcggccgcgccatgggcgtccagggccacccggagtacagcaaggacgtcctcatgagcatcgccgaccgcctcctccgccacaaccacatactggactgccaggtggaagtggccaagacgagcttcgacgtgcggcagccggacaaggagctgtggagcaaggtgtgcaggggcttcctcaagggaaggctccagtcgtcgcagcagcaaggtgtggcgctatagcaggagg

SEQ ID NO: 130032 - DNA, 1118 bp, Zea Mays
ctccccccatcctccccgccacctctcaccccccgcaagcgagtcagccaagccaagcgacgcccaacccccgcctccattcccgggccggagacgcgcctgcctggccgcgacgccgccagccatgggaatggggccgctcgacaacgccgcgtcggccgcgctggaggccgccgccgccgccgccgccgccccctcgcgggcgggctcgtacgcggtgctgcagtgcggcgaggactcggagtacgtgcggcagaagtacggcggctacttcgccgtcttccgcgcgctgctggaggaggacggcgagaggtggcgggtgtacagcgccgtccgcggggagctccccgccgacgccgaggcagccgggttcgacgggttcgtcatctccgggagctgcgccgacgcgcacggcgacgagccctggatcctcgcgctcgtcgacctcacccgccgcgtccacgccgccggcaagcgcgtcctcggcgtctgcttcggccaccagatcctgtgccgggcgctgggcgggcgcacggggcggtcggccaagggctgggacatcggggtgagctgcatccacccgacggcggcggcggcgcggctgttcgcgccgctgaagctgcccgtgcacatgccggtgatcgagttccaccaggacgaggtgtgggagctgccccccggcgccgaggcgctggcgcggtccgacaagacccgcgtcgagatgttccgcctcggcggccgcgccatgggcgtccagggccacccggagtacagcaaggacgtcctcatgagcatcgccgaccgcctcctccgccacaaccacatactggactgccaggtggaagtggccaagacgagcttcgacgtgcggcagccggacaaggagctgtggagcaaggtgtgcaggggcttcctcaagggaaggctccagtcgtcgcagcagcaaggtgtggcgctatagcaggaggaaattggggggcattggatgcctaggttaatccgtcatattgtttgttttttattatatgtgcttcagaactcaagagttgtacagaaactgctatcttcgtccgaagcattaataaaaaaaaaggagggaaaaaattgttcgttggttt

SEQ ID NO: 130033 - DNA, 877 bp, Zea Mays
ctccccccatcctccccgccacctctcaccccccgcaagcgagtcagccaagccaagcgacgcccaacccccgcctccattcccgggccggagacgcgcctgcctggccgcgacgccgccagccatgggaatggggccgctcgacaacgccgcgtcggccgcgctggaggccgccgccgccgccgccgccgccccctcgcgggcgggctcgtacgcggtgctgcagtgcggcgaggactcggagtacgtgcggcagaagtacggcggctacttcgccgtcttccgcgcgctgctggaggaggacggcgagaggtggcgggtgtacagcgccgtccgcggggagctccccgccgacgccgaggcagccgggttcgacgggttcgtcatctccgggagctgcgccgacgcgcacggcgacgagccctggatcctcgcgctcgtcgacctcacccgccgcgtccacgccgccggcaagcgcgtcctcggcgtctgcttcggccaccaggtgcccatcccatccgtccatgtttggttcgacttgctgtttggttgggtttaggtgcggtgcggttggttctcgtctagtcccttccgcgcgtagctgggtttctccgtcgtcgctggtgaatcacgggaccgcgggacgctgcgggcaccacctggtggggctgccgctcttctagcctagcgccttcccgtccacccggcgcaccttttcttttctattattttctttctttttttttacggcgacccgtggtcgttcttgatgcattttgactagtacaaacggtactggctgcttaattggtgagcagtagcaatggggacggaaagatgccttattttttttccccagagaatgacaaaggtgact

SEQ ID NO: 130034 - DNA, 1220 bp, Zea Mays
gtcgcgctagaattcagtctcgtcttgctcgctcacgcagttggcactcgtcgcggcagtcggcgctgtcccctcccctcccctcccgccggtcgctgcagtcggcgcccaacccgtccctccgtccgccagagcacatctcacgctgcgggtcgaacagcccgaacgtcaatcaggtttcaggccgacggcggcacgatgacctgccccgccgccaccgccaccgccaccacggctcgcatcggggcgcggagaggaccgtgcctgtggaggagcgagaggagggccagcttcctcgtccgttccacgtccctgctcccggaccgcccggcccgggacacgagggcgcgcgccgcctcggagctgcagcaagcgcctcgaccagcctccgctaccgtccccgctcacaaggtcaccgtccacgaccgccagcgcggggtcatccacgaattcgtcgtgcccgaggaccagtacattctgcacacggcggaggcgcaggacatcaggctgccgttcgcgtgccgccacggttgctgcacaagctgtgcagtccgaataaaatcaggacagataaggcagcctgaagcacttgggatatctgcagaactaaaagataagggctatgctttgttgtgtgttggtttcccatctggcgatgttgaagtcgagactcaagatgaagatgaggtatattggctccaattcgggagatactttgcacgagggccagtggaaagagatgattacgcgctagaacttgcaatgggagacgaatgagctgtgcctaagagaccttgccatctaaaatttgaataccatctcaaatttggacccatgtagttctgagtatgccggttatctttttgtggctccaaatctcactctcagccttctttccttcggctgttagcgtttagagtgacaaggacacttcctgagaggaggaataaagttctgctctgctctctattttccaggttgcccccttcccgcctttccttgttcggttgtcacttattagcctggtgcgttgctgcgtgcagttctcgtttctcctctaatagatggcacacgttatgaagtgtgtaaaggtgtcaaaatccaaaaacatccagcattcacaatctttgtcgtgatgaagtgtgtaaacttgtaaaaaattatccaaaatctttaccatgaagctacgagtggctaactagggctggttgaagttgttc

SEQ ID NO: 130035 - DNA, 120 bp, Zea Mays
ctttttttaatcaaaatctacaatctcataatctgcgtatccaaacactcagattctaccgaccagcttctgtccacagcagccgaaccaaacacctagattctaaccaccagcttttcc

SEQ ID NO: 130036 - DNA, 402 bp, Zea Mays
atgccatcgcacgcggatctggaccgccagatctcgcagctgtgggattgcaagttcctgcctgaggcggaggtcaaaacgctatgcgagcaggccaaggcgatcctcatggaggagtggaacgtgcagcccgtgtgctgccccgtcactgtctgcggcgacatccactgccagttctacgacctcatcgagttcttccgcatcggtcagtccctcccgcctatcctagcccctctcgactcgttcttgggcgctcaagctgattatggctcagtggacggggttattgatgctaaatggattgttcaagctgattatgctaaatggactgttcaagctgattatggcttcctcactattgctttatggatcacaaagattctttctggcgttattacatga

SEQ ID NO: 130037 - DNA, 2401 bp, Zea Mays
gtagcagatatgcccactggcatattcttgcataccagaccatctaagccaatgcacaaatttaaaggcaaacaactagcttttcaatggtaacaacatttaagtctgagctgctggttagctgatctcctaggtcaaaccagtttgtcttcccaaaattgcaatgcaaagcatggagggggctgaaagcaatatcacacagacaatggatcaaagggtccacactggtgaggctagcaacaaatttctgttccagcatttgtccttcaagtgcccataaatgataactgaatactgtataaattaccagtatgcaaattttaaccctaaacaaaagtcagcttccattaccggagcacggaaacagttactgccctcaaggctcaaacaataacagcactggtaaaaaaaatgtattacacaagaaagaaattcaaaaaggagagcttaagaaaaggacttgcttgagtttgaaatacaaaaaaagtaaataccaaattttgctgcagctgttaagaaataagcatttgtgtaaaagagttgcagccataaatcattgcaagctctacctagtttaaaaaatataaaacataaaaaagatcaaatttgtcatcaattcactaaatgctgatggaggtagcgggacaaggagctatgtaggcaggtcatatcaacaaaaacaaaacaagccaactgcagtcatgattctatctgcagcaaggatgccaatgaacccaactgaaaacatggccagggcagtgaacacaaccaaacactaataatgaaatgatgatttctgttgcatcttataagccaatcaaatcagttcaacccactacagcagtaacatatgcagatctggcaatgacctccaacttcatctatcaatctgtgtcatgagcattgtccctgttgttgttctctacaggtgcacacaactcttgtgctggctgagcagaatgcccacagatcagaaactaaggaggcatgacaggtgttgttcatccaattctaccaaagaaatcattagtaacatctcctctctttcatcagaccacagaattgaactaagaaatagcagaacaccagaaacagtagaaccaatggctgttctccatttatttaatccaatttcacagacaaagtgctcaaatcaggcatctaactgtggtgaacctcatcagcaattcagctcgggaaagcaacaagtgtcgcgttgtgttccatatctggaaatttgccgctcattcagcctcggcaaacaaagaatggccaagagaacagagaccagttgcaaagaaaaatgcaaaaacaagagcagtgagtattcatgaatttcagagagcaagctatcaacataggaaaataactatgaatcatactagacaaatgacactagacttagttctttagtctttgagaagctaggatacatacaggatagtatgttcttttagtccatcatgacaagaagcaccgtttcatcattataatttcgataatgaagccaaagaattcgaccttgctacttccaactaagggcatgtttggttccttagtccaagaactaaagtttagttgctgcatgtttggttccatgactaaaagtgttcacaactcatcaaatgacttgtaagaagaataaaataccctttaccattctcgcgccactaccctcctcccgcagcaacagaaaaaaagggggcaaccggtggaatcaatatggtttagagtgaagcagtttagtccttccttcagtcccacgggagatcccacggcaatctagagacaaatacagggactgtaaccaaacagaacctaaagaagaaaagtatttttcgctcaccaagttacgcctctttctgaacaacggaaggaataaaggtgaacagaaatcgcaatcctcttcatatgcaaaacaaacatcccccttcgactgtaaacataaggaatctacagatccgtctttccacctcacccaccgcacgccaaccatcatacccaagtacccaacaattttgcgccgcgggcaacatgaaactgatagatctagcaaaattacccgggggcgggcatgagcactaacggagacggacggggaggaacgggtacctgaacatcgacgaccttgccgaagcgaccaaaggcgtcctgaagcttgcgctcgtccgtttgccacgacaggccgcccacgaagatccgaccttcctccttcccctccatcgccgccgctcgaccaacggattggagcagagataggcaggagcaagattagggtttggggagaagaggctgcgagaggaaataggtgggcaccggaccggacaccgctagcagggcttggttcgattttttcttttctttctctttctttttataagggttgattggttgccaactt

SEQ ID NO: 130038 - DNA, 1275 bp, Zea Mays
ttgcataccagaccatctaagccaatgcacaaatttaaaggcaaacaactagcttttcaatggtaacaacatttaagtctgagctgctggttagctgatctcctaggtcaaaccagtttgtcttcccaaaattgcaatgcaaagcatggagggggctgaaagcaatatcacacagacaatggatcaaagggtccacactggtgaggctagcaacaaatttctgttccagcatttgtccttcaagtgcccataaatgataactgaatactgtataaattaccagtatgcaaattttaaccctaaacaaaagtcagcttccattaccggagcacggaaacagttactgccctcaaggctcaaacaataacagcactggtaaaaaaaatgtattacacaagaaagaaattcaaaaaggagagcttaagaaaaggacttgcttgagtttgaaatacaaaaaaagtaaataccaaattttgctgcagctgttaagaaataagcatttgtgtaaaagagttgcagccataaatcattgcaagctctacctagtttaaaaaatataaaacataaaaaagatcaaatttgtcatcaattcactaaatgctgatggaggtagcgggacaaggagctatgtaggcaggtcatatcaacaaaaacaaaacaagccaactgcagtcatgattctatctgcagcaaggatgccaatgaacccaactgaaaacatggccagggcagtgaacacaaccaaacactaataatgaaatgatgatttctgttgcatcttataagccaatcaaatcagttcaacccactacagcagtaacatatgcagatctggcaatgacctccaacttcatctatcaatctgtgtcatgagcattgtccctgttgttgttctctacaggtgcacacaactcttgtgctggctgagcagaatgcccacagatcagaaactaaggaggcatgacaggtgttgttcatccaattctaccaaagaaatcattagtaacatctcctctctttcatcagaccacagaattgaactaagaaatagcagaacaccagaaacagtagaaccaatggctgttctccatttatttaatccaatttcacagacaaagtgctcaaatcaggcatctaactgtggtgaacctcatcagcaattcagctcgggaaagcaacaagtgtcgcgttgtgttccatatctggaaatttgccgctcattcagcctcggcaaacaaagaatggccaagagaacagagaccagttgcaaagaaa

SEQ ID NO: 130039 - DNA, 1137 bp, Zea Mays
gacaaacaatcactgagaacctcgactccactataactgcaggacgcacggcatgcacaactgaaacatccggaccaacaggcagagtagtagcccaaaggatgacccgtctcatgcaaaaacagtcagcttgataaacttatcgagaaggcaacaacggcgcccaagtactggttgaaatacagagcagacattgaagtgccaaagaggggggtaaattaggcatcttccatagcccattaaacattaagctatgcagaactgcaaaaggctaaactacaagaccaggggctcgagtctagaggcagttcatcagtggcgttcatcaaaacgacctcctcccctgctagggcgatcatatggcccaggcctctccctgtaacttccaccatcatagcgtgcaggtcctccaccaccataacgatcagcaacaccaccgcgtgggccatccctgacatagccaccacccttgccgcctctagggccatccctgtcatagcttccaccacctcttgagccactcctatcatagccaccgccgccacgaactccatctctctcgtaacttctttctcgttccctcccataaccattcggtgcgtaccgatccaggccacctccatacctgtctccgtcaaagtgatcgccaccagcggggtagcgatcattggcataacgatctcggcccccaccatacttgtcccttgcatcaacttgatcacggtacccataacgaccaccatcataacgatcatccatgtaacgatcattaaacctatctgatccagaaaagcggtctcctctgccaccaccactgaacttggatgggaatctgccagaacgaccaccagcagcactagggcagtcacggacccaatgaccaggacggccacactcatagcaattgccagggggtggaccatcacctctaccacctcgatattctcctcgtccaccgccactgtcgaaccttgtgtcatctgtattcatcttaggctcagccttgttcactgagatggtacgaccatctaactcttggccacgcatctctttgatagcgctgtcaactgcccttcgatcttcgaatgtcacgaagccaaagcccctgtggcggtatgtgtgtctctccagcatgat

SEQ ID NO: 130040 - DNA, 995 bp, Zea Mays
gccctaaactcacaaggccatctcacagaccgacaacgccctaggcaagcagcaagcgcacacgtaaacgtacacctacctcggcgagcaaaagggaaaacgctgatcggagcaacgaagcccgcagccatgccgacggcgacggccacggccacggcagctcctcgccacgcggcgctcttcctgcccctgctgctgctcctgctcggcctccacgccacgtccgccgccgccgcgcgcgcgggcgtcgccgtggacgccgagctcacgtccaccaagccgtccccggtcccgaagaagcccagcgtgaagccgcccggccccggcgccgcgagcccgaccttcccgggcttcggcatccccgggatgggcgggttcggcatccccgggatgggcgccggcgggtggggcggcggctacggcgggcccgccggcgggtacgcccgcggcggcgtggtggcgcccaccgtgacgtgctccgagaaggggccctgctacaggaagaaggtcacctgccccaagaagtgcttctcctcgtacagcggcgccggcaaggggtacggcggcggcggcggcggcggcagctgcaccgtcgactgcaaggtcaagtgcacggcctactgttgattcgactcgtccgctgctggcgcgtagcggtttggcagtgggcggtgctagtggctggcggtggcggcctgctagctgctgttggtgtgatggcgcgtgtgcgtgtcggtgagctgagtaccgggtggttaacttgtgttatcatccccaatagtatactagcgtacttctcgttctggggactatttatacgtagaccacgatatgcgtaggggcggtttatttctaagataagaatataagatgctctgtttatggtgtttattagtgttataatcatcaaagttgtgttcctgctttggttaagtgataagacgtgcttgtgaaatccagtatgcataaataaagagctatattgtaagtataca

SEQ ID NO: 130041 - DNA, 1972 bp, Zea Mays
ctgaatcgaacagattctaggaacggttgaaatgatacgacatcttctgtgcatggctgagtttctgatatcccacaaggctacagcatgagtttctaacctttggccttggcacaactttagctttaggaatttttctttggagtaggatcggagtgatttctgggaatgttatatttgggccaccgcttcagaagtactgggcagagaagcagcagcaagaggcagcaaaagaaggccaagctggttcaacctgacaaaatgtcctccccttctgcagttacacggagaaatgtgtactcctcggtcctgaactagcatcggcttttgttagcattggttacatttagttgcccaagttttcggcgctggaagaagacaccgtgcaatgcacagaaagatttgaaaaacgtttaaatgctggttgatctcattctgaaatacagtacctttgatgaatgcaccgtgcaagacacggtggagacaccttcgaatgatttcaagcctcctttgaaatacctttgaagaagacaccgtgcaagacacggtattgtagtttgcatatctccgagtgcaggttgatttctgaaatagctagaagtcaggatcacagcgctgtatatcctactatcctagcctctttttcgtggcttccggatcttgctgggccgaccgttcgtctgagttctggcccaaattggcttttccggaatacggctcggccctctccagtacaacctccaccgctttctgaacacgaattagaaaaggacgcgatattgcagaagctcccgcccatttttcaccaatcaccagccctagccgcccattttccccatttttcaccaatcacaagaacctttgcgtcctccggcgaggcggcaaccgccggatccctgaacgtctgaatcctggagtgaaccccgcacaggatggcgaggaaagcgaaacccgccgcccaaggcaccgcggtcgtggctgccgccaccggcgtccagtactggctcttgaagacggagccgggcgagtggtcgtggtccgaccaggcgcgcgccccgggcggcgtcgcgccgtgggacggcgtccggaaccggcaggccatgagcagcctgcgcgccatgcggccgggcgaccgctgcctgttctaccactccggcgccggcgccgcctcccgccgcgtcgtcggcgtcgtcgaggtcgccaggccctggtacgagggcgagggcgaggaggcggtggccggtggcgccgtggacgtgcgggcggtcggggagttccggaaccccgtccctctgggtgtcatcaagaaggcggcgggcgaggtggaggggatgaaggacttcgcgctgctccggcaggcgcggctgtcggtgatgcccgtgccggcgaagatctgggactgggtttgcgacgcgggaggcggcctcgtgcaagacggcgagggtgaggacgaggaagaggaagaagaggcttgattccgcagaccagcaaatgtgaagaagaaccaagttgctcctgctggtgacatgagcagttgcaacttgcaaggcggcgttgtgtgggagtccttttggcctgcaagtgttttgctagctttgacaaggcactcctgtttcttcagtgttcgccgtctcggcgccgaagtgcccaagaaaaaaatgtatttactatttgatctactcctatgtaagttcagtggttcatgtagccaagtagcttggatatctatgaaggtactcgagctgttgcatgctgcggcagttttgcacacacacacgtcggctatacagccatccagattcagataggataggacccaatgaatgtgacccggaccctgacgcagagggctgggctgggctgtgctgggacttggagcagcggcagccggtagtgagctgtggcgcaagctctgcgttttatctgtttcgtcttcaattcgtcccatgttgcctgtcggcgacttgcttgg

SEQ ID NO: 130042 - DNA, 670 bp, Zea Mays
atcctagaagttgtctgggagttctacaaaacactcccttgctctaagcacaactgatggaccactacaaaacactcccttgctcgaatccgctaagcacaggcccaaaccgtccacttggaaactcgaagcccatcctgtctttcctttgcgtcagtcgtcttcgacgcaaggagaattgggaattcaggaatcaggatgcggctctccttcccccttgtcgccggcgccgtcgtgatcggagtgatttctgggaatgttatatttgggccaccgcttcagaagtactgggcagagaagcagcagcaagaggcagcaaaagaaggccaagctggttcaacctgacaaaatgtcctccccttctgcagttacacggagaaatgtgtactcctcggtcctgaactagcatcggcttttgttagcattggttacatttagttgcccaagttttcggcgctggaagaagacaccgtgcaatgcacagaaagatttgaaaaacgtttaaatgctggttgatctcattctgaaatacagtacctttgatgaatgcaccgtgcaagacacggtggagacaccttcgaatgatttcaagcctcctttgaaatacctttgaagaagacaccgtgcaagacacggtattgtagtttgcatatctccgagtgcaggttga

SEQ ID NO: 130043 - DNA, 733 bp, Zea Mays
atcctagaagttgtctgggagttctacaaaacactcccttgctctaagcacaactgatggaccactacaaaacactcccttgctcgaatccgctaagcacaggcccaaaccgtccacttggaaactcgaagcccatcctgtctttcctttgcgtcagtcgtcttcgacgcaaggagaattgggaattcaggaatcaggatgcggctctccttcccccttgtcgccggcgccgtcgtcaactgaataactgaatcgaacagattctaggaacggttgaaatgatacgacatcttctgtgcatggctgagtttctgatatcccacaaggctacagcatgagtttctaacctttggccttggcacaactttagctttaggaatttttctttggagtaggtgtgtgtgtgcattcatgatagcttttatgtggataactgcagatgcatcatttatatttgatttcaatctagatattgtaaaagttgagagcctttcaacattaaagaactttgtggactgcaacatgatcgaacagtgcatggtccttcgattacttcatgtagttgttattgattataaagactaagcgtgtagtgtggacacgagttttttcagtagatcatttgatgaaaacttctcttggaatctgaaactaagggtaacagagtcgccatcatatataaatttgggagttggcaactcatgaagtccagcacccagcgtgcagtatcatt

SEQ ID NO: 130044 - DNA, 883 bp, Zea Mays
gctgctttcagctttcacatgcatcctgggtgtgtttagtccaaggcctcaactgctgctctgtttaacaaatgataaacaagcttgtccttttgccaccaatatcatatttgcaaacacataaacagcgtggaactcgatgcggcaaagagtccaaggcttcgtcgtttgggcaaaaagaatttcacatcaagcaagcctcagattgtacacatcctcctcctctactgtttctactctctctttttttccccttacttctgacgaacacaacaccactcctccagtccagtcctccctcgatcaacaagatgttgctgctgctgccgccaatctacaatgcgaggcgagcatgtcgcacacggtctccctcctgatgtcgtcgaagatgaggacctctatcctggcgccgacctccctgacctcgggctccggctcccgccactgccgcgtggaacgcgacaggtccagctccatcatcgcggggatcctcgagatgtcccccgcgatcttctcccacgacgagacctgctcctcgatggacctgccggttcggaccgtctcctcctcctcggcctcgtccacctccatctcgcagaacttgtcctggaggtcgtagctgaagcatggggaggtcggagtcggaccgaggaaagactcggacggaggtgagctcccggtcccggaggtggatggcttctcgtcgccccctgtcggaagtaacagcagaggaaacaaattagcagtgtctttttacatgcttgcgtggattattcagttcagcttctgccattacttgaggaacatttagacaataaagtaaaaaaaacagagagaatcttgaaatgataactagcttgcaggatcaatagatagagtacca

SEQ ID NO: 130045 - DNA, 1614 bp, Zea Mays
ccaacaatgcacaccaacatccactctctcgtcaggctcctctcccccaaaaatgagcgctgagttctgcgctgctgccggtgtcgtggccatggagctcggagtcggagatgtgctggggctgcagcaaggcatcgcaatcaccgcgccatcgcccagggacagcgacctgggtcttctcaagcgagcaggcctcacccaggctgcggctgctgccccctacccctcccccttccttgacgaggagaagatgctcaggttctccaaggcggctcacacattgcactcaggcttggattttggaggcccaggtgagcaggctttcctgctgtccaggaccaagatgccatttactccctcgcagtggatggagctggagcaccaggctctgatatacaagtacctcaatgcaaaggcccccccataccttccagcctgctcatttcaatcagcaagagcttcagatcatccaatagagtgagctggaggcctctgtatcaaggctacacaaatgcagactctgacccagaacctgggagatgccgacgaacggatggaaagaagtggcggtgctccaaggaagcaatggctgatcacaagtactgtgagcggcacatcaacagaaaccgtcaccgttcaagaaagcctgtggaaaatcaacctaagaagaccaccaaggaggtgcctgctgctgctggctcattgccatgtgctgggccacaaggtagcttgaagaaggcaaaagttaatgactccaagccaggcactgtcagctattgggcagatagtttaaacaggacaatgttgagcagagagaaagcaaacaaaccgacggaagatagctctttgctgcttacttctacgaacagccaacccaccttgtccctgctctctcagctgaagcagcaaaacaaaccagataagttaggccccacactggaaaatgagtcaaacccagacacaatattgaaagcctggggtggcaaccagcctagccacaagagcatttcctctacagagcgccatgatgctgaatccctccaatcagtccttcaaaatttcagcctagcccagaatgagaagatggagtcagaaaagaacaaatattctgattccgtgctagtttcgtcgactttctattctgcagacggtccaagagctacctgccttacacctaacatgacacaggtgaagcaggattgcatatcaagctcttgggagatgcctcaaggtggacctctaggcgaaatcttaacgaactccaagaatagcaaggacttaagcaagtgtaaaccaaggtcatatggttggttgttgaatcttgaccatgcaccatgattcctcaatccatgaagagcttgacatagatatcccatcatgtaggcaaacaatggtcagaaaaaggttatgaccacattgcttgccccatgcatgcttgctatctacatttgtatttctgttacgtagcatttagctagttgaattatcagttcttctggatacggctgtatcttaaacaagttctagtttgtgtcagatgatatcttgcttgctagatgtttcatgttccactttcaacaggaacttcagacaaccactttgattgacagaaaa

SEQ ID NO: 130046 - DNA, 789 bp, Zea Mays
ccaacaatgcacaccaacatccactctctcgtcaggctcctctcccccaaaaatgagcgctgagttctgcgctgctgccggtgtcgtggccatggagctcggagtcggagatgtgctggggctgcagcaaggcatcgcaatcaccgcgccatcgcccagggacagcgacctgggtcttctcaagcgagcaggcctcacccaggctgcggctgctgccccctacccctcccccttccttgacgaggagaagatgctcaggttctccaaggcggctcacacattgcactcaggcttggattttggaggcccaggtgagcaggctttcctgctgtccaggaccaagatgccatttactccctcgcagtggatggagctggagcaccaggctctgatatacaagtacctcaatgcaaaggcccccccataccttccagcctgctcatttcaatcagcaagagcttcagatcatccaatagaggtactgaaccagaaaactaaggttttctacttcaaaactactggcacttgcaaccaaccaagatagaagagaaatattactttgcaaaggtgcagcgttacatggtaaacaaaaaatgctggcagtggcagctctgtagtatttgaaactgcaactcattaggttcaatgtatgaatgccatggaatttcaaagatattacaccaaaaaggaaccaccattttgtacctaaacactcgtatgccataaaggataaccacagtaatgctttgaatatagatgccagagcttgacagacttctctaacgcagt

SEQ ID NO: 130047 - DNA, 1314 bp, Zea Mays
agcgcgcaaagcagagggaagagagcgagggcatggcatcacagaccgtctctggtagtgaatgctggagtcagtgaagtagatgttgccctcgtcgtcgaggtcgaggtcgttggtgaagttgaagcgcacgccctcggcctccgttgcgagcagcgtggccagcccgccctcggggcggactttgagcaagccgaagtaggcgtcggcgatgtacaggtccccagtcttatcgaaacagagcccgagcgggctgttgcagatgtgctcgctgggagatactccagcggcgaggccttcggcccgccgcggagcttctgcgtccagcgcggggaggccatcgtgaatgggacccaccgctcactgtcccagaagacgacccggccgtcggcgacgcccgtgtatggccctgctggtcgaaggcgatgctctcgggcccctgcacctcgccgcagaaccgcacatcggctccacagagtcgctcccattcatccgcgtgcgtcggcatctcggcgggatcagggaggtcgacgaggtgggactcaaaccccgggaagtccaccatgttgtccgttcggagcgggtccgtgccgcagaatgccgccagtgctaccaccagcagcgtcgcggccactacaaccggcgacgccatcccgctagcccgctacctcgtctctcgcccgcggctcacccactcgcctccgtctgccgtcgcctcgctctcgcggggtttcgcttggatttctctacacactccccctgatctgcctcaccttccatgtagagcgcgaatcgagagccgatgcatcgtctctcctcgccttccacggatagcgagccccggacttgcatctggagaccgcaaattccatcgatctgggcaagcacggcgcggacgccgtcaatctgggcgaatctggagagagcggatcgaggccgcaatcccgtccgagcagtgatcccgtcgatttgggcgccggcctcgccttccatgtagagcgcgggagcaggggagagcgcagagcagagattccgtcgatttgggcgtcgacctcaccttccatgtagagcgcgagagcaggagagagcgtggagcaaggaatcagagcgcatcagtgcgaaccttccatggagtttatcgagaggcgttgatgaggagagaacagggattgcggtgagagagcatgtacgcgaatcggggtcaatggagttgtttgtgtctggattgcaccgcgggagggactggatgcggggattaagcgcgaatcgggagggactggctgcgacgccgttgatgcgggagggactagatgc

SEQ ID NO: 130048 - DNA, 2581 bp, Zea Mays
cgtgaccaccgcgtggcattcgcttcatcagcagattaattattaaccagctcgatcgagtaaccaaccggcgcttgatcgaaacttcaccgcgacaatggcgatcggcggcgacgcggggctccttgtcggcgacggcgccggcgacgacaacatcatcctcaacccggagttcgacgacgggctggacagctgggcggggagcgggtgcaagatcgagctgcacgactcgctggacgacggcaaggtgctcccggccaacggcaagtacttcgtggccgcgacggggcggaccgacacgtggaacggcgtgcagcaggacgtcacggcgcgcatgcagcgcaagctgctctacgaggccacggccaccgtgcgcctccactcggcagcgggcggcggcggcggcgccgtggcgccgtgcgaggtgcgcgccacgctcggcgtgcagacggccgacggcaggcagcagtacctcagcgtcggcaagtcgcaggtgtcggacaaggagtgggttcagctgcaggggaagatcctgctcaacagcacggtggccaaggcgtccatctacatcgaagggccgccggccggcgtcgacgtgctgctcgacagcctggtggtgaagcacgcgcagaaggccccgccggcgccggcgccggacttcgagaaccttgagtacggcgccaacatcatgcagaacagcaacctggacgacgggctcaacggctggttcccgctgggcccctgcacgctgtccgtccacgacggagggccgcgggttctcccgcccatggcgcaggagtccctggagctggacgacgagccgctcaacggcaagcacatccacgtcaccaaccgctcgcagacgtggatgggccccgcgcagatcatcacggacaagctcaccctctacgccacctaccaggtctccgcgtgggtccgcgtcggcgcccacgccagcggcgcgccgcagaccatcaacgtcgccttcgccgtcgacagccagtggatcaacggcggccaggtcctggcgcgcgacgagcgctggtacgaggtgggcggcgcgctccgcgtggaggcgaagccggcgacgcgcgtcatggtgtacgtccagggccctgacgccggcgtcgacctcatggtcgcggggctccaggtgttccccgtggaccggaaggcccgcgtcaagcacctcaagcggctcaccgacaaggtgcgcaagcgggacgtcgtgctcaaggtgacgggcgccgacggggccgccgctggcgctgtcaaggaggccgatggcgtggaggtgcgcgtgcgccaggtgtccaacagcttcccgctgggcgcgtgcatcatgcgcaccaacatggacaacgaggatttcgtggacttcttcaccaagaacttcaactgggcggtgttcggcaacgagctcaagtggtactggacggagccgcagcgcgggcagttcaactacagcgacgccgacgacctgctccgcctctgctccgaccacggcatgtgcgtgcgcgggcactgcatcttctgggaggtggacaacgccgtgcagcagtgggtgaagacgctgtccaccgacgacctgtccgccgccgtcagcaatcgcatcaacgggctgctcacccggtacaagggcaagtttaagcactacgacgtcaacaacgagatgctgcacgggtccttctaccaggacaagctcggcaaggacatccgcgccaccatgttcaagacggccagcgagctcgacccggacgcgctgctcttcgtcaacgactacaacgtcgagagcatgtgcgacatccatgccacgcccgaggcgtacatccagcagatcatggggctgcaggagcagggcgcgcccgtaggcggcgtcggcctgcagggccacgtcagcaacccggtgggcccggtgatccgctccatgctcgaccggctcgccgtgctcggcctgccgctctggttcaccgagctggacgtgtcgtcggcgaacgagcacgtccgcgccgacgacctcgaggtgatgctgcgggaggcgtacgcgcacccggccgtggagggcgtcatgctctggggtttctgggagctcttcatgagccgcgacgacgcgcacctcgtcgacgccgaggggcaggtcaacgaggcaggccgccggctgctgcagctcaagcgcgagtggctcacgcactcgcacggccacgccgacgagaacggcgagtacaagttccgcggacaccacggcgagtaccacgtcgacgtgaccacccccaccggcaaggtctcccagacattcacggtcgacaaggacgacgcgcccctggtgctcaacattaaagtgtgagcagtacgtgcacgttcagatcatatacggcgtatgatggcatcctatcatagccatgcatatagtacacgtacatttgaattatttatgcctaccagctaagccagccgccggtaactactgtctttcgaggaataagagcctgatcaaattcatctgtatgcatctttatcgtctcgatcgtggtgtttatgtatgcacatgcgtgctttatgtatcacaacacaaggtcacaac

SEQ ID NO: 130049 - DNA, 1221 bp, Zea Mays
atggccaacctctgcggcgtgcagtcggggccgaggccgcgcctgcttcagcaaccatacgcgtcgcagccgcgcagaacgggccacgcgcgtcggctcaacggaggagcgcgtcgcggccagcctggagcgcgactggggacttgcggccgtggtggcgcgccggaccaggagagcggaggccgctgcgagggcggtcgagatgtacaggtggcgctcgtgccgctccgccgcgcgctcaagctccccgaggtcttcatctcggcgcacgcgtgggagtcggttaggtacacccgcgtcgcctccgtggccatgaagaactacacagacctcttcctcaagcacgatgccgaccgcttcaacacctacctcgccgacgtcaagtccggcaagaagcggatcgccacgggcgcactgctcccgcacgagatcatcgcctccctcgaaaacgacagcggtggcgaagtggtcgacctgcagtgcatgtacgaccgtcccatggaggtgtgcgcggccctcggcctcctcgtgtccgagctcagcgacgacccatggcgtggccgcatggtcaccttcagtaggcggccgaagctccacaggatcaccggcgagaccctcttcgagaagacaaggttcatccaaagcatggcctggggcacgaacatcgacttccaggcggtgttcaacaagatcctcgaggtggccgttggcgccaggctggcgccggagcggatggaaattatttgtttgagtcatgtttatgccatctgtctcctcaaagcagataagattttctttttgattgggttatgttgtgagacatctggtgctggtggtacaacgacagataaatcaaataaaaataagcggaaggctcccctcaagagatcaaaaggaagcttaggtagtctggatgttgttgcagtaaaaataacaagtcaccggcaaagccttcaacttcttcctccaatgaagggttcaagggtgaaggataatctgaacaaggacagggtaatggatcacgtatatttgagtgctagatcatttcctatccagttccctgagtcatttgagcgagaaagtctacgaggtgtctgtgcacagtttactgagatcctatattttttgtatgatgcaaggactgaccccaacaccagtttttctgcttattgttggagtttatgtggttgcactggcgatcactatgccaaggttaaatga

SEQ ID NO: 130050 - DNA, 1256 bp, Zea Mays
cctaaggtgaggcgagtacagccccggcacacaaccaatcacggtgacgctctaggattgggccatttggtgtggcactgtagcgaggcccagctcggtccatgagcagcattctggtcggcttgacagatccatcacgccatcggcaaaaatatctggctctcgagaaccctcccggtcccagcgcggtaggcccacctcgggatccttatcctccggtcggaccgttgtttgcgcggtcgccgcccgatccgatcatgacggcgcccgtcacgtccgtcgcgctataaatctgcggggtagggcttcctcactccctcgtgctctctcagaggtgggctggcttctcctccccctcttaccaagtcctcctcgggttagggttccttagggttttgtggaggggcgatggcggcggctgatgtggagtaccgttgcttcgtcggcgggcttgcctgggccaccagcaacgagtcgctggagaatgccttcgcctcctacggcgagatcctcgactccaaggtcatcaccgaccgggagacggggaggtcccgcggcttcggcttcgttaccttctcctccgagaactccatgctcgacgctatcgagaacatgaacggcaaggagctcgacggccgtaacatcaccgttaaccaggcccagtcccgtggcggtggcggtggcggcggtggctacggcggcggtcgcggcggcggcggcggttatggtggcgggcgccgtgacggcggttatggcggcggtggcggctacggcggtcggcgcgaaggtggcggcggcggctacggaggcggtggcggctacggcggtcggcgcgagggtggcggtggcggctacggcggcggtggcggcggcggctggagggactgatgtgtgggcccatcctggcttcggccgagttatcttatctatctatagtatcgtgttaccgttcgcttctgtcaccgtgttagtgtccgttctacctttggattaggtgttggtaccctgttgttcgctttggttgctcccgctatgaaacgagacgagagaagaatgagcaaggtttttgttcgcagctatttttgtccaatgatattgatatattgttcccctgtctgttgctggattgttgtgtggctatacaaatatcatcaaactgttactccgagagccctataaatatcaaacttccagaacacaatacagtaaagtacacgataacagatccaaagaattcgccgcttcgatgcaccata

SEQ ID NO: 130051 - DNA, 928 bp, Zea Mays
cctaaggtgaggcgagtacagccccggcacacaaccaatcacggtgacgctctaggattgggccatttggtgtggcactgtagcgaggcccagctcggtccatgagcagcattctggtcggcttgacagatccatcacgccatcggcaaaaatatctggctctcgagaaccctcccggtcccagcgcggtaggcccacctcgggatccttatcctccggtcggaccgttgtttgcgcggtcgccgcccgatccgatcatgacggcgcccgtcacgtccgtcgcgctataaatctgcggggtagggcttcctcactccctcgtgctctctcagaggtgggctggcttctcctccccctcttaccaagtcctcctcgggttagggttccttagggttttgtggaggggcgatggcggcggctgatgtggagtaccgttgcttcgtcggcgggcttgcctgggccaccagcaacgagtcgctggagaatgccttcgcctcctacggcgagatcctcgactccaaggtcatcaccgaccgggagacggggaggtcccgcggcttcggcttcgttaccttctcctccgagaactccatgctcgacgctatcgagaacatgaacggcaaggagctcgacggccgtaacatcaccgttaaccaggcccagtcccgtggcggtggcggcggcggctggagggactgatgtgtgggcccatcctggcttcggccgagttatcttatctatctatagtatcgtgttaccgttcgcttctgtcaccgtgttagtgtccgttctacctttggattaggtgttggtaccctgttgttcgctttggttgctcccgctatgaaacgagacgagagaagaatgagcaaggtttttgttcgcagctatttttgtccaatgatattgatatattgttcccctgtct

SEQ ID NO: 130052 - DNA, 760 bp, Zea Mays
cggcgcccgtcacgtccgtcgcgctataaatctgcggggtagggcttcctcactccctcgtgctctctcagaggtgggctggcttctcctccccctcttaccaagtcctcctcgggttagggttccttagggttttgtggaggggcgatggcggcggctgatgtggagtaccgttgcttcgtcggcgggcttgcctgggccaccagcaacgagtcgctggagaatgccttcgcctcctacggcgagatcctcgactccaaggtcatcaccgaccgggagacggggaggtcccgcggcttcggcttcgttaccttctcctccgagaactccatgctcgacgctatcgagaacatgaacggcaaggagctcgacggccgtaacatcaccgttaaccaggcccagtcccgtggcggtggcggtggcggcggtggctacggcggcggtcgcggcggcggcggtcggcgcgaaggtggcggcggcggctacggaggcggtggcggctacggcggtcggcgcgagggtggcggtggcggctacggcggcggtggcggcggcggctggagggactgatgtgtgggcccatcctggcttcggccgagttatcttatctatctatagtatcgtgttaccgttcgcttctgtcaccgtgttagtgtccgttctacctttggattaggtgttggtaccctgttgttcgctttggttgctcccgctatgaaacgagacgagagaagaatgagcaaggtttttgttcgcagct

SEQ ID NO: 130053 - DNA, 282 bp, Zea Mays
atgagcgtcgtggggctgttctccctgtacatcttggtgagcgccagctccagcgcgatcccgaacgccgtcgtcgtggagaagaagaacaccagccccgccttcatcctcgcgacgtacttcgcctgcaggatgcagccgccgagtcccatgccctcggagagctggtggaagcacatcgccgtcaccagcggccggatggtgcacacgttctgcgatttgggggcgcagggccgcggaccttccatccgcgcatccgaggaggaggtggcggcgcagtga

SEQ ID NO: 130054 - DNA, 103 bp, Zea Mays
tttcttttatatgcattagtaggaacagttgttgtgacactctttatgagtctaacatgacctgttttgaacagaaacatctatttgtgcatatagaggtctc

SEQ ID NO: 130055 - DNA, 117 bp, Zea Mays
ttttttttctcgaatatgcaggagagctgcatatcattatatttaagaagaagaagaaagtcggggctgaagcccttacaaaccataacactgaggtttaaactcctcaaaaaacag

SEQ ID NO: 130056 - DNA, 1397 bp, Zea Mays
cgcgtcccggtggctggccgccaacgtgctgcccttcgtcccggcgaccaccatctccgccgtggccgtcggcaacgaggtgctggagtccggggacgccaccctgggcgccgcgctgctcccggccatgcagaacctccgcgccgccgccgcggcggcggggggcggcgccgcggggatcaggttctccaccgtgaacaccatgggcgtgatggcgcagtcggacccgccgtcgacgggcgcgttccacccggacgtggctccgcagctgcagcagatcctggggttcctcagcaggaccggcgcgccgttcatgatcaacccgtacccgtggttcgcgtaccagtcggacccgcggccggacacgctggccttctgcctgttccagcccaacgcggggcgcgtggacggcgggtccaagatcaggtacaccaacatgttcgacgcgcagctggacgccgtgaagtcggcgctggtgcgcgccgggtacggggacgtggacgtcgtggtggcggagacggggtggccgaccaggggcgacgccggggagcccggcgccacggcggagaacgccagggcgtacgtgtccaacctggtggcgcacctgcggtccggcgccggcacgccgctgatgcctgggaaggcggtggagacgtacctgttcgcgctgtacgacgaggacctcaagcccgggcccacgtcggagcgctcgttcgggctgtaccacacggacctcagcatggcctacgacgccgggctggcctcctccgcggcggcggggggtcggggcgggggcgggggcggcgcggcgcagcccaggggcggcgggtggtgcgtggcgcgggccggcgcctcggacgcggagctgcaggcggacctggactacgcgtgctcgcaggtgggcgtcgactgcagcgccatccagcccggcggcgcctgcttcgagcccaacacggtgcgcgcgcacgccgcgtacgccgtgaaccagctgtaccaggcggccgggcggcacccgtggaactgcgacttccgggcgtccgccacgctcacctccgacgacccaagctacggggcatgcgtgtacaccgggggaggccaataatgcacggcgcactggaagaaatttcccgttccttttcagctgcaggctacggggcatgcagtgcagatcctcttgtttgtttcgtcgtaccggaagaaatttcccgttccttttcagctgccctgactgcctgcctgccttgggacaggctgggatgtgtcatgtgtgagtgtgacttcgtgtaaaagaactattggacgctgtcagtgtcgccgtgagctctgtggacggtagtagtacatgtgtctaatgtacaagtagagtgagattgtatctatatatgtattttttccct

SEQ ID NO: 130057 - DNA, 870 bp, Zea Mays
aaaaccaggacagtttgaatctgagtacccctgttcatttgcaaagagcgggtcactggtcatgggtcaagtggcagaaggtggaattgacagttcagtgcttgagtatgggcatgtcaagtaccaatactcccccgaggttaacatcacatatcacgatagagaacacggcaagatcgacaaaataatcactagcacaaacactgctctaagaaagatcaatagccaccgactgtattggattagctacagttctacactatgaactaacaatgcatgcgcgaagagaaacagaattcaatcggcaaaaccaccattagctacaactaatgcaactcgacccactgaagttccgacacaaaacctaaccacagactaatggaaccaaatctagcaccacccgcgtccaggcccacgagatctgagcacaccgcgaccgtgactaccccattattactaggcggagttaccggttggggtttcaggttcaggggaatggagacgggcgggggatttacttgtgctgggatcggatctggtagtcgcgcagttgctccaccagcttcgaccgggttatcatcgtagataccccggccgccgacgccgacgacttcgccaccaccgcctgcctgctgctggtcctcctcttctgacggtctctcccctggttcttccagaccctgctcgatctccgaggccacacgatttggtggcgtcggggctcggctcgatttcgtgggcttgcagttgcaggtggattccgcaacgccgtggtgggttggggactcggggttgtggaagacgggggaaaagtcgtccagaggacgacgaggccagacaatcacacttcacacagacagatttcgctct

SEQ ID NO: 130058 - DNA, 614 bp, Zea Mays
atcctcggtggcagccaagaacacccgtatccccgtcgctgcagaactggccggcacccaacaaagaaagacacaaattcggagagcaggctttttatgctgaaccctgaacatcttcatccctcgtgacgaacgctttgggcatctcaagatgtcggacttaattccttgggtactcgctgaaggcgatcatggaggctgttcttccaacattggggactttcgtcgatgacacaccaaaggagttcgattcgtttgaagatatacacaggctctcacccaacaacccactgatagcagagatcaggaagaagatcccccgcgagttccttcgaagcattctgccgaacggtagccatgaccacccgctaaagacgccccttccacatgtcatcaaatcagaaaaagatttaccatggctaaggctaaatcttggtacaaaaccagatgtgttgaaaaaggctccggagtttaagtttggctggaggactaacgaagggttcgcgagagagacacttgcaggcgtgaacccagtaatcatcaaacgcctcacggttagcgttcttgcatcatttggattggcaaaatacaccttgcccccatatattaactga

SEQ ID NO: 130059 - DNA, 1196 bp, Zea Mays
taaacattggacctgacccaagtgttcatatttattcgcataactgaacttttccagtatgttgaacaagcacggggcaactattcaactttgcaaggattagagtggaaaccccttttgtcttgagggaaaaaaaataaagggagaagctctcctgagaagcatatagcaccagcggaacacgggaacggcggaagcaaacaactagaaattccccagcccggttctttgcgtgcggttgatctcgtcggaggcccggccgcggttccccaatccgccatcgaattcgatggcggccaacgccgggaataagatccgcaacgccaagctggttcttcttggagatgtgggcgctggcaaatctagcttggttcttcggtttgttaagggacagtttgttgaattccaggaatcaacaattggagcagccttcttttcccagaccttagcggtcaatgatgagactgttaagttcgaaatctgggatactgccgggcaggagaggtatcatagcttggctcccatgtactataggggtgcagctgctgccattgttgtctatgacatcacaaatccggcctccttcacccgtgccaagaaatgggttcaagaacttcaagctcaaggaaatcagaataccatagtggctcttgctggaaacaaggctgatatgctagatgcgaggcaggtgccagcagaggaagcaaaggcgtatgctcaggagaatgggctcttcttcatggagacatctgctaaaactgcaatcaatgtgaatgacatattttatgagattgcaaagaaattgcttcaagggcaacaagctccaagcccacaggctggaatggttctgaatcagagaccaaatgagaggacggtcagcagttcttcatgctgctcttgagctgtgtttcaacctcgtagtgccgttatcaaatgtatcagaggaggtttatggaaaatatcccatgtcgcttgtgtggctgcctttcaggctgacgtgctcccattctgctcctcatttcctttcacatgttcgtcatgtaaatgccaatactaaagtgtcactgcatgggcagaagtgttaccaaagtgttgattgtgctcttatcatttgattaagcccctgcttaagttctcaattttgcatatatacatggtggagtttcatttgaactttttaaccgatgatataacca

SEQ ID NO: 130060 - DNA, 1059 bp, Zea Mays
taaacattggacctgacccaagtgttcatatttattcgcataactgaacttttccagtatgttgaacaagcacggggcaactattcaactttgcaaggattagagtggaaaccccttttgtcttgagggaaaaaaaataaagggagaagctctcctgagaagcatatagcaccagcggaacacgggaacggcggaagcaaacaactagaaattccccagcccggttctttgcgtgcggttgatctcgtcggaggcccggccgcggttccccaatccgccatcgaattcgatggcggccaacgccgggaataagatccgcaacgccaagctggaatcaacaattggagcagccttcttttcccagaccttagcggtcaatgatgagactgttaagttcgaaatctgggatactgccgggcaggagaggtatcatagcttggctcccatgtactataggggtgcagctgctgccattgttgtctatgacatcacaaatccggcctccttcacccgtgccaagaaatgggttcaagaacttcaagctcaaggaaatcagaataccatagtggctcttgctggaaacaaggctgatatgctagatgcgaggcaggtgccagcagaggaagcaaaggcgtatgctcaggagaatgggctcttcttcatggagacatctgctaaaactgcaatcaatgtgaatgacatattttatgagattgcaaagaaattgcttcaagggcaacaagctccaagcccacaggctggaatggttctgaatcagagaccaaatgagaggacggtcagcagttcttcatgctgctcttgagctgtgtttcaacctcgtagtgccgttatcaaatgtatcagaggaggtttatggaaaatatcccatgtcgcttgtgtggctgcctttcaggctgacgtgctcccattctgctcctcatttcctttcacatgttcgtcatgtaaatgccaatactaaagtgtcactgcatgggcagaagtgttaccaaagtgttgattgtgctcttatcatttgattaagcccctgcttaagttctc

SEQ ID NO: 130061 - DNA, 1251 bp, Zea Mays
taaacattggacctgacccaagtgttcatatttattcgcataactgaacttttccagtatgttgaacaagcacggggcaactattcaactttgcaaggattagagtggaaaccccttttgtcttgagggaaaaaaaataaagggagaagctctcctgagaagcatatagcaccagcggaacacgggaacggcggaagcaaacaactagaaattccccagcccggttctttgcgtgcggttgatctcgtcggaggcccggccgcggttccccaatccgccatcgaattcgatggcggccaacgccgggaataagatccgcaacgccaagctggttcttcttggagatgtgggcgctggcaaatctagcttggttcttcggtttgttaagggacagtttgttgaattccaggaatcaacaattggagcagccttcttttcccagaccttagcggtcaatgatgagactgttaagttcgaaatctgggatactgccgggcaggagaggtatcatagcttggctcccatgtactataggggtgcagctgctgccattgttgtctatgacatcacaaatccggcctccttcacccgtgccaagaaatgggttcaagaacttcaagctcaaggaaatcagaataccatagtggctcttgctggaaacaaggctgatatgctagatgcgaggcaggtgccagcagaggaagcaaaggcgtatgctcaggagaatgggctcttcttcatggagacatctgctaaaactgcaatcaatgtgaatgacatattttatgagattggtgagatgagtaccatcctaaatctgttagtttgggcagtacatgggctgagaatcagttgtacaggtggatctttaagctgtagtactatctagctttttacacattaattctcatctgttcccattgcagcaaagaaattgcttcaagggcaacaagctccaagcccacaggctggaatggttctgaatcagagaccaaatgagaggacggtcagcagttcttcatgctgctcttgagctgtgtttcaacctcgtagtgccgttatcaaatgtatcagaggaggtttatggaaaatatcccatgtcgcttgtgtggctgcctttcaggctgacgtgctcccattctgctcctcatttcctttcacatgttcgtcatgtaaatgccaatactaaagtgtcactgcatgggcagaagtgttaccaaagtgttgattgtgctcttatcatttgattaa

SEQ ID NO: 130062 - DNA, 458 bp, Zea Mays
taaacattggacctgacccaagtgttcatatttattcgcataactgaacttttccagtatgttgaacaagcacggggcaactattcaactttgcaaggattagagtggaaaccccttttgtcttgagggaaaaaaaataaagggagaagctctcctgagaagcatatagcaccagcggaacacgggaacggcggaagcaaacaactagaaattccccagcccggttctttgcgtgcggttgatctcgtcggaggcccggccgcggttccccaatccgccatcgaattcgatggcggccaacgccgggaataagatccgcaacgccaagctggtgcgagttcatgtcccgagcgctcaatttcaattcttggtttcgccgtagattgaatcgcggccggccggatcttgatcgccagtactgggctgcatggtgcttagcgcttggggttgttacgaat

SEQ ID NO: 130063 - DNA, 998 bp, Zea Mays
  misc_feature (997)..(998): n is a, c, g, or t
gagccaaatagatgccactttttcttcttggtccttgcattgctatctcaatacgtcatgtgattctacaatgtaagcgtgaagtcgaagtagttcttggtggtacttcagccctcatgcatctcctcatgcatgcaatgcaagatcgatgcaatcctcatcctatataatagatatagcttgatagcttccaccgacaatggcaccacgcctagctagctactgctagctacggctagcagctaggatacaatcctcttgtgagatgagatactagcatggcatcgccatcaaataatgcactgagtgatctatctctcaccatgtctgccttcccagttggccatttcccactacaaatagcgagctgattcatcgatctcagcagtcagcacgtagctcagagctagctagcagtagcaccagcagcagccatggacgataccatgggcggcagcgccacccgtgggctgctcggccaccaagcgcgagacgacgagcaggcggccaggaacgtcgtggttggcgccggtgccctgaccgtggcgagggactaccggagggggaactggacgctgccggagacgatgctgctgatcgaggccaagcggaaggtgcacgaggagcggcacccgggggaccagggcctggcgcggtggcgctgggtcgaggactactgctggcgggccggctgccggcgcagccagaaccagtgcaacgaccgctgggacaacctcatgcgggactacaagaaggtgcgcgcgtacgagctcagcggtactggggccggcgccggcggcagagcgcccagctactgggcgatgggcagggaggagaggaaggagaggggcctcccgaccaacctcctccgcgagatatacgacgccatgggcgaggtcatcaagaggaggatgaccatgggctgctgcggcagtggcggaggcggactcacggcggcgtcctcttccagcctactcgacgttcccatgcaagcttnn

SEQ ID NO: 130064 - DNA, 4637 bp, Zea Mays
ctgtccccgatcccttctcttcagatctgccgcccatgccggctccccgctccggaccctagccgctagccgcccgggcccacccgccgcgcccccaaaatgggccgccccaggatgctcaccgccgccggtggcatcgaccccatcgccgaggagccccaccacgcgcgctcccccgccgatggcgggctcgggcccgacccggcggccctcgcctgcgcgatctctgccgaggccagcaccgtgctcgccgtcatgcgccggggcctccggcacccgcgtgccacggccgcggacgacgccgcggccgaacacccgctcgttgcctccctccgcgggctccgccgcctcgccttctcgccgtccccctcggccgccgccgcgctccccgccgccgcgctgcggcccttcctcgatgccgtccgctccgaggacgccggcgccgccgccacctccgcctcgctcgccgcgctccacgaggtcatgtccctcacgggccccgcgctcccgggcgccgcgctccgggaggtcgtcgacgccgtcgccagctgccggttcgaggccgggaccgagcccgccgccgaggaggccgtgctcatgaggatgctgcaggcgctcctcgcctgcctccgcgcgcccgccgcgcccgcgctcggggaccagcatgtctgcaccgccgtcaacacctgcttccgtgtcgtccaccaggccgcggccaagggcgagctcctgcagcgattctcgcgccacgtgatgcacgaactcatccgatgcatcttcgcacgcctcccgcagataggcggtgctgacggagttgacggtgctgtcaagccagagatgggtggcatggatatgaatcatccttttggtatcaaacaaatggaaaatggtaatggaagctatgtgtccgagacaggtacatctgatgagaattctgcagatggcagtggtcttgttgtagagccttatggagtaccttgcatggtggagatctttcattttctatgctctctcctcaatgttgttgaacagattggcttagatgaagatcttcctttgtttgctcttaaattgatcaattcagcgatagagcttggtgggtcttcaattcagaaacatccaaagctgttgtccttggtgcaagatgagcttttcagaaacttaatgcagtttgggttgtcaatgagtccactcatcctttcaatagtatgcagtattgcattgaacctttaccatcatctccggactgagctgaagctgcagcttgaggcttttttttcttgtataattataaggcttgcacaacctcgttttggagcaacatatcatcagcaggaggttgcaatggaagctcttgtagacttctgtcgacagaaaaattttatggtggagatgtatgccaatcttgactgtgatataacctgcaggaatgtttttgaggagcttgcaaatcttctatcaaagagtgcttttcctatcaactgccccttatcttccatgcacattcttgctctagaaggtttgattgctgtgattcaggggatggctgatcgtatcgggaatgcagtctcacgccctgagctcctgcctgtggagcttgatgaatacactcctttctggactgttaagtgtgagaacttttctgatcctcggcattgggtgaagtttgtccgtcaaaggaagtatgtcaaaaggaggctaatgattggtgctgatcatttcaacagggacccaaagaaaggtctggagtttcttcaaggcactcatctgttgcctgagaagcttgatccccagagtgtggcttgttttttccgctatacagctggtttggataagaatcttgttggagatttcctaggcaatcatgatgagttttgtgttcaggtgcttcatgagttcgctcagacctttgatttccaggagatgaacctggatacagctctgcgtctatttttggagactttccggcttcctggtgaatctcagaagatacagagggttcttgaggccttctcagacagatactatgagcagtcccctcagtctttcgcaaacaaggacactgctctactgctgtcatattccattataatgctgaacactgatcagcataacatgcaagtgaagaagaagatgactgaggacgacttcatcaagaacaatagaaacataaatgggggcagtgatctcccacgtgagatgttgtctgagctatatcactcaatctgccgaaatgagattaagacaacacctgagcagggtttgggatattttgaaatgtctcctagtcgttggatagatctaatgcggaagtcaaaatctacgtccccatatatcatcggtgactctcagcctttcctggaccatgatatgtttgctgttatgtctggccctactattgctgccattgcagtggtattcgatcattcggagcatgaagaagttcttttgacttgtatagaaggctttttgggtgttgcaaagatatctgcatttcatcatctcgaggatgttctggacgatcttgttgtttctctatgcaaattcacgactctcttgaatacttctttggttgaggagccagttactgcctttggagatgaccttaaagctaggttggcaactgagacattatttactatagctaacagatatggggattatatacgcaccggctggaggaatgtattggattgcatcctgaggctgcataaacttgggcttctccctgcccgtgttgctagtgatgcagctgatgattccgaacttcctgctgaagcagtccaacgaaaggctgctcctagttcagttcccccatctcatattccagtgatgggcacacctcgcaaatcatccggactcatgggaagatttagtcagctgctctctcttgacagtgaagaaccaagatcacaaccaactgagcagcaacttgccgctcaccagaggactcttcaaacaattcagaaatgccgcatcgatagtatatttacagagagcaaattcttgcagcctgattcactactgcaacttgccaaggctctgatttgggctgcaggccggcctcaaaaggttgccagttcgcctgatgacgaggatacagcagttttctgcttggagctgctgattgccataacccttaataatcgagacaggatcgtgctcctctggcaaggtgtatacgagcatattgccagcatagttcagtccacagttatgccgtgtgctctcgtggagaaagctatttttggactcctgaggatatgccagaggttgctaccatacaaggagaatcttgctgatgaattactgaggtcgttgcagttagttctcaagctcgacgcacgggtagcagatgcgtattgtgagaacatcacacaggaggttgcacggctcgtcaaagcaaatgcggcacatataaagtcacagatgggctggagaacagtaatattgctgctctccattacagcacgccatccagatgcttccgaagtcggttttgaggctatcgtgttcatcatgacagagggggctcacctttcactagcgaactatggcttctgcatcgatgcggcacggcagtttgccgagtctagagttggtttagctgataggtctgtccgtgccctggacttgatgtccgactccgtcagaaaccttgccttgtggtcccaagagataaaagcgacgacatttgaagaaggcgagaaagggccggaggcgataagggagatgtggctcaggctgctgcaagcactgaagaaactgagcctggatcagagggaggaggtgcgaaaccatgcgctggcttctctccagcgatgcctaacatccacgggagaactctgcctccagtccgcgacgtggtcccatgcctttgacctcgtcatattctccttgctcgatgatttgctggagatcagccagaaccactcccagaaggactacagaaacatggaagggtcacttgtgctcgccatgaagctggttgcgaaggtatacctccagctcttgccggaccttttcggcctaagcagtttctgcaagctgtggctgggggtcctgagccggatggagaagtacgtcaaggtcaaggtccgaggcaagcggagcgaccggctgcaggaggtggtcccggacctgctcaagaacatcctgctcgtgatgaagagcaagggcatccttgcgaagaggagcacgatcgggggcgacagcctgtgggagctgacgtggcttcacgcgaacaacatctcgaccagtctgctgcctgatgtttttccaagccaggagtacgagcaacagagcagcaccggtagcccaagagggcccagtcctgttgaggcgtagcggtcaatgttttaacttgtgtgcgaccgtgtgtgtatgttttatttgttttactaggtttactactgctcgtgccctaatccattgaaagtgtaaggtttcgatattgtgattgcgtttcgcctccacggcaagtactatagcatgtgccctaatccattgaaaaacatgcttatgtttctgtgaattatttagttactagtccataatcctatcagaatgctcatttttgctaggaagatgtcatgatgtacatctgaatataatataagaacagaacttcaacgggt

SEQ ID NO: 130065 - DNA, 1308 bp, Zea Mays
cggcgtcttccacctcctgacgtcccggcgctgaaaaattaaagccgacacgaggaaaaaggcaggcaggcaggcacgctcccgcacgaacttccgtcctactcccaacacctcctcgccgtctccaccggggcacggccccgctctgctcctcgctgtccccgatcccttctcttcagatctgccgcccatgccggctccccgctccggaccctagccgctagccgcccgggcccacccgccgcgcccccaaaatgggccgccccaggatgctcaccgccgccggtggcatcgaccccatcgccgaggagccccaccacgcgcgctcccccgccgatggcgggctcgggcccgacccggcggccctcgcctgcgcgatctctgccgaggccagcaccgtgctcgccgtcatgcgccggggcctccggcacccgcgtgccacggccgcggacgacgccgcggccgaacacccgctcgttgcctccctccgcgggctccgccgcctcgccttctcgccgtccccctcggccgccgccgcgctccccgccgccgcgctgcggcccttcctcgatgccgtccgctccgaggacgccggcgccgccgccacctccgcctcgctcgccgcgctccacgaggtcatgtccctcacgggccccgcgctcccgggcgccgcgctccgggaggtcgtcgacgccgtcgccagctgccggttcgaggccgggaccgagcccgccgccgaggaggccgtgctcatgaggatgctgcaggcgctcctcgcctgcctccgcgcgcccgccgcgcccgcgctcggggaccagcatgtctgcaccgccgtcaacacctgcttccgtgtcgtccaccaggccgcggccaagggcgagctcctgcagcgattctcgcgccacgtgatgcacgaactcatccgatgcatcttcgcacgcctcccgcagataggcggtgctgacggagttgacggtgctgtcaagccagaggtaaaagagtgcttgctgctgctattaatagtcacacctcatgcgccgagcttacaaatgccagtcaaccctgtatctcattcttgactaacgattttactactggatactataagacattagtggcaacaacacacagtggcatcctatgaactgcattttacaattaattagcaaattcagcactattctgagtaaagcctttgggttcgcttgtgtaggtctaaacttgcgtggtagaaaatgacacgcgtgggatggaaatttcctttcatgcagttattatgaaatgacaagtgctacttttcagaaacaa

SEQ ID NO: 130066 - DNA, 327 bp, Zea Mays
atggagatagaatcggtcaagtgcgagtgctgtggcctgaaggaggactgcaccccgcactacattgccagcgtgagatcaggcttccatggccaatggttgtgtgggctgtgctgtgaggcggtcagagatgaagcatgcaggaggaaggctcaccatggagtagaggaggctgtgagggctcacatggcgttctgcaacatgttcaagttgaaccccgccgtccgcgtggccgacggcatgcgccagatgctccggaggcggtccggtgatatgtcaaagccagaatcggccaagaagtacgaatcatcagtgacactgtattga

SEQ ID NO: 130067 - DNA, 405 bp, Zea Mays
taacctccctacaaatagcctccagttcaaggaatcaaggcacatagaaagcagtagcagcaaacaagcaagcaagcaatggagatagaatcggtcaagtgcgagtgctgtggcctgaaggaggactgcaccccgcactacattgccagcgtgagatcaggcttccatggccaatggttgtgtgggctgtgctgtgaggcggtcagagatgaagcatgcaggaggaaggctcaccatggagtagaggaggctgtgagggctcacatggcgttctgcaacatgttcaagttgaaccccgccgtccgcgtggccgacggcatgcgccagatgctccggaggcggtccggtgatatgtcaaagccagaatcggccaagaagtacgaatcatcagtgacactgtattga

SEQ ID NO: 130068 - DNA, 123 bp, Zea Mays
attttaataggcaatctacttttggggttgcatgtggttgggacattaaaagatcatatttttattttttatttttttagataaaggaagcttgtattgaaaataccaagtcattacatcaag

SEQ ID NO: 130069 - DNA, 715 bp, Zea Mays
acgcctgcctggggccgggcggcaaagctaagctcagccagagtcgatcatcacacggcgatggagccggccgccgacggcgacgacgtgcacgggcagcgacgggacggaggacaccacgcgccggtggtgtcgctccgggcgctgggcctggcggacgcggacgccttcatggcgtgggcgtcggacgaccgcgtgatgcggcacctgaagcggccgctctgcgccacccgagagcaggccgtggcgcagatcagggacaccgtgctgggccacccgtggttccgcgccgtctgcttcggcgacgtgcccgtggggcaggtgtccgtgtggccgtacgccgacgagggcggtcgcagggccaacctcggctacgccctcgcgcacgaccagtggggccggggcatcgccgccgccgccgtcaggatggtggtgggcacggtgttcgacgacctgccggggctggaacggctggaggcggtgacggacgtggcgaacgtgcggtcgcagagagtgctggagaaggccggcttccacagggagggggtgctgcgccgctacatcgctggacgccgcggcagcggggccagagatgcggtgatctatagcttcttgtcgtccgatgatcgtgcgtgacccggtgaccggtgtcgctatgctacctgcatatggttgtgtgtcctgtaatatgcgttccataaattgtgcaagatag

SEQ ID NO: 130070 - DNA, 1007 bp, Zea Mays
ttcgcctcagacacagtaccaaagcgagttagatagaccggcccatccacctggggtgaggcacacaaatctttcgctccatactgataccgccccacgcccccccaaaaaaaattcccaacaacctgcggtataaactacggtcgcctcttcgtcctcgtctcgtacgtgtaatcgccgaaaaccccaccgccagtcaccactattcatcggccatggccgggcggtggctccaggtgactctcgccctcgtcgtcgtcacggcggcggcaacgacgctgtcctcagcccagcagacggcagcatcgttcccggccatgcccagctgcccgccggcgccgctcagcctgtccccgtgcatcggctacgtcttcggcgtcggctcggcgacgctcgcctcctgctgctcccagctccgtggcttcctccaggcccaggcgccgtgcatctgcgccgcatccaagctcgcgcccagccccatcggcgtgttcctcggccaggcgcagggcatgatccccaacgtctgcgacctgcccagcccatgcgatgccggcgccgccggcgagggctccaagccgccggcgggagacacttcgcctgtgtctacgacgacgactccggcagctgaaccgtcgacgggcgcgcctgccgctgctgttccagacgcgtcaggagcaccgccggcaccaacatcagatgattctgccactgcaatggcaccggcaggcaccgcatcgaagctaccggaactactgcatgcagcaggcgcgacaagctccagagacgtggctgcaggcactgtattcgtcgctgtgtttcttgctgcacttgcaaccatgtatgtgtaactgttgtctgctaagctaccattagatcaccaaatgcgctgttgtaacgttatttatgagttcaaactgcaccctactgttgagcagctacaataaaaacgtttccattgtacagaatctacaaaagcaatgccacgaatcagatcatggtattcacac

SEQ ID NO: 130071 - DNA, 405 bp, Zea Mays
atgaaggtcgacgcctgctcgcgtaaacttctcgtgcctgcttgcggtgcttcaggcccttttgaggactttttgggagagagaaaccgagcctattttacgggcaacaagtttggaaggaattttaaaggcttatgtagcgaaacattagatttgtttcctcagatggaaagacaggataaggttataccaaatgagcccactttcttggtgttcctactcccagcacagtcgaagaagcgccccgtggccatggccttcctcttaaggctcctcaagacgtcaatggcggtgtccgtgtccagcatctgcaggaccgacctggagaaacataggttctattttctgattaatgatgaggccaatgaaaatcagctccggataggttccaaggacgattggtag

SEQ ID NO: 130072 - DNA, 1638 bp, Zea Mays
atgagagatgacaactcaagcaagaacaagctgtcctggtccaagacccttgttaggaagtggttcaacatcaaaacaaaggcgaaggatttccattcggattatgcagccgaggaagccggagtgcagtggaggaccagcttctcggatagagacgcatgtaaatccaagaaaagcaggacagagaggttgactaagaggaacgtggagcgagatggtagagtagaaaacggatttgatggtgcttatattacaaacacgcaggactacagggtcttcgttgctacatggaatgtcggcggaaggtcaccatctagtcatttgaacctggaagactggcttcatacttctcctgctgctgatatatatgtgatagggtttcaggaaattgttcccttgaacgctggtaatgttctgttgaccgaagacaacggtccagcgaagaagtgggtttctctcgttagaaaaactctaaacaaccttgaccaacaaggctccggtgtctataattaccacactccctcgccggctccagacccaatcgtggagctcaatgttgacttcgagcgatcatcaaggaggcaacggaactcgtcgtttttccatcgccgttcgttccagtccttgaaccgcagctcaaggatcgacatgatggatccgcactcgttagtggaccgtcgattcagtgtctgcgaccggatcagcttcgggagcaggccaagtgacgttgacaccagcgtgaggtgtggtgggtcgtctgatgatgagactattgacgaggaatcgcctagcggtatgttcttcccaccgatgccgtgtgcgtatggtgctccactatgcgatggttctaggtattgcttagtcgccagcaagcaaatggttgggatttttctcatggtgtgggtacgaagtgacataagggagcatgtgaagaacctgaaggtttcatgtgtgggtagaggcctgatgggctaccttggaaacaagggatccatatcaatgagcatgtctctgcatcagacaagcttctgcttcgtttgcacccacttgacatcaggccaaaaggacggagaccagcttaggcgaaacgcagacgtagtggagatcctgaggaagaccaggttcccgcacgttcacggagcaggtgaagagaagtcaccggagacgatcctggatcacgatcgtgttatttggcttggggacctgaactaccggatcgcgctttcctaccgctcggtgaaggctttggttgagatgcacaactggaagcagttgctggaaaaggaccagcttcgcatagagcaaaggtttggccgggtcttcgcgggctggagagaagggaggatctacttcccgcccacctacaagtactcgtacaactccgacaggtgtgatcggatcctatggtacgggcgaggcctgtcccagctgtgctacgtgcgtggcgagtctcggttctcggaccacaggcccgtgtacagcgtattcacggcggaggttcggattccgagccagcagcaggcagcggctcagttcggcggcggcggcggcggcattactcgttccgcgtccctcctggggctggcgctggacgagctgccttatccacgcagttacatggacatcaatttttactga

SEQ ID NO: 130073 - DNA, 1724 bp, Zea Mays
ttttttttttcacaaaacccgtgctcgtcatcgtcaaccgctcccaaacacgttgctttcaccccgtttcaaatttagccaatcacgaaaaaacctgcctccatatattcttgtcccagaaaacaagaaattgcaaccaataagacaaagaaaaaagttgaaaaaagaaaacaagccccactcgcgccccttcctacacggctactactcgctacgctgggtctccggctctccgcacgccaccaaaaggagcggagcgggcacgaacccggccaacccaaggcaaccaaccgcaccaaacccaaccagaaagccaagacctcccctcccctcccaatcaacccctccggcccgcgcgccggcgtcctcctatgctcgccggcgacgggcgcggccgccgatgcccagcccgccgaaggaccgctcctccggccgcctcggccgcttcctcgccgcgctccgcccctcccgcgccgggcccctccccgtccagaccggcttccccacctccctcgccgacctcgtcgtcaagaaccatggccgcctcaagaagcagccctcaccgtcctccaagcgcgggaggcgcgccgctgccgccgccgccgccgcttctccttcgccgtccccctgcagtcccaccacctcgccctcgccgtcaccgtccccgccgcccgcctctccgcctcccccggcggccgctgccgcggtctcgccgtcggatcggccgcggcccgaccttccgccggcccagccccctcgcggcttcggcctgggcttcctcgcggtcagcggcgtggtgtcgctcgcgctcctggtgatctggagcaagaaggtggttgcggccgtcaccgtcgccgccttctcgctatacctgctcgagtccgtgaggtcgtcctcgctccccaggcggcggccccggccccggcccggcccgggagcggccgagaggcggctctgcctggacggccgcggccgcgtctcgccgatccgggaggtcgatgcggcggacaccgagccgtcgcggcccagctgctcggattccgacagggcaagcgaggccgaagggaggagcggcgtcctggacgaatcaagcaacacgaaggccaaggcaaggaacaagtcctggaagaagctgctcgcagtcgcaggcgccaagaagctgcagagaggacggaggagcaaggaggcggattcgtcaggctctttccgcagcgacggcgaccgggaggacgctgccacggcatgcggcggcggcggcaatgccagggcggcggattcctcgggctcccgccgcggctccgccagtcaaagcgatgtcctcgcggaggatggcgctgccagagaggcggattcttcgatggggtctcgccgcagccaaggcgtagaggtagaaatcgatgcggacgtcatcgaggtggaggaggaggaggagcaggcagggaccgggtttcccgctctagttctggtcgccgtcgtcctcgtcggcctggtcgccgggaaggccgtggccctggcgctcaccgtgctctgctccgcgttccttagctcggatcggagatcgccttgcggcggcggcggcggcggttgctcgcaggggaggcggttggagccttccatgccgtagtaattattgtaaattagtgggcaacagatttaaagagaagaaaagatagtggtagttgagttcttgatgtttgttcagtggccgtcgttgttcttgcttg

SEQ ID NO: 130074 - DNA, 2140 bp, Zea Mays
cctcctcgctcgctcgatcgctcccacgtcctcgcctccctccacaaaccaccaccaccatccaggatcgcaatgagggagatcctgcacatccagggcggccagtgcggcaaccagatcggcgccaagttctgggaggtgatctgcggcgagcactgcgtcgactccacgggccgctactcggggacctcctcgcagcagctcgagctcgagcggatcaacgtctactacaacgaggctgggggtggccgctatgtgccccgcgccgtgctcatggacctggagcccggcaccatggaatccatccgcgccggccccttcggcggcatcttccgccccgacaactttgtctacggccagtccggcgccgggaacaactgggccaagggccactacaccgagggcgccgagctcatcgactccgtccttgacgtcgtgcgcaaggaggccgagaactgcgactgcctccaagggttccaagtatgccactccctgggtggcggcactggttctggcatgggcacgctgctcatttccaagatccgggaggagtacccggaccgcatgatgctcaccttctccgtgttcccgtcgcccaaggtgtccgacaccgtcgtggagccctacaacgccacgctgtccgtgcaccagctcgtggagaacgccgacgagtgcatggtccttgacaacgaggcgctctatgatatttgcttccgcaccctcaagctcaccaacccttcatttggtgacctgaaccatctgatctcggcgacgatgagcggcgtgacatgctgcctgcggttcccgggccagctgaactcggacctccgcaagctggcggtgaacctgatcccgttcccgcggctgcacttcttcatggtggggttcgccccgctgacgtcccgcggctcgcagcagtaccgcgcgctgacggtgccggagctgacgcagcagatgtgggatgccaagaacatgatgtgcgcggcggacccgcgccacgggcggtacctgacagcgtccgccatgttccggggcaagatgagcaccaaggaggtggacgagcagatgatcaacgtgcagaacaagaactcctcctacttcgtggagtggatccccaacaacgtcaagtccagcgtgtgcgacatcccgcccgtcgggctgcccatggcctccaccttcgtgggcaactccacctccatccaggagatgttccgccgcgtgagcgagcagttcacggccatgttccggcgcaaggctttcttgcactggtacaccagcgagggcatggacgagatggagttcacagaggccgagagcaacatgaacgacctcgttgccgagtaccagcagtaccaggacgccaccgccgaggagtacgaagaggaagagcacgacggcgaggaggagcacgcctgatctggacgccaactcatcggtgcaaagcgtttcagtttcatcgctcctatggtacacaaatcgcgactacgtattcctacaatcctactaccttaagtatgtatattcatgtactgccgtatttgccttactgcttttattagcttgtgtgtgtatctacagtcgtgtgtgttagtgttttctgaaattgtgatatattgccaccgctgtccagattctgtgggtatgtttattcatataattggaatgctctctgttcttgtacgtatcccctccattgttttttgtttgtcagattttagctgaaaaatgaacaagcgggccaaatattcgacaacggagttagtaaatgttaggaatattcatttcatcgtaagggtgttttgtgtttcctcatttgcgctcatgtgttaatacatctccggttgtctctactactttattatcttgctttcggcgccaaagtgctcagtgcgatttcttctttttttttaagataaaagagcagaagttcttagctgaggctcgtttgtagctgtgtattctagctttattttgacagaggttggtgaagagccgaagagataatcagaggataacgaaaaccctagtttttttttttttttgctatggagcatgtttcaaagatcaatccaattccaaggtgtccttctaaattgatcataagaaacatctgagaccgcccgcctcaaacaaaaaatca

SEQ ID NO: 130075 - DNA, 1921 bp, Zea Mays
gaagataacctacagagacagacaggtggacccagaccacgttctccccctccaaaccggggtggccaactggctaatataactgaccgccccgcacgacgccctccgtcccacccgcttcggcctctccctcctcctcgctcgctcgatcgctcccacgtcctcgcctccctccacaaaccaccaccaccatccaggatcgcagcgcggcgcgcgagagaggggtgagcaggtcgggcaagatgagggagatcctgcacatccagggcggccagtgcggcaaccagatcggcgccaagttctgggaggtgatctgcggcgagcactgcgtcgactccacgggccgctactcggggacctcctcgcagcagctcgagctcgagcggatcaacgtctactacaacgaggctgggggtggccgctatgtgccccgcgccgtgctcatggacctggagcccggcaccatggaatccatccgcgccggccccttcggcggcatcttccgccccgacaactttgtctacggccagtccggcgccgggaacaactgggccaagggccactacaccgagggcgccgagctcatcgactccgtccttgacgtcgtgcgcaaggaggccgagaactgcgactgcctccaagggttccaagtatgccactccctgggtggcggcactggttctggcatgggcacgctgctcatttccaagatccgggaggagtacccggaccgcatgatgctcaccttctccgtgttcccgtcgcccaaggtgtccgacaccgtcgtggagccctacaacgccacgctgtccgtgcaccagctcgtggagaacgccgacgagtgcatggtccttgacaacgaggcgctctatgatatttgcttccgcaccctcaagctcaccaacccttcatttggtgacctgaaccatctgatctcggcgacgatgagcggcgtgacatgctgcctgcggttcccgggccagctgaactcggacctccgcaagctggcggtgaacctgatcccgttcccgcggctgcacttcttcatggtggggttcgccccgctgacgtcccgcggctcgcagcagtaccgcgcgctgacggtgccggagctgacgcagcagatgtgggatgccaagaacatgatgtgcgcggcggacccgcgccacgggcggtacctgacagcgtccgccatgttccggggcaagatgagcaccaaggaggtggacgagcagatgatcaacgtgcagaacaagaactcctcctacttcgtggagtggatccccaacaacgtcaagtccagcgtgtgcgacatcccgcccgtcgggctgcccatggcctccaccttcgtgggcaactccacctccatccaggagatgttccgccgcgtgagcgagcagttcacggccatgttccggcgcaaggctttcttgcactggtacaccagcgagggcatggacgagatggagttcacagaggccgagagcaacatgaacgacctcgttgccgagtaccagcagtaccaggacgccaccgccgaggagtacgaagaggaagagcacgacggcgaggaggagcacgcctgatctggacgccaactcatcggtgcaaagcgtttcagtttcatcgctcctatggtacacaaatcgcgactacgtattcctacaatcctactaccttaagtatgtatattcatgtactgccgtatttgccttactgcttttattagcttgtgtgtgtatctacagtcgtgtgtgttagtgttttctgaaattgtgatatattgccaccgctgtccagattctgtgggtatgtttattcatataattggaatgctctctgttcttgtacgtatcccctccattgttttttgtttgtcagattttagctgaaaaatgaacaagcgggccaaatattcgac

SEQ ID NO: 130076 - DNA, 788 bp, Zea Mays
gtcccacccgcttcggcctctccctcctcctcgctcgctcgatcgctcccacgtcctcgcctccctccacaaaccaccaccaccatccaggatcgcagcgcggcgcgcgagagaggggtgagcaggtcgggcaagatgagggagatcctgcacatccagggcggccagtgcggcaaccagatcggcgccaagttctgggaggtgatctgcggcgagcactgcgtcgactccacgggccgctactcggggacctcctcgcagcagctcgagctcgagcggatcaacgtctactacaacgaggctgggggtggccgctatgtgccccgcgccgtgctcatggacctggagcccggcaccatggaatccatccgcgccggccccttcggcggcatcttccgccccgacaactttgtctacggccagtccggcgccgggaacaactgggccaagggccactacaccgagggcgccgagctcatcgactccgtccttgacgtcgtgcgcaaggaggccgagaactgcgactgcctccaaggtatgcacctacacatcaattccacgctaggctagctgttcctttcgtcgatctcgtgtttccgcagtggatcggtcgcgctctgcttcaatcatcaactctgatctcatggtattgcctgcttctgtctcgtaatttagatcgggcatttgagacacaaatgcagaggacatcgattttggtccaaatttgtacgtcacagcagtgttagaatttgtcacgtacattgtgaatctgctgcaatcatcctgca

SEQ ID NO: 130077 - DNA, 723 bp, Zea Mays
atggcaaacaagaaattaggtgccgaggtagccgacgttgaggtcgatccgcggcttcttgctcacggccggcgccgggacgtgggactcgcaccgcgggcaccgcgggtcgctccgggagatgagcacgtacaggaagcacctggggcacgccgcggccaccatcccgccgccgccggagggcgagtcgcagtcgtcgccctgctccacgccgccgccgcgccgcttcacggaggacgtggtcacggtcgacgacgacggggaggcgcccgcgccgctgtgctgctgctgctgctgggggtggttgtggtgcggatgggagggctgttgctgcctgccgcgctcgaaccgctccagggccgtcttcaccttctcgatggtgcacacgctgcggtacgtcgtcgtggcgccggcgccggcgccgcccgcggaggctggcgctggcgctggcgacggcgacggcgacggcgtcagggcgcagggcttcgtcgccgccgcgatcgggaacaggttgaggtccatcggcgttggcgggcacgcgtgcttctgctgaggcaccctcccgggcacggtgccattcctggcggacgcgtccctggcgtcgccggtggcggcgcacccgccgagaaagtcccttgtgacgagctccgccgccctcccaccgttggctccccgcgccatgaaccccagcgcctcggccgccatctcccttctcgtttctaa

SEQ ID NO: 130078 - DNA, 775 bp, Zea Mays
gccagctgcacggttgccgccgcgcgccagtgccattgctggtacgtacgacgacgtcgtaactgcacggtgacttcaaccgcaggacgaggcgcgcgcgcaccgtatatatggcgaaggtgctgtggagaaagcaggcggcggtggcggcggcggcggcagcgagcaagcaggcgggatcctcgccggtccgcggcggcgcgaagccgagagggtatgtgcccatgcggctcgtcggtggcgatgacggcgacggcggcgacgaggacgagactgtccttgtgccggtggcgctgctcaacgagcctcgcatggtggggctgctggagatggccgagcggcagtacgggtacgggcagcccggcgtgctgcggatcccctgcgacgcccgccgcttcgagcagctcatgggcctggcgtgcatggccagcaggtagaccgtagacgtagaccaccgttctgttgtggactgcctggtgtgcctgccatgcatgcatgcctacgctacatgggtgccgtgcgatgctatgtgatgttcttgcaataggccggccttgcagatatatatatctgcctgcaaccattggctttgcaatctaaagtcggttgggttgctgctttggcgtcgattggttcgggaattaatcaaccaccttgctatgagtttggatggagtgccttgcgtgcagtcgatcactttttttttttgaagcaatgactgtagagagttccctgcagtattttttttgtattaattaaagggcagtcgatcaca

SEQ ID NO: 130079 - DNA, 1015 bp, Zea Mays
gttccaacactcgacctgccccgtccgccacccctgtgcgtgcctaccacaatccacacaccccagccgcccaactgggctgggcagcagccatatactccactccaccggccggtgcgcgcgtctcaggcctctccagttccccactctcgctctgatgagggacgcggtggtggtgatggcggtgcccggaggcggaggcgggggcggaggatcggcctcgtcggcggcggcggcgccgtgcgcggcctgcaagctgctgcggcgccggtgcgcggcgggctgcgtcttcgcgccctacttcccgcccggggagccgcacaagttcgccaacgtgcacaaggtcttcggggccagcaatgtcagcaagctgctccaggagatcccggcgcagcaccgaggggacgcggtgagcagcctggtgtacgaggccaacgcgcgcgtcagggacccggtgtacggctgcgtgggcgccatctcgtcgctgcaggagcaggtggaggcgctgcaggcgcagctggcgctggcgcaggccgagatggtcaggctcaggatgaccaacgactacatcgtgcaccgcctcaaggcggccagcagggccggcggcgggggcagcagctacgccggctcgccctcgtccatgtcctcgcccaagacggcggagccggaggcgcactgcaaggccacgccggagctgctggacatggtcgtggaccagcccggcatggacgacgcccacttctggtcgtcctactagcctagggccgggatggaggccgctgacaaccgagcgcttctcttctgatctattagtcgtgtggtcgatcaggtgctgttttttgagtcacagatggtgtcatcaggtatatggtgtgcgcgcgctgtaacagcgtcacactaggaggaatggaaggcgagcgtacgtagaaggccttcttctcctataccttctaccagtatgtccagggcttgatttttttggctgtccttccatgagaaggtggaacatggttac

SEQ ID NO: 130080 - DNA, 75 bp, Zea Mays
ccccgtccattcaccgccggaccaaccgagcaaaagatgtcccggcccccggctccgcctccgcctcctacactt

SEQ ID NO: 130081 - DNA, 976 bp, Zea Mays
aattcttcgcagtcagcatctggactgtggagtctgttgtctgcgtgtctgcggctggttctctctgccaccgcacgagtcgcagcagagagggaaaaaccctagcagcctccctccgtcccaaccccgaccccatggccgcatctaacggcggcggcggccccggccccggcccgatctccgcagaggcggaggcggcgcttggagaggctatcaggctggtgttcgggcggtggacggcgctgcagatggcggtggagaaccagtggggcggccgcgactcccgcgccaaggccgaccagttgggcgagtccatcctattctggttctgccgcactaagggtccatattatttcgaagacttggtcgatatgatgtatgacaaaatttctgaatcttttaatgcctactttgaggataatagtattgaggaggttgctgaacagtttttgatcatacatgaagaatgcctgcaaaacaactattcgtctatagagaagctaaggaattctcctgttccggggaatgctgtttctcaaagtagacagatagtgggcgatgacgacgatgacagtgatagctcagatgacggtgatgacacatcgatggtggctgatgaagaggctgggccagaagagatggcagtggacaggccaaggccccccaagcctactccagacgccgatgggtggactgttgtgcctcctaggcgtggtggtcgcagcaagaaatagagtacatggtagctgctggcttttctcgcggaatgtttgttgagtgctgcggttccatattcacttgtatcgctcgatatttgacccgacatggatgttgtgagtgtgtagtatgtttggtttgccaccgcccaccaatttggtgtaaacaaggtaattattatagatgcatcctgtgatcaggttttgagtgttgcagagtcatcgtttacgtgctgcccgtcccacaaagagcttattct

SEQ ID NO: 130082 - DNA, 104 bp, Zea Mays
tcaatagtgcctaaatccacaatagatcaaaatccctctcaaagctctctcgaaccacttcaatccacctcagctcaacccaagcaactaggtgtacgtggaaa

SEQ ID NO: 130083 - DNA, 1446 bp, Zea Mays
aatgaaaaagttagaactgcatttctttcatataaaactacaatcttgtatcaacccatcataagtgttgtagtgctgaaacaagtggcccgtaattttctaggtatgtactggagcgaagagtgaacagcaatccaagcttgcagcaaggaaggtgtgatatggcttgatatcattttatttaagttggatctagtttacggagaggcttctgcattataacacttgtctgtatttccagtatgcccgcattattcagaaacttggttttccagctaagtttaaggtaactttttcatacttgtgtacattgacctgttctttgaacaatatgtacatcagttgctaagttgctgttctaagccaggattttaagattcagaatattgttggctcttgtgatgtcaagtttccaattaggcttgagggccttgcatattctcatggtgccttctcaagtgtatgtccaaggatggtttattttatcaccacagtaattcttttaccctttttgtctgcattcttggataatgacatttttcatttgttttatagtacgaaccagaactctttcctggccttatctatcggatgaaacaaccaaagattgttcttttaatttttgtttcaggcaagattgttttgactggagcaaaggttagtcgtcatttcttcttgcacatgcttaataataccgccatttgcttctcttttcccttcatttcatactccattgtttgtaggtgagagaggagacctacactgccttcgaaaacatctatcctgtactgtcagagtttagaaaaattcagcaatgatgacatgtgatgtgaaggtcacgttcttcaaattacaagcttcctcgaggattctcgtgtgaccatgaattctaaatgtacataaaagtctggcggaacttatagcatcctgtaatctctgtgagccgcggtctgtcagtattgggtgggcttgctgtggtaactggtggacatgtcgagttcatccatttgggtaggccttggtgaacacggacgccccacatcatgtctcagtttgagtagtttgtgtgaactgaagggtacgtgcttctcccatgtggttgcagcgttaacttgagtcaagtgctaacaagagtagataaaattttgccccagttcgtctttgtgacagtcttttaaagtcttttttctgagtatctttcaaagtgttttcagagtatcttccagtgtgctactgctgtgcgatgatgagaaggctggcactgtatgtaacgggggcaacgtgaccggttgtaagttatgtattgtagttgagatgctgtagcgcctagggcactgggattgaacttgtggaggaaccagtcagtcgaccgttctatttgtgtggccctctgctactgactaatgtggcctgttccaaatgtcgctgcgattttcgtttctttta

SEQ ID NO: 130084 - DNA, 1520 bp, Zea Mays
ccgatacacaacccaactcccgcacgcatctacccccaccaccagacgacctcccccctcccccgcattctctcacgccgcctgcgctctccccctcgcgagatagacaaccctagctcccgtctccttgcttaccctcctctccaacccctctccgatctctataaaagacccgaatttcgaattccccctcgaacccgcgatccgcgctttccttcccgcccatttcggtctctgattcggcgcggattcgctgcgcgggagcccccgaggttgcgtgcgtgattcggatggcggagccggggctcgagggcagccagccggtggatctgtccaagcacccctctggcatcgtccccacgctccagaatatcgtatcaacagttaatttggattgtaaacttgacctcaaagcaatagctttgcaagcacgaaatgcggagtataacccaaagcgttttgctgcagtcatcatgagaataagagaacccaaaaccacagcactgatatttgcatcgggtaaaatggtatgtactggagcgaagagtgaacagcaatccaagcttgcagcaaggaagtatgcccgcattattcagaaacttggttttccagctaagtttaaggattttaagattcagaatattgttggctcttgtgatgtcaagtttccaattaggcttgagggccttgcatattctcatggtgccttctcaagttacgaaccagaactctttcctggccttatctatcggatgaaacaaccaaagattgttcttttaatttttgtttcaggcaagattgttttgactggagcaaaggtgagagaggagacctacactgccttcgaaaacatctatcctgtactgtcagagtttagaaaaattcagcaatgatgacatgtgatgtgaaggtcacgttcttcaaattacaagcttcctcgaggattctcgtgtgaccatgaattctaaatgtacataaaagtctggcggaacttatagcatcctgtaatctctgtgagccgcggtctgtcagtattgggtgggcttgctgtggtaactggtggacatgtcgagttcatccatttgggtaggccttggtgaacacggacgccccacatcatgtctcagtttgagtagtttgtgtgaactgaagggtacgtgcttctcccatgtggttgcagcgttaacttgagtcaagtgctaacaagagtagataaaattttgccccagttcgtctttgtgacagtcttttaaagtcttttttctgagtatctttcaaagtgttttcagagtatcttccagtgtgctactgctgtgcgatgatgagaaggctggcactgtatgtaacgggggcaacgtgaccggttgtaagttatgtattgtagttgagatgctgtagcgcctagggcactgggattgaacttgtggaggaaccagtcagtcgaccgttctatttgtgtggccctctgctactgactaatgtggcctgttccaaatgtcgctgcgattttcgtttctttt

SEQ ID NO: 130085 - DNA, 1345 bp, Zea Mays
aatgaaaaagttagaactgcatttctttcatataaaactacaatcttgtatcaacccatcataagtgttgtagtgctgaaacaagtggcccgtaattttctaggtatgtactggagcgaagagtgaacagcaatccaagcttgcagcaaggaaggtgtgatatggcttgatatcattttatttaagttggatctagtttacggagaggcttctgcattataacacttgtctgtatttccagtatgcccgcattattcagaaacttggttttccagctaagtttaaggtaactttttcatacttgtgtacattgacctgttctttgaacaatatgtacatcagttgctaagttgctgttctaagccaggattttaagattcagaatattgttggctcttgtgatgtcaagtttccaattaggcttgagggccttgcatattctcatggtgccttctcaagtgtatgtccaaggatggtttattttatcaccacagtaattcttttaccctttttgtctgcattcttggataatgacatttttcatttgttttatagtacgaaccagaactctttcctggccttatctatcggatgaaacaaccaaagattgttcttttaatttttgtttcaggcaagattgttttgactggagcaaaggtgagagaggagacctacactgccttcgaaaacatctatcctgtactgtcagagtttagaaaaattcagcaatgatgacatgtgatgtgaaggtcacgttcttcaaattacaagcttcctcgaggattctcgtgtgaccatgaattctaaatgtacataaaagtctggcggaacttatagcatcctgtaatctctgtgagccgcggtctgtcagtattgggtgggcttgctgtggtaactggtggacatgtcgagttcatccatttgggtaggccttggtgaacacggacgccccacatcatgtctcagtttgagtagtttgtgtgaactgaagggtacgtgcttctcccatgtggttgcagcgttaacttgagtcaagtgctaacaagagtagataaaattttgccccagttcgtctttgtgacagtcttttaaagtcttttttctgagtatctttcaaagtgttttcagagtatcttccagtgtgctactgctgtgcgatgatgagaaggctggcactgtatgtaacgggggcaacgtgaccggttgtaagttatgtattgtagttgagatgctgtagcgcctagggcactgggattgaacttgtggaggaaccagtcagtcgaccgttctatttgtgtggccctctgctactgactaatgtggcctgttccaaatgtcgctgcga

SEQ ID NO: 130086 - DNA, 2819 bp, Zea Mays
ccgatacacaacccaactcccgcacgcatctacccccaccaccagacgacctcccccctcccccgcattctctcacgccgcctgcgctctccccctcgcgagatagacaaccctagctcccgtctccttgcttaccctcctctccaacccctctccgatctctataaaagacccgaatttcgaattccccctcgaacccgcgatccgcgctttccttcccgcccatttcggtctctgattcggcgcggattcgctgcgcgggagcccccgaggttgcgtgcgtgattcggatggcggagccggggctcgagggcagccagccggtggatctgtccaagcacccctctggcatcgtccccacgctccatggcatattcctgaaatgtgtgggcagctcggtcccgttgaaccgggggatgaagccattccttgcggccatctctgtgtcaccaggtgcgagcgcattcaaacggaggggcacatggggaagcttcgagctcaaggaaagcggaggaaatgagatggatggagaatatgcaaggcactggatgagcgcggacgtgaagagtagggtgagctccagcgtgggaaggagcgggtccgatgatctcttccggccatatgagatctctggttgggcaggttacgcatctctggtggcagcaattctgaaattgcacgagactgtgcgaatggattggccaaactcttgggcggctgtagttcccagctcttctgtgatgttgcgcgactgcggtacaatgttgaaaatcaggctttgctcacacgaagaaggcaacaaggataggtgtagagacaatggctggtggtgccatggtggcattaatacaccagctggtttcatcccaccaaatccttcaaactaaacaaaaattggaatggacatatccctccaaccaaacaagagctgggtcaattccgcccaaaaaatagggacatgaccattccatcctacttagtgtccaaaccaaaagcaacctaagggactggtttttgtgaaagattttttattatgatttaggtaaaaaatctacaggagatttcaacttcgtgtgggatttaagtgctatttgcttattagtgccacaacgagtcctgaaatgactttgatacaaaactttttatgatccaaccattataatgtaggttatcttgaatgatagtcttacatttattatgatttgtagttttgtacatgttggaaattggcaggaacaagaaattaatagcacgcatatcatatgaaaaggaatgatgaaaatcattttgtagtgtccctacaatgctaaaaacttacaataagaatcatatgttgcttttacaaaacaaaattcacatgtttactgaagttcttcaatcattgtctgcttgatgtgatgtcattttttcatgacaggaatatcgtatcaacagttaatttggattgtaaacttgacctcaaagcaatagctttgcaagcacgaaatgcggagtataacccaaagcgttttgctgcagtcatcatgagaataagagaacccaaaaccacagcactgatatttgcatcgggtaaaatggtatgtactggagcgaagagtgaacagcaatccaagcttgcagcaaggaaggtgtgatatggcttgatatcattttatttaagttggatctagtttacggagaggcttctgcattataacacttgtctgtatttccagtatgcccgcattattcagaaacttggttttccagctaagtttaaggtaactttttcatacttgtgtacattgacctgttctttgaacaatatgtacatcagttgctaagttgctgttctaagccaggattttaagattcagaatattgttggctcttgtgatgtcaagtttccaattaggcttgagggccttgcatattctcatggtgccttctcaagtgtatgtccaaggatggtttattttatcaccacagtaattcttttaccctttttgtctgcattcttggataatgacatttttcatttgttttatagtacgaaccagaactctttcctggccttatctatcggatgaaacaaccaaagattgttcttttaatttttgtttcaggcaagattgttttgactggagcaaaggtgagagaggagacctacactgccttcgaaaacatctatcctgtactgtcagagtttagaaaaattcagcaatgatgacatgtgatgtgaaggtcacgttcttcaaattacaagcttcctcgaggattctcgtgtgaccatgaattctaaatgtacataaaagtctggcggaacttatagcatcctgtaatctctgtgagccgcggtctgtcagtattgggtgggcttgctgtggtaactggtggacatgtcgagttcatccatttgggtaggccttggtgaacacggacgccccacatcatgtctcagtttgagtagtttgtgtgaactgaagggtacgtgcttctcccatgtggttgcagcgttaacttgagtcaagtgctaacaagagtagataaaattttgccccagttcgtctttgtgacagtcttttaaagtcttttttctgagtatctttcaaagtgttttcagagtatcttccagtgtgctactgctgtgcgatgatgagaaggctggcactgtatgtaacgggggcaacgtgaccggttgtaagttatgtattgtagttgagatgctgtagcgcctagggcactgggattgaacttgtggaggaaccagtcagtcgaccgttctatttgtgtggccctctgctactgactaatgtggcctgttccaaatgtcgctgcga

SEQ ID NO: 130087 - DNA, 1126 bp, Zea Mays
aatgaaaaagttagaactgcatttctttcatataaaactacaatcttgtatcaacccatcataagtgttgtagtgctgaaacaagtggcccgtaattttctaggtatgtactggagcgaagagtgaacagcaatccaagcttgcagcaaggaaggtgtgatatggcttgatatcattttatttaagttggatctagtttacggagaggcttctgcattataacacttgtctgtatttccagtatgcccgcattattcagaaacttggttttccagctaagtttaaggattttaagattcagaatattgttggctcttgtgatgtcaagtttccaattaggcttgagggccttgcatattctcatggtgccttctcaagttacgaaccagaactctttcctggccttatctatcggatgaaacaaccaaagattgttcttttaatttttgtttcaggcaagattgttttgactggagcaaaggtgagagaggagacctacactgccttcgaaaacatctatcctgtactgtcagagtttagaaaaattcagcaatgatgacatgtgatgtgaaggtcacgttcttcaaattacaagcttcctcgaggattctcgtgtgaccatgaattctaaatgtacataaaagtctggcggaacttatagcatcctgtaatctctgtgagccgcggtctgtcagtattgggtgggcttgctgtggtaactggtggacatgtcgagttcatccatttgggtaggccttggtgaacacggacgccccacatcatgtctcagtttgagtagtttgtgtgaactgaagggtacgtgcttctcccatgtggttgcagcgttaacttgagtcaagtgctaacaagagtagataaaattttgccccagttcgtctttgtgacagtcttttaaagtcttttttctgagtatctttcaaagtgttttcagagtatcttccagtgtgctactgctgtgcgatgatgagaaggctggcactgtatgtaacgggggcaacgtgaccggttgtaagttatgtattgtagttgagatgctgtagcgcctagggcactgggattgaacttgtggaggaaccagtcagtcgaccgttctatttgtgtggcc

SEQ ID NO: 130088 - DNA, 1374 bp, Zea Mays
cgatacacaacccaactcccgcacgcatctacccccaccaccagacgacctcccccctcccccgcattctctcacgccgcctgcgctctccccctcgcgagatagacaaccctagctcccgtctccttgcttaccctcctctccaacccctctccgatctctataaaagacccgaatttcgaattccccctcgaacccgcgatccgcgctttccttcccgcccatttcggtctctgattcggcgcggattcgctgcgcgggagcccccgaggttgcgtgcgtgattcggatggcggagccggggctcgagggcagccagccggtggatctgtccaagcacccctctggcatcgtccccacgctccacgttttgctgcagtcatcatgagaataagagaacccaaaaccacagcactgatatttgcatcgggtaaaatggtatgtactggagcgaagagtgaacagcaatccaagcttgcagcaaggaagtatgcccgcattattcagaaacttggttttccagctaagtttaaggattttaagattcagaatattgttggctcttgtgatgtcaagtttccaattaggcttgagggccttgcatattctcatggtgccttctcaagttacgaaccagaactctttcctggccttatctatcggatgaaacaaccaaagattgttcttttaatttttgtttcaggcaagattgttttgactggagcaaaggtgagagaggagacctacactgccttcgaaaacatctatcctgtactgtcagagtttagaaaaattcagcaatgatgacatgtgatgtgaaggtcacgttcttcaaattacaagcttcctcgaggattctcgtgtgaccatgaattctaaatgtacataaaagtctggcggaacttatagcatcctgtaatctctgtgagccgcggtctgtcagtattgggtgggcttgctgtggtaactggtggacatgtcgagttcatccatttgggtaggccttggtgaacacggacgccccacatcatgtctcagtttgagtagtttgtgtgaactgaagggtacgtgcttctcccatgtggttgcagcgttaacttgagtcaagtgctaacaagagtagataaaattttgccccagttcgtctttgtgacagtcttttaaagtcttttttctgagtatctttcaaagtgttttcagagtatcttccagtgtgctactgctgtgcgatgatgagaaggctggcactgtatgtaacgggggcaacgtgaccggttgtaagttatgtattgtagttgagatgctgtagcgcctagggcactgggattgaacttgtggaggaaccagtcagtcgaccgttctatttgtgtggcc

SEQ ID NO: 130089 - DNA, 1977 bp, Zea Mays
ccgatacacaacccaactcccgcacgcatctacccccaccaccagacgacctcccccctcccccgcattctctcacgccgcctgcgctctccccctcgcgagatagacaaccctagctcccgtctccttgcttaccctcctctccaacccctctccgatctctataaaagacccgaatttcgaattccccctcgaacccgcgatccgcgctttccttcccgcccatttcggtctctgattcggcgcggattcgctgcgcgggagcccccgaggttgcgtgcgtgattcggatggcggagccggggctcgagggcagccagccggtggatctgtccaagcacccctctggcatcgtccccacgctccatggcatattcctgaaatgtgtgggcagctcggtcccgttgaaccgggggatgaagccattccttgcggccatctctgtgtcaccaggtgcgagcgcattcaaacggaggggcacatggggaagcttcgagctcaaggaaagcggaggaaatgagatggatggagaatatgcaaggcactggatgagcgcggacgtgaagagtagggtgagctccagcgtgggaaggagcgggtccgatgatctcttccggccatatgagatctctggttgggcaggttacgcatctctggtggcagcaattctgaaattgcacgagactgtgcgaatggattggccaaactcttgggcggctgtagttcccagctcttctgtgatgttgcgcgactgcggtacaatgttgaaaatcaggctttgctcacacgaagaaggcaacaaggataggaatatcgtatcaacagttaatttggattgtaaacttgacctcaaagcaatagctttgcaagcacgaaatgcggagtataacccaaagcgttttgctgcagtcatcatgagaataagagaacccaaaaccacagcactgatatttgcatcgggtaaaatggtatgtactggagcgaagagtgaacagcaatccaagcttgcagcaaggaagtatgcccgcattattcagaaacttggttttccagctaagtttaaggattttaagattcagaatattgttggctcttgtgatgtcaagtttccaattaggcttgagggccttgcatattctcatggtgccttctcaagttacgaaccagaactctttcctggccttatctatcggatgaaacaaccaaagattgttcttttaatttttgtttcaggcaagattgttttgactggagcaaaggtgagagaggagacctacactgccttcgaaaacatctatcctgtactgtcagagtttagaaaaattcagcaatgggtggatggctacagcgtgcagttgacttatgtcatgtactcatttatggaacatgtgtgggactgggcacctatgacatgtgatgtgaaggtcacgttcttcaaattacaagcttcctcgaggattctcgtgtgaccatgaattctaaatgtacataaaagtctggcggaacttatagcatcctgtaatctctgtgagccgcggtctgtcagtattgggtgggcttgctgtggtaactggtggacatgtcgagttcatccatttgggtaggccttggtgaacacggacgccccacatcatgtctcagtttgagtagtttgtgtgaactgaagggtacgtgcttctcccatgtggttgcagcgttaacttgagtcaagtgctaacaagagtagataaaattttgccccagttcgtctttgtgacagtcttttaaagtcttttttctgagtatctttcaaagtgttttcagagtatcttccagtgtgctactgctgtgcgatgatgagaaggctggcactgtatgtaacgggggcaacgtgaccggttgtaagttatgtattgtagttgagatgctgtagcgcctagggcactgggattgaacttgtggaggaaccagtcagtcgaccgttctatttgtgtggcc

SEQ ID NO: 130090 - DNA, 905 bp, Zea Mays
ccgatacacaacccaactcccgcacgcatctacccccaccaccagacgacctcccccctcccccgcattctctcacgccgcctgcgctctccccctcgcgagatagacaaccctagctcccgtctccttgcttaccctcctctccaacccctctccgatctctataaaagacccgaatttcgaattccccctcgaacccgcgatccgcgctttccttcccgcccatttcggtctctgattcggcgcggattcgctgcgcgggagcccccgaggttgcgtgcgtgattcggatggcggagccggggctcgagggcagccagccggtggatctgtccaagcacccctctggcatcgtccccacgctccagaatatcgtatcaacagttaatttggattgtaaacttgacctcaaagcaatagctttgcaagcacgaaatgcggagtataacccaaagcgttttgctgcagtcatcatgagaataagagaacccaaaaccacagcactgatatttgcatcgggtaaaatggtatgtactggagcgaagagtgaacagcaatccaagcttgcagcaaggaagtatgcccgcattattcagaaacttggttttccagctaagtttaaggattttaagattcagaatattgttggctcttgtgatgtcaagtttccaattaggcttgagggccttgcatattctcatggtgccttctcaagttacgaaccagaactctttcctggccttatctatcggatgaaacaaccaaagattgttcttttaatttttgtttcaggcaagattgttttgactggagcaaaggtgagagaggagacctacactgccttcgaaaacatctatcctgtactgtcagagtttagaaaaattcagcaatgcgttaacttgagt

SEQ ID NO: 130091 - DNA, 1409 bp, Zea Mays
ccttatcccctcgttaacacctccccacatctcgttccttgtcctctccatttcgagctcaagctcaatcacttcggattggcggcgggcacgcgccggacgaaatggaagcggcaccatccgcccgcgccttctccccgtcctcgtctccctccgcgggggctagacccagccttcccctcgcgggcctggcctcgcggcgcgcccgggtgctcgcggcgccgcccccgccccgcgccgtcgcctcctcccgcgcgccgctggtggtctccagcccgccaccgccggaggactccggcacgcacaaccccgcgcacgccaaggtcgaccgctccggccgcttctgcagcccccgcgccgcacgggaactcgcgctgatgatttcctacgccgcgtgtctggagggaaccgatgttgtccggctcttcgatcgcaggatcagcgcaaggcgaggcatgcctattgaattacaaccatatgagctttggcgggggaccgctcgaggttggaacggagcaggaggctgagaagctggccagtcagaacgataaggattcagccaacgaagcagatgtactttcagctcctccaaaacttgtttacaacaactatgtattacggttgtccagggaacttttagtggctgttgccagtggatgggataagcatgtggttatcatcgacaaaataattccccaggcttggaaggatgaacctgtggcaaggattcttgagctctgcattctacatattgctatggctgagatggcatcaaaaggaacaccccacaaagttgtcattaatgaggcagtagatctggcaaagcgattttgtgatggtggtgcccctcgggtaatcaacggatgccttcgaacatttgtgaaggatcatgttgatgttgcaggcacgagccaggaagctaaatcaaaatcatgattttttgcaaatactcatacaacaaaatggtggctgaagtaaagaagtacggagagaaccttgctgtcttgagttcaggcgaataccttctgtctccaaggtttagccttcaacctaagggaatctaaaaggtaaacatgatggactcatcaaggagccacaacacgttcattcttttagaatgttcggttattaggtgaagtatacagagctgtaaaccggtgatgcacattcatgcttcatctaaaacaaccgaaggttatggcttctgatagcctactcgacgcagatcgttaaatgatcagatattaagatgaccaggagttgtgtaaaagcttgatgcatatgtaaaatgttatatatacttggcattggctcattgcaatgggagaaggatattctagtttcataagttgatgtaagacatgtacgctcattttaggattattaatcgcatattgtgtttgcttcta

SEQ ID NO: 130092 - DNA, 1431 bp, Zea Mays
ccttatcccctcgttaacacctccccacatctcgttccttgtcctctccatttcgagctcaagctcaatcacttcggattggcggcgggcacgcgccggacgaaatggaagcggcaccatccgcccgcgccttctccccgtcctcgtctccctccgcgggggctagacccagccttcccctcgcgggcctggcctcgcggcgcgcccgggtgctcgcggcgccgcccccgccccgcgccgtcgcctcctcccgcgcgccgctggtggtctccagcccgccaccgccggaggactccggcacgcacaaccccgcgcacgccaaggtcgaccgctccggccgcttctgcagcccccgcgccgcacgggaactcgcgctgatgatttcctacgccgcgtgtctggagggaaccgatgttgtccggctcttcgatcgcaggatcagcgcaaggcgagaacccgggtttgttttcaacaaggcatgcctattgaattacaaccatatgagctttggcgggggaccgctcgaggttggaacggagcaggaggctgagaagctggccagtcagaacgataaggattcagccaacgaagcagatgtactttcagctcctccaaaacttgtttacaacaactatgtattacggttgtccagggaacttttagtggctgttgccagtggatgggataagcatgtggttatcatcgacaaaataattccccaggcttggaaggatgaacctgtggcaaggattcttgagctctgcattctacatattgctatggctgagatggcatcaaaaggaacaccccacaaagttgtcattaatgaggcagtagatctggcaaagcgattttgtgatggtggtgcccctcgggtaatcaacggatgccttcgaacatttgtgaaggatcatgttgatgttgcaggcacgagccaggaagctaaatcaaaatcatgattttttgcaaatactcatacaacaaaatggtggctgaagtaaagaagtacggagagaaccttgctgtcttgagttcaggcgaataccttctgtctccaaggtttagccttcaacctaagggaatctaaaaggtaaacatgatggactcatcaaggagccacaacacgttcattcttttagaatgttcggttattaggtgaagtatacagagctgtaaaccggtgatgcacattcatgcttcatctaaaacaaccgaaggttatggcttctgatagcctactcgacgcagatcgttaaatgatcagatattaagatgaccaggagttgtgtaaaagcttgatgcatatgtaaaatgttatatatacttggcattggctcattgcaatgggagaaggatattctagtttcataagttgatgtaagacatgtacgctcattttaggattattaatcgcatattgtgtttgcttct

SEQ ID NO: 130093 - DNA, 2135 bp, Zea Mays
ccttatcccctcgttaacacctccccacatctcgttccttgtcctctccatttcgagctcaagctcaatcacttcggattggcggcgggcacgcgccggacgaaatggaagcggcaccatccgcccgcgccttctccccgtcctcgtctccctccgcgggggctagacccagccttcccctcgcgggcctggcctcgcggcgcgcccgggtgctcgcggcgccgcccccgccccgcgccgtcgcctcctcccgcgcgccgctggtggtctccagcccgccaccgccggaggactccggcacgcacaaccccgcgcacgccaaggtcgaccgctccggccgcttctgcagcccccgcgccgcacgggaactcgcgctgatgatttcctacgccgcgtgtctggagggaaccgatgttgtccggctcttcgatcgcaggatcagcgcaaggcgagaacccgggtttgttttcaacaaggcatgcctattgaattacaaccatatgagctttggcgggggaccgctcgaggttggaacggagcaggaggctgagaagctggccagtcagaacgataaggattcagccaacgaagcagatgtactttcagctcctccaaaacttgtttacaacaactatgtattacggttgtccagggaacttttagtggctgttgccagtggatgggataagcatgtggttatcatcgacaaaataattccccaggcttggaaggttagataccttttcctaatcttctatgttgattcatcaatcccttctacatgcatcacagcatcaaactatttatatgttcagcagtctggttcaaacatgtacttattctgtatattacaccactgtttttcacactacactgtactagtgaacaatcactctgatgcataccagaagctgtttacagtttggtttgaacatatccttattctgtatattacaccactgtttttcattgcactgaaatagtgaacaagcactatgatgcataacagaagtgtatgaccatcaaggatgattttctgccttgtgtttcagcatgcagtgaaatattgagatctcacattgttatttaattattttagactaatgccttaccttattacgaattaattttctagcatagttaattagttatttctgtttgccaccccaaggatgaggaagtgatacataatctgaagaatgtaccttccttaatctgaatcactttgtttctatatttgtttctactaccagagctcagatgtttttatagtaaaaaaaatatatgaaacacaatatactttgctttcagtttataatctaccggttttttaactgttgtcctaatatgtgtttgtatatattttaatatttagttttttgcgtcctgttttatggcataacctgctgttggtacatggaaaatttcatggtcaggatgaacctgtggcaaggattcttgagctctgcattctacatattgctatggctgagatggcatcaaaaggaacaccccacaaagttgtcattaatgaggcagtagatctggcaaagcgattttgtgatggtggtgcccctcgggtaatcaacggatgccttcgaacatttgtgaaggatcatgttgatgttgcaggcacgagccaggaagctaaatcaaaatcatgattttttgcaaatactcatacaacaaaatggtggctgaagtaaagaagtacggagagaaccttgctgtcttgagttcaggcgaataccttctgtctccaaggtttagccttcaacctaagggaatctaaaaggtaaacatgatggactcatcaaggagccacaacacgttcattcttttagaatgttcggttattaggtgaagtatacagagctgtaaaccggtgatgcacattcatgcttcatctaaaacaaccgaaggttatggcttctgatagcctactcgacgcagatcgttaaatgatcagatattaagatgaccaggagttgtgtaaaagcttgatgcatatgtaaaatgttatatatacttggcattggctcattgcaatgggagaaggatattctagtttcataagttgatgtaagacatgtacgctcattttaggattattaatcgcatattgtgtttgcttc

SEQ ID NO: 130094 - DNA, 729 bp, Zea Mays
atggcggagcagagtggaggacgacgcgatggggcggatcctcggccaccttccatcgatggcttggctgccatggcatgtgatggggaaggtaagggaggaggttgttccgtgcgagcgccatcacgagcggggggagcggacggatggcagcaatctcgagcagagggaggagcggatccgatgcagaggggtaggagatcctcggatccatgggtgagggctcggtcgccttccatcgacagggctgggttgtggcggagaggggcgaggaccaccgggatgtgcgagcgaggggaggacagaggcatagcgtctatggcatggacaagtattgcgggggcagggcggagggggcagctaggggcgtcggatggaggcagggccgcgtgggtacctgtcgtggtgggtgaggcgagcggaggcctcgcgagcgtggcggagaggggcgaggaccaccgcgagagcgtgccgagaccgggcaagcgggcgagatccaagcgcggtggaggcgtgcatcatgggcgagatccgcgggtgggttccatgcgcggacacagggaggtggagcacaggcagagggaaaggcggtgtggggaggagggtaggggatccgcggcaccttccatcggcggcaagaggaccttccatccgcgtggcataggcagaatcgtgcaccactcaattgtggacgcctacactctcctcttaaggagtagtagagaataa

SEQ ID NO: 130095 - DNA, 1866 bp, Zea Mays
agtccccattgtccactccctccaaatccccgttgcgtcggccacacctcttcctcttacgcgttacacatcttcctcttcctctaaaattaaccgagcgtctcgaccctgcgaattcatacgcgcgcgcgcgcgcgtgtgcacgtgcgcaggcgcggctggtagcctgcagacaccgacacgtagcagcggcgtcccgtcttccatcttccatggcggcggcgagctatgatcggttggccgtcgcggcgtccgctgtggtggtggcggcggtggcgctggcggtcgctgggctgccggcggctggagcgctcggggtgaactggggcacgatggcgacgcaccagctgccgccggccaccgtggtgcggatgctggaggacaacggcatcaggaaggtgaagcttttcgacgccgacgccggccccatggacgcgctcgccggcaccagcgtggaggtcatggtggccatccccaacaacatgctcgacatgatgacggactacggcacggccagggactgggtgcgccagaacgtcagccgctataacttcgacggcggcgtgaacatcaagtacgtagctgtcgggaatgagcccttcctgtcgtctttcaacggcacgttcctgaacgtcacgttgcccgccctgcagaacatccagcgcgcgctgaacgacgccggcttcggcgacaccatcaaggcgacggtgccgctgaacgccgacgtgtacaactcgcccaaggacaacctggtgccgtcggcggggcggttccggcccgacatcgccggcctcatgacggagatcgtgcagttcctgaaccagagcggcgcgcccttcaccgtcaacatctacccgttcctgagcctctacgacaacgacgacttcccgctggactacgccttcttcgacggcacgggcagccccgtcgtggacaacggcatccagtacaccaacgtgttcgacgccaacttcgacacgctcgtgtccgcgctggccgcggcgggcgtcggcggcctccccgtcgtggtcggcgaggtcgggtggccgaccgacggcgacaagcacgccacggccgcgttcgcgcagaagttctacgcgggcctgctgcggaagctggcggccagcgccggcacgccgctgcgcccgggccagtacatcgaggtctacctgttcagcctcatcgacgaggacgccaagagcgtggcgccgggcaacttcgagcgccactggggcatcatgcgctacgacggccagcccaagtacgccatggacctgtctgggcagggccggaacacggcgctcgtggcggcgcggggggtccagtacctgccccgccagtggtgcgtcgtcaaccccaacgcgcaggacacgagcaagatcggcgacagcgtcacctacgcctgcaccttctccgactgcacctcgctcggctacggctcctcgtgcaacggcctggacgccgccggcaacgcgtcctacgccttcaacatgtacttccaggtgcagaaccaggtggagggcagctgctacttccagggcctcgccgtgcccacgtcgcagaacccgtccacggacgcctgcaacttcaccatacagatcactccgtcggcagcggggagacgacgcgccgccgccgcgacagctctgctcctcgtggttcttcttgcggccgtgcatgtcgcgccataactgagcccgtgactcggctcatgttgtcaccaattattaggacttagaaaagaaagatacttttctaaattttcggaagacatcatgggaatttagaagcccgatgttttatggaaatttagaagcccgccgctgtaaaaagaatcaacaaccccgaatgaaatgattttttgtt

SEQ ID NO: 130096 - DNA, 1887 bp, Zea Mays
atggcgctcacgcgcgggcgagcgcgcactgcccccgccgtccccagcgcctgcttcctactactcctcctcctcctcctcacatcctcctcactcctcgccgcccccaccagcggcagggcagagtccgggggcgggtcagttctcggtgacgcctcgtcctcctccggaaaggcacggggggacagctgcgaggagctgcagtccatcagcggcggggaggcccggtgcgcgtacctccgcgcgcagaactcgccctgctccccggcggggtacgtggactacctgcgcctcttctactgcgccttcgccggcgcgccggcggcggccgcgtgcgccgcgctcgcgctgtggctcgcggtgctcttctacctcctgggcgacaccgcgtccgagtacttctgcgcgtcgctggagggcctgtcggcggcgctgcgcctgccccccgccgtcgcgggcgtcacgctgctctcgctggggaacggcgcgcccgacgtgttcgccagcgtcgtgtccttcgcgtcgggcgacgacggcggcggcggggtcgggctcggcagcgcgctcggcggggcgctgttcgtctccaccgtcgtcgcgggcgccgtcgcgctcgccgtgggcgcgcggggcggggccgtcgtcgagtggcgcggcttcgtgcgcgacctctgcttcctcctcctcgcgctctgctacctgctggcggtgctcgtccacggggaggtcaccgtctgggtggccgcgtcgttcgtctcgctctacgtcggctacgtcgtcctcgtctggacctcccactgctgcaccgagaagggcaagccggccgccgacagcctctcggcgccgctcctcctcgacgacgacgacgacgtgggcgacgtcgtcccgtcgctgccgtcccacaccaagacggaggcgtccagcacggccacgtcgagggtcattgcgacgctgcattgcctcgcggccgcgctgtgcatgccgctgtacctgccgcgccgcctgaccatcccggacatcgcggggcaccgctggtcccggccctacgccgtggcctccgcggcgctggcgccggtcctcatcgccgtgacctggagctcgcagcgccacaacccgacgtcgtggcacggcctcgcggtcctcgtaggaggcgcgctcctgggcctcctgctcgcggcgctcgcggcggccaccacggacgcgagctcgcccccgcgcgggcggaggcggcgcgtgccgtggctcgccgcggggttcgtgatgagcgtgctgtgggcgtacaccctggcgcgcgagctggtggcgctgctggtggccatcgggtacgtggccgggatcaagccgagcgtgctgggcgtgacggtgctggcgtggggcgactccctgggcgacctggtgtcgaacgtggcgatggcggtgcacggcgggcccggcggcgcgcagacggccgtgtccgggtgctacgccggcccgctgttcaacacggtggtggggctgggcctgtcgctggcgctggcggcgggcgcgcagcacccggccccgttcgcggtgcccgtggacgcggcggcgtacgaggcggtggggttcctgggcgcggcgctggcgtgggcgctgttcgtggtgcccgtccgagggatgcggatcgaccgcgtctacggggtcgggctcatcgctatctacctctgcttcttcgccgtgcgcgtctccgagacgctggggctctggagctaggactgggaagcctgcctggccgcgatcgttcgtttgtttcttgctgctgctgatgaccgctgtgaatgatccaactgatggtggtggatctagattgatggcaaaatgataggggtacagaaaggatgaagggtagataaccttgtacgtacttat

SEQ ID NO: 130097 - DNA, 120 bp, Zea Mays
cgtcgcggtggtggacggttgcacgggcagcggcggcgcacgagcgggccgtttcttttaactttttcagcttttaactactagaagatattgcgaactatcaaacacctagattttcaa

SEQ ID NO: 130098 - DNA, 275 bp, Zea Mays
ctccggttcagcttaccactaggtcaatgaactgaatccgtcatgtcacagtttccctaatccctaccctaaaaatttaggggatcctgttttcctttccctgacaaatcagcttaattgacttagcgctgtgtactgaacacacgatgctcaagctccccattccataccatgcccatttttcgtgtaattgtgctaaactttatacagtactaataaagtgtaagtgccaggcactacagttgacagttgttgtttcatacatattcaattta

SEQ ID NO: 130099 - DNA, 3379 bp, Zea Mays
cttttataaatgaaacccacgaacccctcagatttcccgtgctcatcatcaccagttcaccacccacctcccactcccagttcaccccgtcgtcctcggcgccaccactcctcgtcccccggcgctactcccccgctccacggtccaaggaaagatggcgtcccatattgttggataccctcgcatgggccccaagagggagctcaagtttgccttggagtctttctgggatgggaagagcagcgccgaggatttggagaaagttgccactgacctgaggtctagcatctggaagcaaatgtcagaagctgggatcaagtacattcccagcaataccttctcgtactacgaccaggttcttgataccacggccatgcttggcgctgtcccagagcgctactcttggactggaggcgagattggcttgagcacctacttctctatggccaggggaaatgccactgtccctgccatggagatgaccaagtggtttgatacaaactaccactttattgtccctgaacttggtccaagcaccaagttcacatacgcttctcacaaggctgtttctgagtacaaggaggcaaaggcgctcggcattgatacagtcccagtgcttgttggaccagtctcatacttgctcctctctaagcctgccaagggtgtggagaaatctttctctcttctttcacttcttggtagcattcttcccatctacaaggaggttgttgctgagctgaaggcagctggtgcttcatggattcagcttgatgagcctacccttgttaaagaccttgatgctcacgaattggccgcattctcttcagcatatgctgaactggagtcatcgttctctggattgaatgtgcttatcgagacatacttcgctgatattcctgctgagtcctacaagaccctcacatcattgagtggtgtgactgcttacggtttcgatcttatccgtggagccaagacccttgatcttatcaggagcagcttcccctctgggaagtacctcttcgctggtgttgtagatggacgcaacatttgggctgatgatcttgctgcatctcttagcactcttcattctcttgaggctgttgctggcaaggacaaacttgtggtgtcaacctcctgctcactgatgcacaccgctgttgaccttgtaaatgagactaagctggatgatgagattaagtcatggcttgcatttgctgcccaaaaggttgttgaggttaatgcccttgccaaggctttggcaggccaaaaggatgaggtctactttgcagccaatgctgctgctcaggcctcaaggagatcatcgcccagggtgacaaacgaggaggtccagaaggctgcagctgctttgaggggatctgaccaccgccgttctaccactgtttctgctagattggatgctcagcagaaaaagctcaaccttcctgtccttcccacaaccacaattggttcattccctcagactgtggaactcaggagggttcgccgtgaatacaaggcaaagaagatcaccgaggacgaatacatcagtgccatcaaggaagaaatcagcaaggtcgtcaagatccaagaggagcttgacattgatgtgcttgtgcatggagagccagagagaaatgacatggttgagtacttcggtgagcaattatctggttttgcgttcactgccaacggatgggtgcaatcctatggatcacgctgtgtgaagccacccattatctacggtgatgtcagccggccgaaccccatgactgttttctggtccaagatggcacagagcatgacccctcgtcccatgaagggaatgttgactggtccggtcacaatcctcaactggtcattcgtcaggaacgaccagcctaggtttgagacatgctaccaaatagctcttgcaatcaaaaaggaggttgaggatcttgaggctgctggtattcaggtgatccagatcgatgaggcagctctaagggagggtctgccactacgcaagtcagagcatgcattctacctggactgggctgtccactctttcaggatcaccaactgcggagtccaggacaccacccagatccacacccacatgtgctactccaacttcaacgacatcatccactccatcatcgacatggatgccgatgtgatcacgatcgagaactcccggtctgacgagaagctactgtccgtcttccgtgagggtgtgaagtacggagctggcattggccctggtgtctacgacatccactctcctaggattccctccacagaggagatcgcagaccgcgtcgagaagatgctcgccgtgctcgacaccaacatcctctgggtgaaccctgactgtggtctcaagacacgcaagtacacggaggtcaagcccgccctgaccaacatggtctcggccaccaagctcatccgcacccagcttgccagcgcgaaatgaggtcgtttgatagctccatggtctgatagcgcggaatgagccagttgttttgaataatttgggtgttaccccctgttccatggtgttagtgttaggttagcctctcattggtgagatacgccgtttcaagatgtgttctaagtttggagtgtgtgttttcctttgggctatgtttctgggggtatgtgtgtgctttggttataaacagaaatgaaatatgcagtcttccaattgtatcaccatctgcattggcatgtcctccttgcagaggggaatgccattgccgtgctattgcacatgatacatcatacatgtagacatatagttgttttcacagtaacgctatatacaggacagtggcaccaacccccaccaatgcaaggaccaggaggaagctaagaacacgcagatttctgatcttcctccaccacctcccgtcctcacccttgccatcaccatcgttgttcctggctgcattttcagttgcaccaccgtctcctcccgtgtccgccctcatcagctcttcaagagaatgtgcgcgctccgcagggtgacgctccttctgactgtccttggacgacgatgacgatcccttgggcttgggcaggacgacggagagctgggccctctcggtgtctagcctggcctggatggtgccggcgtcgcagctcctgggcaccgggaccaccttgaggaagcgcgcccaccggccgccgtcggccctgcgctccccggtgaccttcagcctgggcgcgccgtcgggctggcgcccgccggtggccttcagcttcttccgccggacgctgtacacgaccttcagctcgtccttcttgaaccctgaatgggtggaagagagaccgtttgttgttcgtaaggcgcatgcagccgcgcaggcgacaggttctctggtgcgacgtgcggtctcgc

SEQ ID NO: 130100 - DNA, 2615 bp, Zea Mays
gtctccccgcgcctcccggatcgcctcggcgcgcgaaagatggcgtcccatattgttggataccctcgcatgggccccaagagggagctcaagtttgccttggagtctttctgggatgggaagagcagcgccgaggatttggagaaagttgccactgacctgaggtctagcatctggaagcaaatgtcagaagctgggatcaagtacattcccagcaataccttctcgtactacgaccaggttcttgataccacggccatgcttggcgctgtcccagagcgctactcttggactggaggcgagattggcttgagcacctacttctctatggccaggggaaatgccactgtccctgccatggagatgaccaagtggtttgatacaaactaccactttattgtccctgaacttggtccaagcaccaagttcacatacgcttctcacaaggctgtttctgagtacaaggaggcaaaggcgctcggcattgatacagtcccagtgcttgttggaccagtctcatacttgctcctctctaagcctgccaagggtgtggagaaatctttctctcttctttcacttcttggtagcattcttcccatctacaaggaggttgttgctgagctgaaggcagctggtgcttcatggattcagcttgatgagcctacccttgttaaagaccttgatgctcacgaattggccgcattctcttcagcatatgctgaactggagtcatcgttctctggattgaatgtgcttatcgagacatacttcgctgatattcctgctgagtcctacaagaccctcacatcattgagtggtgtgactgcttacggtttcgatcttatccgtggagccaagacccttgatcttatcaggagcagcttcccctctgggaagtacctcttcgctggtgttgtagatggacgcaacatttgggctgatgatcttgctgcatctcttagcactcttcattctcttgaggctgttgctggcaaggacaaacttgtggtgtcaacctcctgctcactgatgcacaccgctgttgaccttgtaaatgagactaagctggatgatgagattaagtcatggcttgcatttgctgcccaaaaggttgttgaggttaatgcccttgccaaggctttggcaggccaaaaggatgaggtctactttgcagccaatgctgctgctcaggcctcaaggagatcatcgcccagggtgacaaacgaggaggtccagaaggctgcagctgctttgaggggatctgaccaccgccgttctaccactgtttctgctagattggatgctcagcagaaaaagctcaaccttcctgtccttcccacaaccacaattggttcattccctcagactgtggaactcaggagggttcgccgtgaatacaaggcaaagaagatcaccgaggacgaatacatcagtgccatcaaggaagaaatcagcaaggtcgtcaagatccaagaggagcttgacattgatgtgcttgtgcatggagagccagagagaaatgacatggttgagtacttcggtgagcaattatctggttttgcgttcactgccaacggatgggtgcaatcctatggatcacgctgtgtgaagccacccattatctacggtgatgtcagccggccgaaccccatgactgttttctggtccaagatggcacagagcatgacccctcgtcccatgaagggaatgttgactggtccggtcacaatcctcaactggtcattcgtcaggaacgaccagcctaggtttgagacatgctaccaaatagctcttgcaatcaaaaaggaggttgaggatcttgaggctgctggtattcaggtgatccagatcgatgaggcagctctaagggagggtctgccactacgcaagtcagagcatgcattctacctggactgggctgtccactctttcaggatcaccaactgcggagtccaggacaccacccagatccacacccacatgtgctactccaacttcaacgacatcatccactccatcatcgacatggatgccgatgtgatcacgatcgagaactcccggtctgacgagaagctactgtccgtcttccgtgagggtgtgaagtacggagctggcattggccctggtgtctacgacatccactctcctaggattccctccacagaggagatcgcagaccgcgtcgagaagatgctcgccgtgctcgacaccaacatcctctgggtgaaccctgactgtggtctcaagacacgcaagtacacggaggtcaagcccgccctgaccaacatggtctcggccaccaagctcatccgcacccagcttgccagcgcgaaatgaggtcgtttgatagctccatggtctgatagcgcggaatgagccagttgttttgaataatttgggtgttaccccctgttccatggtgttagtgttaggttagcctctcattggtgagatacgccgtttcaagatgtgttctaagtttggagtgtgtgttttcctttgggctatgtttctgggggtatgtgtgtgctttggttataaacagaaatgaaatatgcagtcttccaattgtatcaccatctgcattggcatgtcctccttgcagaggggaatgc

SEQ ID NO: 130101 - DNA, 2726 bp, Zea Mays
cttttataaatgaaacccacgaacccctcagatttcccgtgctcatcatcaccagttcaccacccacctcccactcccagttcaccccgtcgtcctcggcgccaccactcctcgtcccccggcgctactcccccgctccacggtccaaggatggcgtcccatattgttggataccctcgcatgggccccaagagggagctcaagtttgccttggagtctttctgggatgggaagagcagcgccgaggatttggagaaagttgccactgacctgaggtctagcatctggaagcaaatgtcagaagctgggatcaagtacattcccagcaataccttctcgtactacgaccaggttcttgataccacggccatgcttggcgctgtcccagagcgctactcttggactggaggcgagattggcttgagcacctacttctctatggccaggggaaatgccactgtccctgccatggagatgaccaagtggtttgatacaaactaccactttattgtccctgaacttggtccaagcaccaagttcacatacgcttctcacaaggctgtttctgagtacaaggaggcaaaggcgctcggcattgatacagtcccagtgcttgttggaccagtctcatacttgctcctctctaagcctgccaagggtgtggagaaatctttctctcttctttcacttcttggtagcattcttcccatctacaaggaggttgttgctgagctgaaggcagctggtgcttcatggattcagcttgatgagcctacccttgttaaagaccttgatgctcacgaattggccgcattctcttcagcatatgctgaactggagtcatcgttctctggattgaatgtgcttatcgagacatacttcgctgatattcctgctgagtcctacaagaccctcacatcattgagtggtgtgactgcttacggtttcgatcttatccgtggagccaagacccttgatcttatcaggagcagcttcccctctgggaagtacctcttcgctggtgttgtagatggacgcaacatttgggctgatgatcttgctgcatctcttagcactcttcattctcttgaggctgttgctggcaaggacaaacttgtggtgtcaacctcctgctcactgatgcacaccgctgttgaccttgtaaatgagactaagctggatgatgagattaagtcatggcttgcatttgctgcccaaaaggttgttgaggttaatgcccttgccaaggctttggcaggccaaaaggatgaggtctactttgcagccaatgctgctgctcaggcctcaaggagatcatcgcccagggtgacaaacgaggaggtccagaaggctgcagctgctttgaggggatctgaccaccgccgttctaccactgtttctgctagattggatgctcagcagaaaaagctcaaccttcctgtccttcccacaaccacaattggttcattccctcagactgtggaactcaggagggttcgccgtgaatacaaggcaaagaagatcaccgaggacgaatacatcagtgccatcaaggaagaaatcagcaaggtcgtcaagatccaagaggagcttgacattgatgtgcttgtgcatggagagccagagagaaatgacatggttgagtacttcggtgagcaattatctggttttgcgttcactgccaacggatgggtgcaatcctatggatcacgctgtgtgaagccacccattatctacggtgatgtcagccggccgaaccccatgactgttttctggtccaagatggcacagagcatgacccctcgtcccatgaagggaatgttgactggtccggtcacaatcctcaactggtcattcgtcaggaacgaccagcctaggtttgagacatgctaccaaatagctcttgcaatcaaaaaggaggttgaggatcttgaggctgctggtattcaggtgatccagatcgatgaggcagctctaagggagggtctgccactacgcaagtcagagcatgcattctacctggactgggctgtccactctttcaggatcaccaactgcggagtccaggacaccacccagatccacacccacatgtgctactccaacttcaacgacatcatccactccatcatcgacatggatgccgatgtgatcacgatcgagaactcccggtctgacgagaagctactgtccgtcttccgtgagggtgtgaagtacggagctggcattggccctggtgtctacgacatccactctcctaggattccctccacagaggagatcgcagaccgcgtcgagaagatgctcgccgtgctcgacaccaacatcctctgggtgaaccctgactgtggtctcaagacacgcaagtacacggaggtcaagcccgccctgaccaacatggtctcggccaccaagctcatccgcacccagcttgccagcgcgaaatgaggtcgtttgatagctccatggtctgatagcgcggaatgagccagttgttttgaataatttgggtgttaccccctgttccatggtgttagtgttaggttagcctctcattggtgagatacgccgtttcaagatgtgttctaagtttggagtgtgtgttttcctttgggctatgtttctgggggtatgtgtgtgctttggttataaacagaaatgaaatatgcagtcttccaattgtatcaccatctgcattggcatgtcctccttgcagaggggaatgc

SEQ ID NO: 130102 - DNA, 3018 bp, Zea Mays
atggacacggagaggggggcgggcagcgagcaggggtcgcccgacagcgaaatgggagacggcgacaacgacagcgtcggttacggcgcagagatggaggtggacgccgggagcggctcggccggggcctcggctccggcgagctcggcgtccgcatcggcctcggtctccgcgtcagcgtacgccgcgcgcgccggcgcctacgacggggtcgaccctttcgagggcatggagttcgacgacgaggaggaggcctggacgttctacaacgtctacgcccaccgcgtgggcttcagcacccggattagcgtcatgcacaggtcgcgacggaacggctccgtcatgtcccgccagttcgtctgcgccaaggagggattccgcacctaccgcgggaagaatgaggtttcacgtggtgatgccgtagacgctggcgacgacgatagtgggaggggtcggcggacgcgggctgtcaccagggttggctgcaaggccatgatccgggtgaagaagcaggacaatggccgctggagtgtgaccaagctggagactgcacataaccaccccctggtccctgcgaaccaggcacactgtctgcgcccgcacaagccactgtcagagtgtggaaagcagcggccttttgggggccatcgaaatggcagtttgcctctggcaattgagccaccgccacctcctcttacaccgcctgttcctcatacaagcatagctcaagtggttcctgagtatgtttcggatggtatcgggcatgacactagagtaattttggattatgtcaagcgcatgcaagctgaagatccagcgttcttttatgccatgcaatttgttgaggggcgtccagtggggaatgtgttttgggccgattcgagggctaggacggcatacaaagattttggagatgccatcatcttggatgactactgcaaaaggagcaagcatgaacttctactttcagctgctttgaaagtatttcctctaactaggctccagttctgtaagtggcacatcatgaacgaagcacaagataagctgtcatatctcctagatgtgtttccatccttccatgaggactttatcaattgcatcaacatgtctgaaacaatcaatgagtttgaagcaagttggaaggcattaatttctaaggtcagctctcaaaaaagtgaatggattgacttgatgtacagctgccgccatcagtgggtccccgtatatctgagagatacattctttggggatgtgtcattaaagctgcaatgttcaagcaggagttcgttgtttgaaggttatatcagtgccaaaactgattcacagtcattcattcagcagtacgaaaaagctttagactgttgttacgagaaagaggtgaaggaagaatttgaaacaaaatattcacttcctgatatgaagacatcatctcctatagaaaagcaaggagcggagttatatacaaggtcaatgtttttgaaattccaacaggaattggttggtgcctctgtttacactgctgacatggtgaaagaggagggcgatgcttcaatttatacagtgaccagatctgaaggaagtgagaagtctgtaacagttcagttcagttcttctggaagttcggcgacatgtagctgtcatatgtttgaatattttggtattgtctgcaggcacatacttaccgtgtttggcataagaggtgtctctgcactcccttctcattactttgtaaaaagatggacaaagaatgcactggatagaagctcaggcaagaatgttgacgaagttagcagagttgcggagcccaaggaggagcaaagaagtagcgctgaagatgatgagcagtccccgacatggcgttacaacagtttgtgtcgtgaagcactaaggtatgctgaggagggggcatcatcattagaggtttatattgtggcaatgcaagctcttcaagaggctgctaacagggttaatatggccaagagaggtattggacaggtagcaccattagcggtgatgccaattgcagcacaaccaccagaaagttttgcaagaaatcaggagattagttctaataagcaaaagaagagaaaaaggaattcaaatagctcaagggagaatgtcacaccaaatcaacttatgtatgtgcaacaacctgttaattttctttttgttgctcctggtccatcaagtgctttacaagggcctagtcagctagttgctgctgctcctgtttctttgaatagcaaatatggacaaacatctggtgcaaataattcagttgatgacaatatacctcctgcttctgtagttgataagttttctgggttacctgtccgaaatgcatcagctccttcaattggaaatctgcaaggtggagaaacaaaatccatagggactgattcacaaataaaagagcttcaggttcctaacaacgagtatttatggaacctgcagagccatgaattatcccaagctaatggtagcaggggatgcagtgtaaatacattaaactccagtgtcgcgccacagctcgtgactgttcctattggactgtgccttccatccactgatggctccaagatatctgcggctggtatgaactctgtaaattctggagatatcagtagcaatggcaagttgtcatttggtcttcatcaatctcagtcatctgcacaacagccagctacaccatcacagacaacaacgcttgaccatattgactcccgtgctaatcctgagggttcatctataagggctgcagccattgcagccggcgcacgcattgggtccccatctgatgcagcaacaatcataaaagcggctcagtcaaaaggcgccatccacatcatgcctggggaaaacctcccaaattacctgaaaccactagcaccaaaaccactttctgcactaccaccggcgaacccactcaacccggcacatgcacccccaggacagctcagctttggtgattctgcagccgccaaggacgcaatcttcggtcaacttttgcctgattaa

SEQ ID NO: 130103 - DNA, 823 bp, Zea Mays
tttttccacacaccccaccgcaagcctcggagcacccacccccttctctataaatacccggctctgaagagccaaccaagctcaccggtgcatagcattatcttcccttcccttccctgagcaaagagaagtagccacaagcatgtctggcatcatcgacaagatccaggagacgctccacatcgggggcgaccacaaggaggagcacgagcacaagaagggcgaggagcaccacaagaaggacgacggggagcaccacaagaaggacgacggggagcacaaggagggcatcgtggagaagatcaaggacaagatcaccggcgagcacggcgacaagtccggcgaccacaaggacaaagaccataaggagaagaaagataagaagaagaagaaagagaagaagcacggggagggccatgaccatggtgatggtgacggacacagcagcagcagcagcgacagcgactgatctcgcctcgccgagcgccgtgcgcacatatgcgccgcgcaggttataatacgggctgtccgccgaacaccatgcgcatatattatacagtactcgccaagattgttgttctgcaatcttctggataaaaaggttctttttttgttttcgtttgtctgtggttttcatctttgctggatggatctgaagaacgaagtcgatgttggattcacatgtatgcattgcttggaggatactcaccggatatcggtgctgatgtgatgatcaaaaaaacagtctcagagatagctagcatgtatgcgctgtttgccaggtaataattaatggtaatgcagaaatcgatctgcttgattg

SEQ ID NO: 130104 - DNA, 117 bp, Zea Mays
ttttttttcacattttcaggttcaagatggggagtgcttataccattttgtaagaatccccccatgtaacatgagatctaggattgcatgtttactttagagtttacgacctattcg

SEQ ID NO: 130105 - DNA, 99 bp, Zea Mays
ggcatatgaaggagatgaaagcgatgacgatgacgggatgctttatctccttgaccttgaaaagctaaggggcaagtgatgtggatgctgcggtgaagg

SEQ ID NO: 130106 - DNA, 478 bp, Zea Mays
ctcggagaccgcatcttcaggacagaagcaaagagaacttacttatgtactacaaatggagacactgaggaatagaatcctcccacctagaaagagcagaagacacaactacaactccaaagctggtagatgactaacagctacaggaggaccaccacaggagcaatgggaataaaatacgacgactttggaaaggagagctggagaaggctgcagggcattacatcttgcataaatttcttgcatacaggacggatctccttgctgagcgttgctgaaaacatcatgacttgcttatcatgaggagtcattttgaagatctcctgaacatctctccgcatgtctgcataatacatatatttgtcaaggatagcaattatacttttctcataacaaaatttatatgtatagacaggatcaccaatggattacaaaaaacttttctcataacaatataacatatttatatataagttat

SEQ ID NO: 130107 - DNA, 979 bp, Zea Mays
atgggaaaaagcttgaagatattgttccttcatcacacaactgtgacattccgcatgtgaaccgtactgagtatcagctgattgatatttctgaggatggatttgtgagccttcttacttcagatggcaacactaaggatgatcttagactcccaactgatgagactcttgtggcccaggtctgtatggaaatgttttccatcctaaacgctgcttcttattacgatgttatttttataacgatgttatttttcagtctatctctacatccctctccccatcttgttatcactactaatccttaagaggctaacgagggcgtccaccagcttcaccgtggaattttttttcttaataagtttgtcccaaaaaactctgtatcagcctctaaagtacttcatgcagtctgtaaatgttgactacctacgatagttatttgattatttcaggcctacctcctcgccatgctcgctctcgtcattgtcctcttctacttcactatcttcgcctttatcgtcacccacagggggtaccaggaactgggacaggattaggagctgccttcaggactccaaggtctgtaggagcctgcagaacaagaatgagaagatcgcacacctctcccagaatgaatgcagattgatgggaagttgcattcacaaagtaacttattcagttcggcagctctgctaacactcttcacgaatatcacaacttggttgaaatcaagagcgtccaagagatcattcagtttccagttcttctctacctcgctaagttttatatagtgctgcaaaaatatacgattccaattatttagagaaaacaaataaaaaaaatgtgcacgactcaaatgcagagtattattgtattacctgtacaagaccatggagggtcaactttgcctcatcatcaacatatatttccatcggatgtaagggaacaaatgatacatgaaacaaattagcattccagcgtc

SEQ ID NO: 130108 - DNA, 5074 bp, Zea Mays
aagaaatcggttgttgcataaggggttgaattctatcgtctttatttttctacaaatgaaagatgaaagttatgtcccaaaaactgcgcaaggagaaaaactttgatccattggttcatgaggatttcaactgggacaatgagtgggctgattctttgcatgtagaccttgaaggtgggcgtgggtgtgagtatgaccttacatgggaccttgtggataatgccattggagcatcagaagcacttcgtagccgaaacttaccaagaagaacccataataggctgaagaggaagatgaagatgaagaaaatgatccacatgatgatgcagaaatcacaaattgtgaagatgaacatgatggtggcaatgatggtgatatgtcgtgggtgcctaggactgcgcagtggtgatcgcagcaaagcttgggactgggcaagggatctcagtggatatggagatcggccaaaggaggagctaatttcgtcagctggcgcaaggtgcgccaggatgaccaaggaagctccaccggccaggtaaaacttctttttttatgaaccctaatacaaactacaacagctcctttatagatttaggcgccactttattctcaaccacctcaactgagagctaatctctccactaaaataggagggataaccgcctccctctttatctcttcttatcttctaaacaaacagcctagctaggacttatcctttgtggcatctgccatactaccgacccacaaaggtgtctacaacatttcccccctcgccgacgaagagctcatcctcgagcgtcatgaccggatatctaagcttgaaatcttccagttgctcccaagaagtatccgtctctgctcggcctgtccacttgatcagaacttcccacaccccccgattcagccttgcacggaggactttttctagtgtagggatgactctgccgttgaggagctcgggcagcggtataacttgggttggagcctcctctatgaatttcttgagtagagaaacgtggaacacatcatgtattctggcactgggaggaagttgcagcttgtaggagacagtgcccaccctcgatagcacttgatatggtccaaagaactttggcccaagcttgtggggtgtagcagaagtgacaccaactgctatgcgttgttgtaagcgcagccatacccaatcgccctcatggaactccacttccagtcggtgcttgtcctagtagcttttcattgtcacctgtgactgaatcaatcgatcacgaatatccaccaagaattcgtcacgtgcctgtagttgtttgccaacagcagccacctgtgatgttcctggatgatagggcagaagagcaggaggttctcggccatataccaccttaaatggagagcatcggagagcagtttggaaggaagtgttgtagcagaattcggcccatggaagccattaaagccactctcttggtctatcccctgccaggcaccgaagatacatggtgataattcgatttaccacttccgattgtccatcagattgggggtggaaagctgaactcatgtgcagcttgactcctgctagctagaacaattctgaccagaatgtgctagtaaatactgtatctctatcactgacaatggagtaaggcaacccatggagacggacaatgttatcaaagaaggcttttgctaccgatgctgttgtgtaagggtgtcctagagcaataaagtgtgcaaacctggagaaacggtcaacaactgtgagaatcaccgacttgctgcccacctttggaaacccctcaatgaagtccatagaaatatcactccatacttccgaaggtactgatagaggttgcaagagaccaccgggatggagatgttcagttttattgcgctagcagactgaacagcctttgatgaattccttaaccctctgtaatgcatgaggattatagaatgacgatcggaacctatgaattgtcttttggattccttcatgtcctgtgtcatggtcactggacaatagtatcgaccaaagagtagaggcatctggcacatagacttttcctttgaaaaggagcaactcatccaattttgtccaacccagtgaaacaatgccgacagcaagctgctggtgcacatcctggatttgtgggtccgttgcagcctcgactcgcaaactgtcaaacaactcaaaagaaggtgtagagatggtgttgagcgccatgcctaacttggcacgacgtgagagagcatcaactgcgccattgagtttgccaggcttgtactccaccgtaaaatcatatccgaataacttgctcacccatgtatgttggggaattgtggtcagtcgctgatctaacagatatttaagactgtagtgatcggtgctgaccagaaactggcgcccccaggccccagatataaggcctccagtgccggaccgttttcaccaacccaatcagttcccgttcatatgccggcaacttctgatgttgcggtgcgactgccctgctgaagaaagcaatagctccatctccctggtgtaacatggcgccaaaaccagaccctgacacatcacaatcaatgatgaaattgcggtcgaagtcgggcatctgcaataacggtgcggacattaaggcttgtttgagcagattaaaagcctcgtctgcttcttctgtccatctgaatgcctctcgttttaatagggctgtcaagagggctgctacagtgccataaccagcgatgaatttccgataatacccagtcagtcccaaaaatcctctgagcgcccaaatggagcgtggtggtggccatgactccactgcttcaatcttggcagggtccatcacaactcccttatccgagatgatgtggcctaagtaacccacctgtgtttcgccaaaggaacacttggtgcgcttgagggccaacttctgctctcgtaacagctggaatacttgtcgcatatgttgaagatgctcagcccaggaagagctatagattaatatgtcatcaaagaatatcagtacaaacttacggatgaacggcttgagtacatcattcataagcgcctggaatgtcgacggtgcattagtcaagccgaaaagcatgactaagaacttgtagtggccatggtgtgtgcagaaggtcgtcttatcaatgtcctctgggtgcatgtgcacctgatggtagccgctacgcaagtcaagcttggtgaagaaccgggctccccgaagctcatccaggagttcatccactactgggataggaaatttgtccttgacagtcttcgtgttgagctcacggtagtcaatgtagaagcgccatgtgttgtccaatttcttcacaagcagcactagtgatgagaacactgaggtacactcttggatgataccttgggatagcatcaggtcacactgtcattcaatctcatctttgagcaactgagagcggtacagtcgtaccgccactggtactatccctggcagaagccgaatgcgatgatcatggcggcgaggtggaggaagtccctggagttcgacaaagaggtcttcaaaggacaacagtagggtatccaacagtttgtgtgccatgtccagagcattacaggggggtggagagccgccaatgtctgtccaacgcaccatgtgtccgtggcaccaaaaagacagcgtcaacttctcaaagttgcaaatgaagggacccaaagaacgcaaccattgtaccccgagcaccacatcaaagccatccaggggaagagtgtagcatgttgtggtaaagttcttttcgccgacagtgagtggggtctgagaacagatgcccccactcaacatcttctcaccatttgcaaccttgacaagaagtcctgctgttggagtcacatgcagtcccagtcttggcacaatagcatcgcggatgaatatatcggtggatcctgaatccacaagagcaatgagagccacaccattgatagagactttcagttttagtgtgtcgacgatgtaaatcccagtgagagcatgaagtgatatgcccatctcctctgccagtgtatcagttgtcccggtatcttctccatccagttccaacagaaaaactccgcgagcagcacacttgtgatcgattgaatatttttcagagcagtggtagcattcaccgctggctcgtttggcggcaacctcctccggtgagagcctgcataaacttggtctgctggtagcagatgacgagggttttgctgcagatgccgttggttttgatgtagcaaatggcgtccttgatggggtcgaggacagatccatacgacattcataggcgcgtgccaggtacatggctcgctgcaatgtagttggagtcagcagttcaacatcagtccgaagcgattcacccaagtctgcggtaaacatttgagcttgctggagccgtgtcatatcctcgcagcgacagagaatggacagaaactgacgttgatagtcttcgacggtgccgatgcgccgaaggtccttgagatcagccataccgttggaccgtagaggtggtccaaaccgcatatgggtgaactcaacgaagcaggaccaagtgaggacgtcgctcgtgtcccgctccacagcatggaaccatcctgtcgccacaccgtccaaatggagtgatgtctgccacaccttctctggagtcctcatgcccctgaagtaagtctcacatttattgatccacggcagggggtcggactcaccatcgtagtggggaaaggagacattgggtcttcgatagccaccatcgtcgatgcggtcatgagaagcagatcttgtgctatgcatgaccccgacaggcgctgcggtacgtgggctggtttctgaagattccggcagctgttggtcgattgggcgcttctccaaaagcgtgatccgctgtccatgcaggtcgaggcgtgagttgatggtggagagctgcgccaatatctgatccaacttggctgagtcggaggaggtcttcgcaggatcgtgatcaacgcggatatgttggtcgatgcgtcagaggaatctgataccaaattgatatgtcgtgggcgcctagg

SEQ ID NO: 130109 - DNA, 474 bp, Zea Mays
atgaaagttatgtcccaaaaactgcgcaaggagaaaaactttgatccattggttcatgaggatttcaactgggacaatgagtgggctgattctttgcatgtagaccttgaaggtgggcgtgggtgtgagtatgaccttacatgggaccttgtggataatgccattggagcatcagaagcacttcgtagccgaaacttaccaagaagaacccataataggctgaagaggaagatgaagatgaagaaaatgatccacatgatgatgcagaaatcacaaattgtgaagatgaacatgatggtggcaatgatggtgatatgtcgtgggtgcctaggactgcgcagtggtgatcgcagcaaagcttgggactgggcaagggatctcagtggatatggagatcggccaaaggaggagctaatttcgtcagctggcgcaaggtgcgccaggatgaccaaggaagctccaccggccaggtaa

SEQ ID NO: 130110 - DNA, 408 bp, Zea Mays
tgccggcggcggtgatggccttcttgtcgttgtagaggttgagctcgagcgtttcggaggccatggcgcccgggtcgtggacgaggaactcgaggcgctccccccactgcgggttgaggtcccgcggtcgcgtggcggtgcgccggcgctggccgtcgaagtccacgacggcgtaggcgcacgccgtgccctggccgtccttgggcatcaggttccgcgcgttgcacacctccaccaccacccgccgccgcgcgccctccgccaccatcgcggcgccgccgggaaaaaggtggctaatcgattggatccgatccttggaaggttctgctcttttgtgtgcgtgcgagagcgagagatgagatgaccgttggagggcaagagcggggatagagagtagagactagagag

SEQ ID NO: 130111 - DNA, 1993 bp, Zea Mays
acagcagaaatgggcaggcaaggcaagcaaccatacattctggtgatacccggccaggaggcttttggtggtggccgttgtggctccacggacccgattcatccttggccaatgcaacaggcggcagcagcatctcaaatggaacctgcttttcgatgaaaggatgcagacgacgcaggcgcacataaccaactattcggcttgcgcgggacgacgtctatgtattcctcttggggctagcgtaaagcggagaaagatatataacatattcttggggggaatagtattcatcgagtaaagaaagataaggcaacgacacgacatatgcatggaagttgaattattgttatgggggtacccatcgtcgtatatatagctactgctccattccagccacgatacaaatgaaacggatctgcactcgccaagttgtacgcgttttctcgcgatcgcgactgcctttcgttgcgtgtgtggagagaaaaaaataagcagaggctcgtggcgggcacacacacggacacgggtagtatatatatatacactacacagtgtagctagtatacctcgcccactccaaagcgaagcagcaagcgctgtgaccgactgtgatcacacaccacgcgttcatggtcgtcatgggcaagcacgatgacgatgagaagcagcagcagcagatggagatggaagacgtacatgaagtaggagccgtcgaggtgctgccgctggagaatgaggcggaggccgcgctggtgcgcaagatctccggcctggccgccgccatcgcgaagctgccgtcgctgagcccgtcgccggaggtgaacgcgctgttcacggacctcgtcacggcctgcatcccgcgcagcaccgtggacgtggaacgcctgggcccggagctgcagcgcatgcgcgcgggcctcatccgccgctgcgccgacgccgaggcccagctggaggcgcactactcggacctgctggcggccttggacagcccgctggaccacctgccgctcttcccctacttcggcaactacctgctgctgggcgagctggagcacggcctgctggcgcgccacgtcccgggcccgccgcccgcccgcgtcgccttcgtggggtccggcccgctcccgctcagctccctcgtgctcgccgcgcgccacctccccgccgccgccttcgacaactacgacatctgcgcggaggccaacggccgggcgcgccgcctcgtgcgcgccgacgccgcgctcgccgcgcgcatggcgttccgcacctccgacgtggcccacgtcacgcggggcctggccacctacgacgtcgtcttcctggcggcgctcgtgggcgtggcggccgaggagaaggcgcgcgtggtggagcacctcgggaggcacatggcgcccggcgccgcgctggtggtgcgcagcgcgcacggcgcgcgcgccttcctgtaccccgtcgtcgacccagacgagatccgccgcggcggcttcgacgtgctcgccgtgcaccacccggagggggaggtgatcaactccgtcatcgtcgcgcgtaagcccgtccccgtcgccggagtggggcacgcgcacgcgcacgcccacgggcacggcgccgtgctcagccggccctgctgcctctgctgcgagatggaggcccggacgcaccagaagatggaggaggtggccatggagcagctgccgtcctaggcaggcaggcacacggcacacaccacaagcaacaagcatggatgccagttttacatctatctgatcgatctagtaaatagtaatcccctactacgtctatgtgcccacaccgcatggatatggtaataatccgcacagggtgcgcctaatttatatccgctagctaagggcatgtacagtagagagacaccaaaacggttctccaagcacaggagacaactaagagactttattgtacaatgaagtgtctataaacgtagtctattaataaatacagaattaaatgtatttgt

SEQ ID NO: 130112 - DNA, 814 bp, Zea Mays
agctctgggcagtggccgctttgagtgggccgggccgcaccgcgcgaaacgatgagatgggatgagccgatgaggccgcatcggtgacgacgatccaattccaatcttagccagacccggaggcagcagcgaccagcgagcgacgccggccggccatgctctccgccgctgcgtccgccatacccaggctccgcttagcgtcgggcccgcggctgaggcggccgtcggctaggacgcactggccgcggccactctcgtcctccagccacgtaacgcccgtggcggctgcgggggctggggagctggagccgccggacctcacccgcttagccaacgccgcgcgcatctcgctctccccgcaggaggccgaggacttcgagcccaagattcgtcaggttgtggattggtttgggcaacttcaggcagtagaccttgagtccattgagccttcacttagagctggtacaacggctgatatttctttgagaaaagataagcctgaaacattcgataacagagatgccataaaggaggccattccaagttatgatgatccatatatcaaagtgccaagagtgctgaacaaagaatgatctgtagcatgtatatcagaattgttagaatattaatactctacaatgcagcatggttaaacataatgataaaatttgcagaaagattgaacgagtcaccagcaagcttaattgattttgtgcatttcaatttgataatgctgtgattgaacagagcaatcagcaaccttgcattgggacaggataacaggaaagatttgggagatctgcttcaggggaaa

SEQ ID NO: 130113 - DNA, 1966 bp, Zea Mays
caaaatgctcctcgctgcggtttgatcgaggccgcggccccccgaaccctcgcctcgcctccccctcccgccgccgtcatggacgacgaccgcgaccacgaccaggaccccgatgcgtcgtcgccggccgcgccgtggcggcggtccgtgaagcggaagctgggcgcggaggcgggggacgaggcgggccccgcggcgcgggtcgaggcggaggacgagcgcgcggcgctgcgggaggcggcggcggcggcccagtccacggcgtcggcgctgcgggtcgaggtcgaggaggagcgcctcgccgcggccagcgccgccagcgaggccatggccatgatgctccgcctgcagcgcgacaaggccgaggtccagatggagctccgccagttccgccgtttcgccgacgagaagatggcgctcgacgccgccgaaatcgaccagctccgcgcgctcctcgcccagcgcgcgcgccgcctgctgcgcctgcgctccaggctccgcgagtacaggctgcagtgcctccacctcggcatcccgcttcccgagggcgaggacctcgtcgcccagaacgccgccgaggaggaggaggaggacctcctcctgctcgagggcgaggagggctacatcgttggcgatggagggtactactaccctgagctccgctgcaacgacggggagtactactacgaggacgggcgggaggaagaggacgtggttgccctcgatctggagcgccggatctgccttctcgaacacgatcaggaacctcgcctgcttgagccaccgcatgagaaagaggaaggtacccacctttacacagatgaagtgttgccggacatgtctgaacatgaactgggtggcctctatgccgacgagatgttatctaaggaggatgtggaaacaatgaacaacctccacaatgatgatgaagaactgccagagtcgcctactgctggaaatgatgacggggaggaagcaagcgaggctgacggtgctgacagtgtaagtggcagtggcagtgatagggtatacaccattgacaaggtgcatcaaggtgcagcaatgcctattgcaagggtcgtggataagtaccaaggggaggcagtggagccggacattaagaagctttacatgaggctggaggcactggaggccgatagggagtcgatgaggcaggcccttgtggcaatgcgcacagagaaggcacaacttgtgcttcttcgtgagattgcgcagcagcttgccaaagatggagttccagttgggccgggagctggggcggggccaggtgtacaccatttgcctagaaaacacgcagttgggattgtagaaaggagattcacagaggacaagaaggcgatacttgtgaagacattttccatggctgccttgttcaagtggatcctcgctttattgggcaagaaaaagaagctatctcaaagcaggtatacttttggcttaacaaataataatgttggtttgctcatactcttggataagtgcccacggatccagaaaaccctcacaagaacaaagttaaaccttgccgaaagaagcagcagcagctgtacaatgtaaaatagatagctttcagttgggaagattgcatttcttttgttaatgtttggtggagcgaaagttcttttgattctttagttgatgattttccgatttcccatcttttggtgatgaggattttatgcgttggtcttgcaattgttaagtcacaaaatcgctttcgcatttttctcaccaggaagaactacaatgcatgtatagtgcgcttgtaaatacactggtttagtttgcttgctgccttgcttccaggttgatgagtgaatatttatgaatgttagcttacaggtgcaaactctaaacttttgtgaaaaaatgtccttgtattcaaactaagtctgtttatgcttgtatgctcagtttttttggactggtaatcagaaatttgtgt

SEQ ID NO: 130114 - DNA, 1066 bp, Zea Mays
gcccacatcaaccccttcacacgaaccagatcagaaaagccactactgctttctctctctctctctcacacacacacacagacacaaataaaaagaaatcagtagttcgatttctcctctcacctttacacatatctccgtatttacaaattaggttgttgatgtaggctgtacgcacctgctggtttgctactcgatcctatatatcgtccaatcctatctgacctctcgacatctggtccttgattactcgtcctttttgcttggtgcctgtgtatatcgtcgccccggccgcttgagctagcttcctctagtgctcgctctcgtcgtcgatcggttgtttgcatagcccacggcgagccgaagcaatgtcgtcggcgcccctgcagatcgcgccggtgccggagcatgtgtgctacgtgcactgcaacttctgcaacacaattctcgcggagaatttcaccgtccaaaatatgggttttactgaaaattaccctgagtacgcaccttcgtaccgcatgccaacgacgctgtcagcgaaaggtgatctggatcatatgctgcacgtgcgcgctccagagaagaggcagcgtgttccttcagcatataacagatttattaaggaggagatacgaaggattaaagcatgtaacccggacataagccatagggaagccttcagcactgcagcaaagaattgggcacattttccgaatattcattttggtctagggccctgtgaaagtagcaacaatcttgatgaggccaccggtgcaatgtgccatccccagaaagtccaagatctctactaagacctatatcagcactgccctttgtttcctcttagttctggactagttggtgagtgccatatatatatgcatgagtgtgatatgatcatgaggtaaggaattatgattaagatgatatatatgtacgagatgaacatgcccctaggttcatgaaagactaaataaggatcgtcatctcaccatgttatcataggtagtaactattgtttgaaataaattatcctttgtgtgcagttttagtgtttgtttatgcc

SEQ ID NO: 130115 - DNA, 1333 bp, Zea Mays
accattcagaaatgcggcccatgacgaacccgcccctgctctcaccgtccccgttccctcttctcctccgcctcctccacctctcgcgcgcccctcgccgccggaaccctaccaccgggcgggcacctacttgtacttcccgcgaccgcctcccgctcctcctccccgctgccatgtcctccgcttccaacaccgccccccactccgtcgtcgccgaccccactactcttgcccgcaaaatcgcagacatccgtgccgccggacccaccaaactccaggttatcgccgacttcgatggcacgctcacgcggtactggtacgacggcgcccgcgggcagagtagccatggactgcttaggcaagggaacgaggagtacgacgccaagagagaagcgttgtatcagcactaccaccccatcgagatctgccccgacatcccactctcggagaaggccaagctcatggaagaatggtgggagaagactcatggtcttcttattgaaggcggtcttacatacgaagctatcacaaaatctgtctctgatgccgcaattgctttcagagagggtgtggtggagctctttgagtacttggaggagagagagattccagtgctggtattttctgcaggacttgcagacataattgaagaggtcttccggcagaaattacacaaaacattcaagaacatcaaggttgtctccaacaggatggtgtttaatgaagaaggccgcctcatagcatttaaagggaaaacaattcacgttctaaacaaaaatgagcatgccttggacatggctgctccagtgcatggcaatccgggggatccaaacggatctatggatgactattcattggtgaagaaaaggaccaatgtgctgctacttggcgatcacattggggacttggggatgtctgatggtttaaactatgacaacaggatcgctgttggattcctgaacgccaacatcgagaaatctttgaaggattactctagcgcgtttgacattgtatatctgaacgatgctccgatgcacggagttgtgcaacttgtgtctgaattatgtccataatccagtgatcttcgaatcgcccctcagaaaaaaagtatatcttcccatcaactttgcagctaccgaagttcgctcacctggaaatgtaaggattccactcttgctaactagggcttgcttcatgagcagctgttctataggctcatttcagggctaaagagcccttggaacaatgttttttagcactagtgcattcaaacacccactgtagatattttctcctcctcttccaattcgaaagatccgtgaatgtttttttc

SEQ ID NO: 130116 - DNA, 892 bp, Zea Mays
accattcagaaatgcggcccatgacgaacccgcccctgctctcaccgtccccgttccctcttctcctccgcctcctccacctctcgcgcgcccctcgccgccggaaccctaccaccgggcgggcacctacttgtacttcccgcgaccgcctcccgctcctcctccccgctgccatgtcctccgcttccaacaccgccccccactccgtcgtcgccgaccccactactcttgcccgcaaaatcgcagacatccgtgccgccggacccaccaaactccaggttatcgccgacttcgatggcacgctcacgcggtactggtacgacggcgcccgcgggcagagtagccatggactgcttaggcaagggaacgaggagtacgacgccaagagagaagcgttgtatcagcactaccaccccatcgagatctgccccgacatcccactctcggagaaggccaagctcatggaagaatggtgggagaagactcatggtcttcttattgaaggcggtcttacatacgaagctatcacaaaatctgtctctgatgccgcaattgctttcagagagggtgtggtggagctctttgagtacttggaggttttatcaaaaccttctctagctaacacaatatttaggaacttttttgggacatgcctagatacccttttgtgttcagtatggattaagatcagtaataactttactatgtcactttaagtaaaagaactgacggttaagctgcttcataaaaagttcgaaacatgctttatcttctatgtttctcccttattttcttttgatgccaccctatgcatgttttacttctgtgctacccttttccttttagcatgatttcgctttctgttttttttccttaacagtttgtcaaactg

SEQ ID NO: 130117 - DNA, 1813 bp, Zea Mays
aaccaacgcgtatcggcggtggcaaaccctctagcttcccactccgctcggccaccagctttgaccgcctcccctcccctccgctcctgttcctccataccccacccccccgcaggagcggcgcggcggcggcggcggcaaagccaaaggcaagatgttcgggcgcgcgccgaagaagagcgacaacaccaagtactacgagatcctcggggtgcccaagtcggcgtcccaggacgacctcaagaaggcctaccgcaaggcagctatcaagaaccaccccgacaagggcggtgaccccgagaagttcaaggagctcgcacaagcctatgaggttttgagtgatccagagaaacgtgagatttatgatcagtatggtgaagatgcccttaaggaaggaatgggtggtggtgggtcccatgctgatccatttgacattttctcatcattctttggaccctcttttggaggaggtggtggaagcagcaggggaagaaggcaaaggaggggagaagatgtagtccactcacttaaagtttctctggaagatctttacaatggaatctcaaagaagctctctctttcgcgcaatgtcatctgctccaagtgcaagggcaagggctcgaagtctggtgcttcaatgaggtgccctgggtgccagggctcaggtatgaaagtcaccattcgtcagctggggccttccatgatacagcagatgcagcagccttgcaacgagtgcaaggggactggggagagcatcaacgagaaggaccgctgcccagggtgcaagggtgagaaggtcgttcaggagaagaaggttcttgaggttcatgttgagaagggaatgcaacacagccagaagatcaccttccctggtgaagctgatgaagcgcctgataccgtcactggagacattgtattcgtcctccagcagaaggaccactccaagttcaaaagaaagggtgaagatctcttttatgagcacaccctgtctctgaccgaagctctatgtgggttccaatttgttcttacacacctggacaacaggcagcttctgatcaaatcaaaccccggcgaagttgttaaacctgaccaattcaaggcgataaatgacgaggggatgcctatttaccagaggcccttcatgaaggggaagctctacattcatttcacggtggagttccccgactcgctggcaccagagcagtgcaaggctctcgagtcggtacttccgccaaagccttcgtccaagctgacagacatggagatagatgaatgcgaggagacaaccatgcatgatgtgaacaacatcgaggaagagatgcgcaggaagcaggctcatgctgctcaggaggcgtacgaggaggacgacgagatgcctggcggagcccaaagagtgcagtgcgctcaacagtaagcagactaccaaaatgggattcaaggcactttggttgctcttcaattatgcgagtgcgcctgtggactgtatggttctatggttttgctgtcgctgagctacaaagtaggaagctgatgcgcccctggctctgcaagcgggggaatgtatccttttttgctgcaactgaaaaatgctacccaggcaatagctggctaccttataacttttgcttgtgagatttgctagagtgacgattttaatttgtaggtggacttaatgtttgtgtaaggctaggcataacatcatgtctcaatggacgttgccgttgcacattggtgcattttattttaatgtaacgcatgtgcttgtgctgtcgaacaatcttggaatggtctgatcgatgatcggcgtctgttt

SEQ ID NO: 130118 - DNA, 1745 bp, Zea Mays
cctaataaaaaaatctgacctaaaagccgaaaagacacaacccaactaaaaaacgatccgacccatccaacaggagccaaaggcaagatgttcgggcgcgcgccgaagaagagcgacaacaccaagtactacgagatcctcggggtgcccaagtcggcgtcccaggacgacctcaagaaggcctaccgcaaggcagctatcaagaaccaccccgacaagggcggtgaccccgagaagttcaaggagctcgcacaagcctatgaggttttgagtgatccagagaaacgtgagatttatgatcagtatggtgaagatgcccttaaggaaggaatgggtggtggtgggtcccatgctgatccatttgacattttctcatcattctttggaccctcttttggaggaggtggtggaagcagcaggggaagaaggcaaaggaggggagaagatgtagtccactcacttaaagtttctctggaagatctttacaatggaatctcaaagaagctctctctttcgcgcaatgtcatctgctccaagtgcaagggcaagggctcgaagtctggtgcttcaatgaggtgccctgggtgccagggctcaggtatgaaagtcaccattcgtcagctggggccttccatgatacagcagatgcagcagccttgcaacgagtgcaaggggactggggagagcatcaacgagaaggaccgctgcccagggtgcaagggtgagaaggtcgttcaggagaagaaggttcttgaggttcatgttgagaagggaatgcaacacagccagaagatcaccttccctggtgaagctgatgaagcgcctgataccgtcactggagacattgtattcgtcctccagcagaaggaccactccaagttcaaaagaaagggtgaagatctcttttatgagcacaccctgtctctgaccgaagctctatgtgggttccaatttgttcttacacacctggacaacaggcagcttctgatcaaatcaaaccccggcgaagttgttaaacctgaccaattcaaggcgataaatgacgaggggatgcctatttaccagaggcccttcatgaaggggaagctctacattcatttcacggtggagttccccgactcgctggcaccagagcagtgcaaggctctcgagtcggtacttccgccaaagccttcgtccaagctgacagacatggagatagatgaatgcgaggagacaaccatgcatgatgtgaacaacatcgaggaagagatgcgcaggaagcaggctcatgctgctcaggaggcgtacgaggaggacgacgagatgcctggcggagcccaaagagtgcagtgcgctcaacagtaagcagactaccaaaatgggattcaaggcactttggttgctcttcaattatgcgagtgcgcctgtggactgtatggttctatggttttgctgtcgctgagctacaaagtaggaagctgatgcgcccctggctctgcaagcgggggaatgtatccttttttgctgcaactgaaaaatgctacccaggcaatagctggctaccttataacttttgcttgtgagatttgctagagtgacgattttaatttgtaggtggacttaatgtttgtgtaaggctaggcataacatcatgtctcaatggacgttgccgttgcacattggtgcattttattttaatgtaacgcatgtgcttgtgctgtcgaacaatcttggaatggtctgatcgatgatcggcgtctgtt

SEQ ID NO: 130119 - DNA, 1575 bp, Zea Mays
ggtatctgttccctccctcaactggttcagtctatctggtaaatttcttttttgatccatgatttgtagagtaaaagctttgtttttaatttatatcagttcaaggagctcgcacaagcctatgaggttttgagtgatccagagaaacgtgagatttatgatcagtatggtgaagatgcccttaaggaaggaatgggtggtggtgggtcccatgctgatccatttgacattttctcatcattctttggaccctcttttggaggaggtggtggaagcagcaggggaagaaggcaaaggaggggagaagatgtagtccactcacttaaagtttctctggaagatctttacaatggaatctcaaagaagctctctctttcgcgcaatgtcatctgctccaagtgcaagggcaagggctcgaagtctggtgcttcaatgaggtgccctgggtgccagggctcaggtatgaaagtcaccattcgtcagctggggccttccatgatacagcagatgcagcagccttgcaacgagtgcaaggggactggggagagcatcaacgagaaggaccgctgcccagggtgcaagggtgagaaggtcgttcaggagaagaaggttcttgaggttcatgttgagaagggaatgcaacacagccagaagatcaccttccctggtgaagctgatgaagcgcctgataccgtcactggagacattgtattcgtcctccagcagaaggaccactccaagttcaaaagaaagggtgaagatctcttttatgagcacaccctgtctctgaccgaagctctatgtgggttccaatttgttcttacacacctggacaacaggcagcttctgatcaaatcaaaccccggcgaagttgttaaacctgaccaattcaaggcgataaatgacgaggggatgcctatttaccagaggcccttcatgaaggggaagctctacattcatttcacggtggagttccccgactcgctggcaccagagcagtgcaaggctctcgagtcggtacttccgccaaagccttcgtccaagctgacagacatggagatagatgaatgcgaggagacaaccatgcatgatgtgaacaacatcgaggaagagatgcgcaggaagcaggctcatgctgctcaggaggcgtacgaggaggacgacgagatgcctggcggagcccaaagagtgcagtgcgctcaacagtaagcagactaccaaaatgggattcaaggcactttggttgctcttcaattatgcgagtgcgcctgtggactgtatggttctatggttttgctgtcgctgagctacaaagtaggaagctgatgcgcccctggctctgcaagcgggggaatgtatccttttttgctgcaactgaaaaatgctacccaggcaatagctggctaccttataacttttgcttgtgagatttgctagagtgacgattttaatttgtaggtggacttaatgtttgtgtaaggctaggcataacatcatgtctcaatggacgttgccgttgcacattggtgcattttattttaatgtaacgcatgtgcttgtgctgtcgaacaatct

SEQ ID NO: 130120 - DNA, 882 bp, Zea Mays
aaatcaatgttagctttcttccacccactgtggcagtcacagagccgccgcgatctgctggccccaaaaccctagcttaatgggagccgccgctgccgccgcgggtgctgatcctcctccctcggaggctgccgctacaccagccagagaagatcaacagcactacgtcgccgccgcgactggcggcgtttcaggcgaatcgtgcgatgcagcggcgcctcctgctggtggaggcggcgcagacgatgccgtggagcctgtggtcatcgatgcctccgcggtggccggcggagcaggggaggaggagcaaggggagtgcgggttctgcctcttcatgaagggcggcggctgcaaggacgagtttgtcgcgtgggagaagtgcgtggaggaggcggaggccgccggtcccagcgtcgacgtcgtggagctgtgccaagacgccacggccgctctgcggaagtgtatggatgcgcacgccgcctactacgagcctatactacgggccgagcgcgccatggctgcggacctcgagtcatttcagaccgaagaagccgcctcccactccgcggcgtcggcgttggcgtcggaggaaggccagagataggcggcggcggcgcgatcagacgaaggccagaataagcaggtggctgagacggcagtttcggaggagagcagagatcccgcactctgatcgagggaaacggcagtcggcgtctccatttttttttgagggatttgaggatatgaattccgtttattctttcgagcatcaatcaacatgtttttgataggagagcatagatttctgtcctcttctctctacatgaatatgtgattgactgaaaatcaaaactatacacgtgttgccaggctaatcataca

SEQ ID NO: 130121 - DNA, 1568 bp, Zea Mays
gggttctttcggtcactatttttccgctcttacagagacgaggaaaagaagatgggcacacttatcaaagaggaatttggtcgtccaaatagggaaaatactatgggaatgcgccatgggtcatatgataaactagatgatgatggccttgcaccacctggaacaagggtctcaggggaagatgtcattattgggaagacatctcctattccacaagatgacgctcaagggcaagcttctagatactcaaagcgtgaccatagtactgctctgcgtcacagtgaaagtggcatggtagatcaggttctgttaacaacaaatgcggatggtctaagatttgtcaaggttaggatgcgatctgttcgcataccacaaattggcgacaagtttagcagcaggcatggacaaaaaggaactgttgggatgacttacactcaagaggatatgccatggacaatcgaaggcattacacctgatattattgtgaatccacatgctattccatcccgtatgactattgggcagctgattgagtgtattatgggtaaagttgctgctcagatggggaaggaaggcgatgccactccattcacggatgtgactgtggataacatcagcaaagctcttcataaatgtaattatcaaatgcgtggatttgagacaatgtacaatggtcacactggaagaaaactgactgcgatgattttcctgggccccacatattaccaaagactcaagcacatggtggatgacaagatacattcgagaggacgtggtcctgtgcagatactcacccggcaaccagcagaggggcggtctcgtgatggaggtctccgctttggagaaatggaaagggattgtatgatcgcacatggagcagctttcttcctgaaggaaaggctgtttgaccagagtgacgcatacagagtccatgtatgcgagaaatgtggtctcatcgcaattgctaacctaaagaaaaactcgttcgaatgcaggggctgcaagaacaagactgacattgtccaagtacacataccctatgcttgtaagcttctgtttcaggagcttatggcaatggccattgctcccagaatgcttacccatgatatgaagacagggaaggatcagaagaagcgctgaacgtgtatcacgtgagatgtaaccagaactcatgccccgttgctatattcctggatcctggttcacacaatagtaccctgttgaggaactttgtggtcacttcttttctgatttggacttcggttcttcgcgatcgatggagggctgttactatctcttgatggattattatcctatctgtgctcgtgttgcctgaagatcagtgctagcagatcgtcgagttaattttgtacattaggaatgtgttgtaatgtattaatctgtgcgagtagaaagatttttgactaaaggtgtcaatttggaggtgtaactgtacgttaatactaaacgcgatgccattgcaatttcagttttattttgaaatacatggggttttagtggcatgtctctaaactatcacaatcttaatggcatggttctaattaatc

SEQ ID NO: 130122 - DNA, 161 bp, Zea Mays
tggggcacagaaaattttgaggagatatcaccagccgtcattccacaagctgctaaaatttttgtcaatggttgttgggttggaattcataggaaccctgacctgttggttaagactcttagacgtttaagaagacagattgatgtcaacactgaagttgg

SEQ ID NO: 130123 - DNA, 726 bp, Zea Mays
ctcgccatttcgcccccgccccccaatctctgcgtctctagctctcgggagaggcggctcgccgcgacatcgatcccgaccgggcaccggctcaccccggcccccagcgtagcagctcgccactagggctagcgctctgtccatggaggatgacgagtacgaggatgggatggacatgggctacggcgggcatcaccagcgcggcggcggccacgcggggtacggcgcggaggaggacgacgagatggggtatggcgaggggggtggggacggggacgagatggaggaggaggcggatggggacgccgagcagcaggaagatatcacgcaggacgacgcctgggccgtcatctccgcctacttcgaggagaagggcctcgtgcgccagcagctcgactccttcgatgagttcatccagaacaccatgcaagagattgtcgatgagtccgccgacatcgagatccggcccgagtcgcagcacaaccccggccgtcaggccgagtttgccgaggttgtcgccccactcttattgaccgttgcaagtgtggcctgaattgttcactatttgctggtaatgattgagcaattaggctggggcgctgggggagcttggtatgacgtgatgtctcggtagcataggccaccctcatcacttttgccaccctttctctgggctcctgcttgattagatgtctccttagggttttggaactagtccgaacaggt

SEQ ID NO: 130124 - DNA, 2530 bp, Zea Mays
gaaacggtgggcaacgaccaaagaggcacatttttttggcggtttctcaacgtcgattgatgcggtggtgatttgtgagagactgcgacctctcatctcattgtcaggaatttggtcttcgacgcaggagagacgaacgacgcactcacgaacgaagcgcgagtgagcatggcaggattgctggcgatacaatgaatgaatcgaactgatccgctggaggcgcctccttcccctgcattgcattgcttccatcacgagaggagggcgactgattgatttccacacgtggtgggtggcggcgcgctcctaggtttcaatctgacgacgacgacggcgacgacacgagctcgcaagatgtcgtacgaccagtcggctttccaggtcgactacatgggcgtcggcgccggcgccggcgtcagcgcgtcccggcggcggttcatgccttcggagtcgctggcccgcggcgtcatcacgcacggctcggcgcagctgcgcaccatcgggcggtcgctccgggccggcgccaccatggcggccgtgttccaggaggacctcaagaacacctcccggcgcatcttcgacccgcaggacccggtgctggtgcgcctcaaccgcgccttcttcatctcctgcatcgtggccatcgccgtggaccccatgttcttctacctgcccatggtcaccgacgagggcaacctgtgcgtgggcatcgaccgctggctcgccatctccaccaccgtcgtgcgctgcgtggtggacctcttcttcctgggccgcatcgcgctgcagttccgcaccgcctacatcaagccgtcctccagggtgttcgggcgcggcgagctcgtgatcgacaccgcgctcatcgcccgccgctacatgcgccgcttcttctccgcggacctcatgtccgtgctcccgctgccccaggtggtcatctggaagttcctgcaccggtccaagggcaccgccgtgctggacaccaagaacagcctgctcttcatcgtcttcatccagtacgtcccgcgcgtggtgcgcatctaccccatctcctcggagctcaagcgcaccagcggcgtcttcgccgagaccgcctacgccggcgccgcctactacctcctctggtacatgctggccagccacatcgtcggcgccttctggtacctgctgtccatcgagcgggtcagcgactgctggaggaacgcgtgcgacgagttccccggggtgcaaccagatctacatgtactgcggcaacgaccggcagctggggttcctggagtggcgcaccatcacccggcaggtgatcaacgagacgtgcgagcccaagcgggacggcagcatccccttcaactacggcatatactcgccggccgtcgtgtcggacgtgctcaagtccaaggacaccacctccaagctgctcttctgcctctggtgggggctggccaacctgagcaccctcgggcaggggctcaagaccagcatctacaccggggaggcgctcttctccatcgcgctcgccatcttcggcctcatcctcatggccatgctcatcggcaacatccagacctatctccagtccctcaccgtgcgcctggaggagatgcgcgtgaagcagcgcgactcggagcagtggatgcaccaccggctgctgccgccggagctgcgcgagcgcgtccgccgctacgaccagtacaagtggctcaacacccacggcgtcgacgaggaggcgctggtgcaaaacctgcccaaggacctccgccgcgacatcaagcgccacctctgcctcggcctcgtccgccgggtgccgctcttcgccaacatggacgagcgcctcctggacgccatctgcgagcgcctcaagcccagcctgtgcacggagcacacctacatcacccgggagggcgaccccgtcgaccagatggtcttcatcatccgcggcagcctcgagagcatcaccaccgacggcggccgcacggggttctacaaccgcagcctgctcgaggagggcgacttctgcggggaggagctgctcacgtgggcgctcgaccccaaggccggcgcctgcctgccgtcgtccacgcgcaccgtcatggcgctctcggaggtggaggccttcgcgctgcacgccgaggagctcaagttcgtggcggggcagttccgccggatgcacagcaaggcggtgcagcacacgttccggttctactcccagcagtggcgcacgtgggcagccacctacatccaggcggcgtggcggcggcacctcaagcgcagagcggccgagctgcggcgcagggaggacgaggagctggaggaggacgaaggcaagtccaacagaatcaggaccaccatactggtgtcgcggttcgcagccaacgctatgcgcggcgtgcaccggcagcgctccaggcgggcagtggccgtgtccgagctgctgatgcccatgcccaagccgcgtgagcccgacttcggcgacgactactaacgccgagtttggcgggtgtatgtactctactagttttatacaggtagcaag

SEQ ID NO: 130125 - DNA, 675 bp, Zea Mays
ttccatgtcctgttcatccaactcgtcttcgtcgtcatactcaccattttcatcatcctctcctacggcaccaaattcatccccaatgatttgttcactgcgactactccttcagtctttgcccttgccctttccaaccccctctttgcccatatgcatcaaatgaatatactgataagtgataatgataccttatcaccatcacggattcacgggtacggtgtgcggcagtcagtcagtcagtgtcctcagcttgtagaaaatcccagggtgcctagccaccacgttcctgaaccccggtggcagccggccgcagcgcctccccaagctggaccagcacctccttctccatcttcttccacaccgtgagactcaggacctcgtgcagcaccgccacagtcctcgtccccgtaatgttactccttggcgccaggcgcgacccaccctcatagggcgaaatgtacggcagcctctgccaatcgtccagctatttgcgcgccttcttgtggagctcgaatcctctgggaacgagagtgggaaggcgaccgcgtcgccgaccttgtagccgccggtgcgctgcgcgtagacctgcatcaccgacacggcagggttcttcctgtagcagacgagctctcgaggaggcttccgtccggggagagtagtccgggaagtccg

SEQ ID NO: 130126 - DNA, 1806 bp, Zea Mays
atgcagggtctcgccccgcccacctctgtctccatacaccggcacctgccggccgggtccagggcccgggcctccaactccgtcaggttctcgccgcgcgccgtccgctccgtgccgcacgagtgcctccaggcgccgttccacgccgacctgccggcaccgtccaagaagcccaccgccattgccgtcccgaggcacgccgcggcgccgcgcaagtctggcggcggcggcggcaagaagcagctcaacctattccagcgcgcggcggcggccgcgctcgacgcgttcgaggaggggttcgtggccaacgtcctcgagcggccccgcgggctgcccagcacggccgacccagccgtgcagatcgccggcaacttcgcgcccgtcggggagaggctgcccgtgcatcggctccccgtctccggccgcatcccgcccttcatcagcggcgtctacgcgcgcaacggcgccaacccctgcttcgaccccgtcgccgggcaccacctcttcgacggcgacggcatggtgcacgcgctgcggatacgcgacggcgtcgccgagtcctacgcctgccgcttcaccgagaccgcgcgcctgacccaggagcgcgcggtcggccgccccgtcttccccaaggccatcggcgagctgcacggccactccgggatcgcgcgcctcgccctgttctacgcgcgcgccgcgtgcggcctcgtcgacccctcggccggcaccggcgtcgccaacgccggactcgtctacttcaacggccgcctcctcgccatgtccgaggacgacctgccgtaccacgtccgcgtcgcggacgacggcgacctcgagaccgtcggccgctacgacttcgacggccagctcggctgccccatgatcgcgcaccccaagctggacccggccaccggggagctgcacgcgctcagctacgaggtcgtcaggaggccctacctcaagtacttctacttcaggcccgacggcaccaagtccgacgacgtggagatcccgctggcccagcccaccatgatccacgacttcgccatcaccgagaacttggtcgtggtgcccgaccaccaggtggtgttcaagctgcaggagatgctgcgcggcgggtcgcccgtggtgctggacagggagaagacgtcgcgcttcggcgtcctcccgaagcgcgccgcggacgcgtcggagatggcgtgggtggacgtgccggactgcttctgcttccacctgtggaacgcgtgggaggacgaggcgacgggcgaggtggtggtgatcggctcctgcatgacccccgccgactccatcttcaacgagtcggacgtgcggctcgagagcgtgctgacggagatccggctggacgcgcgcacgggccggtcgacgcgccgcgccgtcctgccgccgtcgcggcaggtgaacctggaggtgggcatggtgaaccgcaacctcctggggcgcaggacgcggtacgcgtacctcgcggtggccgagccgtggcccaaggtctcgggcttcgccaaggtggacctggccacgggcgagctcgccaggttcgagtacggcgagggccggttcggcggcgagccctgcttcgtgcccatggaccccgccgcggcccacccgcgcggcgaggacgacgggcacgtgctcgccttcgtccacgacgagcgcgccggcacgtccgagctcctggtggtcaatgccgccgacatgcggctggaggccaccgtccggctcccgtcccgcgtgcccttcggcttccacggcaccttcatcacgggcgcggagctcgaggcccaggcctga

SEQ ID NO: 130127 - DNA, 93 bp, Zea Mays
gccacagcccggcagatgacccgccggccgccgcggacgcagccgttgccgtcaccacagacgaagcgcaggagcccagagccggcagaaacg

SEQ ID NO: 130128 - DNA, 783 bp, Zea Mays
tgcggtacaagttccatgatatactcaagtgccttgttgataaataacgaaccgatgataatcataacacactttatctgagtggatatgcttatctacatttgttttctgcacctcttctttttttcctttcccatggattccctcccaacacttggtgtggggggcacttaagacatgtttggcatggaattcccttccatgtggattctctccaattcccttgtcagctcatcgttttcttgaatgaaatgcaggggctactacaaatgcagcagtgtgaggggctgtccagctaggaagcacgtggaacggtgtgtggatgattcggcgatgctcatcgtgacatacgagggcgagcacaaccacaccggaatgccagctcagtcagcagcagcagcagcacaggtgtagccgtgtagtcgtagagaactcatcatcagttcatcactgcacccccgcctccccctccttgaggacgaagtggcaccaccaacatggcctctgttggtcaccaggtcgtcgagatgtctggtcctgcttgcgcccacaagatctgtagcgagaatggagtgtgggtgtacacaagactttctaatccatttgtgggggcagctggctgtcgctcaggattatttattgtggtcttgttgagaggtggaagggagaaagtaaaagtttggcgggaacgggatagccgtgtaaactacttgttcatagcacaatcgtcagcggcactgccttcgtttctctgctacggttcttttttgaaacgaaccaggc

SEQ ID NO: 130129 - DNA, 1764 bp, Zea Mays
aaatgcgattttttttctctctccctctcttcgttcactctctctgcgctctccggactccggtcttcttcctcgccttcacaccttctgacatttgcgattcatttaccgtaccgtgaacgacgaccgccgccctccggcctccgggtcgcccccccctggattcgcgcccgcgccaccgcgtctccggatcctctcggagatctgctgctgagggagatgcatataatctgagctgctcgtgaagtgtccagaagaggttcctttttttttcgtgcgtgtataatggaggaagtggaggaggcgaacagggaagccgtggagagctgccgcagggtgctagccttgctctcccatccgcatgaccccgcgcaggtcaggagcatagctctggggacggacgaagcatgcaccaagtttaggaaggtggtctccctgctcagcaatggagaagtaggaacaggagaagccggaccatcaggcacaagcgcaagcgcaagccatcctagagctaagcttgttagcagaagacagaatccagggttcttgactcagaaaggcttcctggacagtaacaccccggtcgtggtgctgaacagcgccgcccatccttctccgacctccgcgcaggtgcatccaagagccggagcattggatacggagggcgtgcaccccctcggagttggaggacctcccaagctggtccagcctttgtccgcgcattttcagttcggcaatgtgtcgtcgaggtatcagcagttaccgagtcatcatcatcgtcatcagcagcaggagaagctgcaggccgccgagatgttcaagagaagcaacagcgggataaacctgaagttcgagagcgccagcggcacgggtacaatgtcgtcggcgaggtccttcctgtcgtctctgagcatggatggcagcgtggtggctagcctggatggcaagctgccgtcgtcgtcgtcatcgttccgtttgatcggtgcgcctgcaatgagcgatccggcgaacgccgcgcagcaggccccgaggcggcggtgcacgggccgcgggaaggacgggactggcaagtgcgctttggcgggcaggtgccattgttcaaagagaagtaagaagttgcgggtgaagaggtcgattaaggttcctgccgttagtaacaagatcgctgatatacctccggatgagtactcgtggaggaagtatgggcagaagccgatcaagggttcccctcatcctaggggctactacaaatgcagcagtgtgaggggctgtccagctaggaagcacgtggaacggtgtgtggatgattcggcgatgctcatcgtgacatacgagggcgagcacaaccacaccggaatgccagctcagtcagcagcagcagcagcacaggtgtagccgtgtagtcgtagagaactcatcatcagttcatcactgcacccccgcctccccctccttgaggacgaagtggcaccaccaacatggcctctgttggtcaccaggtcgtcgagatgtctggtcctgcttgcgcccacaagatctgtagcgagaatggagtgtgggtgtacacaagactttctaatccatttgtgggggcagctggctgtcgctcaggattatttattgtggtcttgttgagaggtggaagggagaaagtaaaagtttggcgggaacgggatagccgtgtaaactacttgttcatagcacaatcgtcagcggcactgccttcgtttctctgctacggttcttttttgaaacgaaccaggc

SEQ ID NO: 130130 - DNA, 2084 bp, Zea Mays
aaatgcgattttttttctctctccctctcttcgttcactctctctgcgctctccggactccggtcttcttcctcgccttcacaccttctgacatttgcgattcatttaccgtaccgtgaacgacgaccgccgccctccggcctccgggtcgcccccccctggattcgcgcccgcgccaccgcgtctccggatcctctcggaggtgagctcgtggctagagcgatgccttttgtgggtacgatggatttcgtgcttgcccttcgcctggtcgagttcctggcgtgcgaatctctggattattattaggggcattccgtccgtgcagcggggtcctcgtgcccgtttcgatgcgtctgcgcgcaagaaatcgctgtcccgggtcgtcactcgccgcggccgtcgacgtcgatctcgggtgtatgtccgcgccggccgcttctgggatttctcgcggagacggctcccccgtgatccgctcacgggctgctttctttcgtggctcaaagctttttcccgattcctatctgctgctgagggagatgcatataatctgagctgctcgtgaagtgtccagaagaggttcctttttttttcgtgcgtgtataatggaggaagtggaggaggcgaacagggaagccgtggagagctgccgcagggtgctagccttgctctcccatccgcatgaccccgcgcaggtcaggagcatagctctggggacggacgaagcatgcaccaagtttaggaaggtggtctccctgctcagcaatggagaagtaggaacaggagaagccggaccatcaggcacaagcgcaagcgcaagccatcctagagctaagcttgttagcagaagacagaatccagggttcttgactcagaaaggcttcctggacagtaacaccccggtcgtggtgctgaacagcgccgcccatccttctccgacctccgcgcaggtgcatccaagagccggagcattggatacggagggcgtgcaccccctcggagttggaggacctcccaagctggtccagcctttgtccgcgcattttcagttcggcaatgtgtcgtcgaggtatcagcagttaccgagtcatcatcatcgtcatcagcagcaggagaagctgcaggccgccgagatgttcaagagaagcaacagcgggataaacctgaagttcgagagcgccagcggcacgggtacaatgtcgtcggcgaggtccttcctgtcgtctctgagcatggatggcagcgtggtggctagcctggatggcaagctgccgtcgtcgtcgtcatcgttccgtttgatcggtgcgcctgcaatgagcgatccggcgaacgccgcgcagcaggccccgaggcggcggtgcacgggccgcgggaaggacgggactggcaagtgcgctttggcgggcaggtgccattgttcaaagagaagtaagaagttgcgggtgaagaggtcgattaaggttcctgccgttagtaacaagatcgctgatatacctccggatgagtactcgtggaggaagtatgggcagaagccgatcaagggttcccctcatcctaggggctactacaaatgcagcagtgtgaggggctgtccagctaggaagcacgtggaacggtgtgtggatgattcggcgatgctcatcgtgacatacgagggcgagcacaaccacaccggaatgccagctcagtcagcagcagcagcagcacaggtgtagccgtgtagtcgtagagaactcatcatcagttcatcactgcacccccgcctccccctccttgaggacgaagtggcaccaccaacatggcctctgttggtcaccaggtcgtcgagatgtctggtcctgcttgcgcccacaagatctgtagcgagaatggagtgtgggtgtacacaagactttctaatccatttgtgggggcagctggctgtcgctcaggattatttattgtggtcttgttgagaggtggaagggagaaagtaaaagtttggcgggaacgggatagccgtgtaaactacttgttcatagcacaatcgtcagcggcactgccttcgtttctctgctacggttcttttttgaaacgaaccaggc

SEQ ID NO: 130131 - DNA, 937 bp, Zea Mays
gaaaggctcgcgtatgccttccccctcctccacctttttcccccgttcgagtgctcgagctccgaccaaatctcgcagcggtagcaatccccgagcggccgagcccgaagcgggatcagtggaggacgagtggacgacaccctcgattctgacctgcggtcggcgcgacttacagagaaccggagatgcagcagggcgacagcacggaggcgcaggtgacgtgggaggaccagcagaacatcaaccgcttcggtcgcctcaacaaccgcctccacgagctccaggacgagatcaaactcgcgaaggaaacgaacgagaaccttgacgatgctgggaacgaactcatcctgtcggacgaagatgtcgtgcgcttccagatcggggaggtgtttgctcacatgccgagggacgacgtcgagactaggctggagcagatgaaagaggatgcggctaagaagctggagaggctagaggaggagaaggaatccgtcctcgcccagatggccgagctgaagaagatactgtacgggaagttcaaggacgccatcaacctggaggaagattaagagtagtactggagttgtgacgacgtggccctctctttctagttcaggtcctgtttttgttcccctgctccccccacagaagcgcttggcccgctcgtgtaatggaagcttgagtctctcagtctttcagaagctcttttcaccaagaacccagaatagttttcattctgcgggtttatacggattgaagctaatggcgctgggcccatgaatcctttttcagtttgattgtacttggtgtatgtgggtacatcgcttgccctatttcctagtacttactagcaagcctgtgactgtgagtaccggaaaacagtggagataacgggcatgtaggtcttgttttctgcctaatatgttgggaatcatttgca

SEQ ID NO: 130132 - DNA, 915 bp, Zea Mays
ctttatcctaataataatctttcataattggtagtgtatggctgtatgcaaaggtcacaatatttctgtcttcttttcatcttgtttcactataatttgagaagtaacttccaatccagattagtagaagaggaatgtgattagaatcacacttgacatcacttctgaattcgctgcatactgccactatttgttatgcgagagttttcatgatccttgtggggaaacgaacctttccaatgtgaaattcctacaccagatctcaaccttgaaaggtcacgtcctcgttcactgaatgttccaggaaacgaacgagaaccttgacgatgctgggaacgaactcatcctgtcggacgaagatgtcgtgcgcttccagatcggggaggtgtttgctcacatgccgagggacgacgtcgagactaggctggagcagatgaaagaggatgcggctaagaagctggagaggctagaggaggagaaggaatccgtcctcgcccagatggccgagctgaagaagatactgtacgggaagttcaaggacgccatcaacctggaggaagattaagagtagtactggagttgtgacgacgtggccctctctttctagttcaggtcctgtttttgttcccctgctccccccacagaagcgcttggcccgctcgtgtaatggaagcttgagtctctcagtctttcagaagctcttttcaccaagaacccagaatagttttcattctgcgggtttatacggattgaagctaatggcgctgggcccatgaatcctttttcagtttgattgtacttggtgtatgtgggtacatcgcttgccctatttcctagtacttactagcaagcctgtgactgtgagtaccggaaaacagtggagataacgggcatgtaggtcttgttttctgccta

SEQ ID NO: 130133 - DNA, 602 bp, Zea Mays
aagaggtctgctgaacgtttgcttggcttgtgtcctcaaatcgtaccatcaacagaagaacccaaggtatccagacttcaagcataagcagactggcgaagcactatgggttgacgggaggaacaaccccaactgggttatatctcagctggcggttttggactcgagaatgagttcgctgcaagacaatgagaggaaaccagtctcctatatgtatgctgacgagttcatgacattggacggcaaccgatagtcgttatggaggagggaagcttcgctcgtgccgattggctggctgttatggcgagcgagatcatgctgtcgacctgtcttagtagctagctcatgcttgctgtctcagttttgttgagcggctctggagggttgcgtgttatgagcgtcgtccgtagtatggtttgtgacataaggtagctatgatgagcctagaacaaacataaacaaagtgcgggggaaacccttgcttttagtgactccattagtagtgctatgtggtttgtgacatggtttttaactatgatgttacgccgaatggtaatatattgaagaacgtgccgtggccctacacaacttagttattattt

SEQ ID NO: 130134 - DNA, 1344 bp, Zea Mays
gtttgagaccggctgacagccacaacagcagctcgtgacccattagtaggggagctgctggagcacacgcacggccacgccccgatatcgccatggctatcctcgccgttgcctctccactcaaaaccctaaaccctagccccggggaccacagccgctgccgcctctcctcttccctcctccaccttccgctaccagtgccacgatggcgccgcctccggtgctccgctcagtacagtgaggcggcggcgcagcccacgtcgacaacgacggcgcgtccagcggacataccctggagcaaggagctctgcaactcggtgcggctcattgggactgtaggcaccgacgtagagctgcggcagctgcccagcggctccgccgttgcgaggggtcgcctcgccgtatggaagtcagccaccgagactacatgggtaactctacaattctgggacgatcttgctattgtggcctctgagcatgttaagaagggtgaccggatatttgtttctggacggcttgtgtcagatactgttgatgaggggcctgagaagcggcatgtttactacaagcttgcagttcaacagttgaatttcatcgagtcccagccagttcgattatatgaaccagaggcaagccaggatgccctaggtggaaggcgtgctgattattttaactctatctctaattcaactgaggataagaatagggataatatgagctcatctcgatcaaccgaagagctgtggcaagtgttctttgccaatcctcttgactggtgggataacaggacaaataagaagaacccaaggtatccagacttcaagcataagcagactggcgaagcactatgggttgacgggaggaacaaccccaactgggttatatctcagctggcggttttggactcgagaatgagttcgctgcaagacaatgagaggaaaccagtctcctatatgtatgctgacgagttcatgacattggacggcaaccgatagtcgttatggaggagggaagcttcgctcgtgccgattggctggctgttatggcgagcgagatcatgctgtcgacctgtcttagtagctagctcatgcttgctgtctcagttttgttgagcggctctggagggttgcgtgttatgagcgtcgtccgtagtatggtttgtgacataaggtagctatgatgagcctagaacaaacataaacaaagtgcgggggaaacccttgcttttagtgactccattagtagtgctatgtggtttgtgacatggtttttaactatgatgttacgccgaatggtaatatattgaagaacgtgccgtggccctacacaacttagttattattt

SEQ ID NO: 130135 - DNA, 890 bp, Zea Mays
ttatttttaaactttactctgtaaataaaaaaacattattttacgtaaactgttggaccccatctactgcacagacacgacgggagcggggaagcctgtcagaagtcagaacaactcgttcgtccgtcaccatagaacgctatcccattcccatcttctgacacaaatatccgcgtgagcgtgacacccgacctccccctcccgctccgggcagcagcagcagcagtcatgcggatagccgtggtggctcccgtcgcggcggcctacccatgttcctcctccctcgctgcgccggcgagtgcgacgagccgcgcgcacgttgcggcggccgggatgtcctacagggcgtcctctttcgtcggaggcgggctcgcggcggtggttgcgtcggtagccgcgcggccgaggagggcgggctctgggagaggcgacgctctcgggtgcaagtgcctcttcgggctcggggtgccggagctcgccgtcatcgccggcgtcgccgcgctcgtgttcgggcccaagcagctccccgagatcggccgcagcctcggcaagaccgtcaagagcttccaggaggcggctaaggagttcgaaagtgaactgaagaaagagcctggggaaggtggcgatcagcccccacctgcaacccccacggcaacgggggtaggtggcgcggagaaggggcttgaggcatcaagtagcaaggagagcacgtcgcggagaagggggttgttggtgtaaaattgtattctggtcttctggagttagcatcaagttcatgtcctttttaaccacgtcgcggtttcaggccattgtagcgatatgtttgtagtctgtaccgggaataacaaccttccgtgattgattatgaatcggttgtcttgggcattatt

SEQ ID NO: 130136 - DNA, 1874 bp, Zea Mays
taaaccacatttctgaactggcatcagactcacatcactagtaacgcccccggcccccgctcgctcgcactcgcaggtcgcaccacactccgtccccctccataactcccacccgcgcgcatgggcgatccgcgggcccgcacgtccgccgtggccgccggcgagctgcggccaccggagccggcgctcgacccgctcgagttcctctcccgctcctggagcgcctccgggcgcgcgctcgcgcccacgccgccgccgccgccggccgcattcgcggccagccccatcgcggaggacgccgcgtgcgagctggacgacgggggcgtcgtcgccgccgcgtccgggagctccttctccttcgcgtccgcggccacgtcgcagctcatcatggaacggatcctcgcgcagtcccaggaagtggcgccgctcacctccggccggctctcgcacagcagcgggcccctcaacggcggcggctccctctccgacagcccgccggtctcgccggagatcgatgacgccaagtactgcagagcggccagcacgccgaaggcgcaggcataccgggcgggcaacaagacggtggggcggtggctcaaggaccggagggagaagaggaaagaggagacgcgggcgcacaacgcgcaggtccacgcggcggtgtccgtggcggcagtggcggcggcggtggccgccgtggccgcggccacggccacggcctcggcgtccggtggcaaggacgagcgcgccgcgcgcacggacatggccgtggcgtcggccgcgacgctggtggccgcgcagtgcgtggaggcggccgaggccatgggcgccgagcgggagcacctggaggccgccgtcgggtcggccgtgagcgtccggacgccgggggacatcgtcaccgtcaccgccgccgccgccaccgcgttgagaggcgccgcgacgctgaaggcgagggctctcaaggaggtgtggaacatcgcggcggtgatcccggtggagaagggcccgggcccggtcggcggaggaggaggaggccaccaccaccaacaccaccagaagcacggcgcgcccaagcagcagctgcaccgcaagatggatagcgacggcagcagcgtcagcgacctctcgctggaggaggagaacagcttccttggcatctgcagccaggagctgcttgctcgcggcaccgaactcctcaaacgcacccggaaaggcgctctgcactggaaggtcgtgtcggtgtacatcaaccggatgggcctggtgatgctgaagacgaagagccggcacgtggcagggacgatcacgaagaagaagaaaagtgtggtggtcgaggtgtgcagggacgtgccggcgtggcccgggcggcacctgctggaggacggcgggcaccggcggtacttcggcctgcgcacggcggagcggcgggtggtcgagttcgagtgccgcagccagcgggagtacgagatgtggaccaagggcgtggcgcggctcctgagcgtggccgccgagcggaagcgcctggcgtgacagattgcgtgcaggtgcagccccgtgccgcacaggaattatgtaggtaggtatgctagggcacgaccgcacgaggttggattggatttgtggcggtgtggttttttgtacgggctgggatgcgacgccggcgcgtggaacgccatgccatgcccttgtgggtgtgagaaggcgcttgctacgctgagctgagctctgaccttgttctggctctctctctttctctttcttgtaagttttgcgtctactctctctctctctctcgttgggccatactacactgtagctggcgaaagataaatgctttgttctggtggtagtagtaactctgtctttgaccggac

SEQ ID NO: 130137 - DNA, 1904 bp, Zea Mays
taaaccacatttctgaactggcatcagactcacatcactagtaacgcccccggcccccgctcgctcgcactcgcaggtcgcaccacactccgtccccctccataactcccacccgcgcgcatgggcgatccgcgggcccgcacgtccgccgtggccgccggcgagctgcggccaccggagccggcgctcgacccgctcgagttcctctcccgctcctggagcgcctccgggcgcgcgctcgcgcccacgccgccgccgccgccggccgcattcgcggccagccccatcgcggaggacgccgcgtgcgagctggacgacgggggcgtcgtcgccgccgcgtccgggagctccttctccttcgcgtccgcggccacgtcgcagctcatcatggaacggatcctcgcgcagtcccaggaagtggcgccgctcacctccggccggctctcgcacagcagcgggcccctcaacggcggcggctccctctccgacagcccgccggtctcgccggagatcgatgacgccaagtactgcagagcggccagcacgccgaaggcgcaggcataccgggcgggcaacaagacggtggggcggtggctcaaggaccggagggagaagaggaaagaggagacgcgggcgcacaacgcgcaggtccacgcggcggtgtccgtggcggcagtggcggcggcggtggccgccgtggccgcggccacggccacggcctcggcgtccggtggcaaggacgagcgcgccgcgcgcacggacatggccgtggcgtcggccgcgacgctggtggccgcgcagtgcgtggaggcggccgaggccatgggcgccgagcgggagcacctggaggccgccgtcgggtcggccgtgagcgtccggacgccgggggacatcgtcaccgtcaccgccgccgccgccaccgcgttgagaggcgccgcgacgctgaaggcgagggctctcaaggaggtgtggaacatcgcggcggtgatcccggtggagaagggcccgggcccggtcggcggaggaggaggaggccaccaccaccaacaccaccagaagcacggcgcgcccaagcagcagctgcaccgcaagatggatagcgacggcagcagcgtcagcgacctctcgctggaggaggagaacagcttccttggcatctgcagccaggagctgcttgctcgcggcaccgaactcctcaaacgcacccggaaaggcgctctgcactggaaggtcgtgtcggtgtacatcaaccggatgggcctggtgatgctgaagacgaagagccggcacgtggcagggacgatcacgaagaagaagaaaagtaagaggcagcagagaaacaaccgcgcatgcgcatggcttcagcagcagcagcgtgccactgctgcactgttgtgtttgtccgtgcagctgacgagcgtgtccgtcactgtcgctgttgccgtgcaggtgtggtggtcgaggtgtgcagggacgtgccggcgtggcccgggcggcacctgctggaggacggcgggcaccggcggtacttcggcctgcgcacggcggagcggcgggtggtcgagttcgagtgccgcagccagcgggagtacgagatgtggaccaagggcgtggcgcggctcctgagcgtggccgccgagcggaagcgcctggcgtgacagattgcgtgcaggtgcagccccgtgccgcacaggaattatgtaggtaggtatgctagggcacgaccgcacgaggttggattggatttgtggcggtgtggttttttgtacgggctgggatgcgacgccggcgcgtggaacgccatgccatgcccttgtgggtgtgagaaggcgcttgctacgctgagctgagctctgaccttgttctggctctctctctttctctttcttgtaagttttgcgtct

SEQ ID NO: 130138 - DNA, 1155 bp, Zea Mays
gtctatctctggtctggtcccaagtcccaattagtcggagcctcctgccctcctcgaccgctcaagccaagaaccagaagccatggagacggcggcgccggcgccggcgccgtgggcggaaatggagatggactgcatggtgcaagtgttcgtgcgcctcgacctcgaggacctggcggcggcggccccgctcgtgtgccggagctggcgccgggccgccgccgacccgtccctgtggcgcgcgctcgacctgcgccgggaccacgtcgcgcgcttcatgccctggggagcgctcgccgccgccttcgcgcgccactacgctgtgcgcaggttctccgtcgcgggcttcctcaggctctgcgtgtcgcgcgcgcgcgggtacgccgacgacgtcgcgctcccgccgctcctcgccgagccggcggacgagatcgaccacatttccctccagtaagtgcctctgctgcgcacgtctctgtacactgtcacctcacacacgaacacgcggctcacatgcttcgatgcccatcccacgtgcagctgtcccaggctgcggcgcctggcgctcccgcagctgacggccagcgacgaggcgcgcctgccggacatcgtcccgcggtggccgctgctggagcacctggagctggaggccaagccatcctcctcctctttccccgcgctcgccgcgcagctcgctctgcactgcccgggcttcgccagcctcaagacctccggggccgtcaagcccgaggacgccgcggcgctggcgcgctccctgcccaggctccggtccctgtgcctcgaccgctcctacctgcccaaggaacagttcctctccatcctcgccgcctgcagggacctacgggagttcagcgcgcgctgctgcgtcggcttcgacgacaaggacgaggaggtgctcagacgaggggccaggatccagcggttcgacgtagaagggtccaagctaatggacgacctggaggacgagttcgccgccggtgacggtttctgcgattcggcctacgttgacgtgatgtgatattaaactaaattaaataattactattctcatattaaatactttgatatatctgtgccatctggaataattagttaaaataaatacactacatatctacttcaaaaaaacatata

SEQ ID NO: 130139 - DNA, 867 bp, Zea Mays
atggagacggcggcgccggcgccggcgccgtgggcggaaatggagatggactgcatggtgcaagtgttcgtgcgcctcgacctcgaggacctggcggcggcggccccgctcgtgtgccggagctggcgccgggccgccgccgacccgtccctgtggcgcgcgctcgacctgcgccgggaccacgtcgcgcgcttcatgccctggggagcgctcgccgccgccttcgcgcgccactacgctgtgcgcaggttctccgtcgcgggcttcctcaggctctgcgtgtcgcgcgcgcgcgggtacgccgacgacgtcgcgctcccgccgctcctcgccgagccggcggacgagatcgaccacatttccctccactgtcccaggctgcggcgcctggcgctcccgcagctgacggccagcgacgaggcgcgcctgccggacatcgtcccgcggtggccgctgctggagcacctggagctggaggccaagccatcctcctcctctttccccgcgctcgccgcgcagctcgctctgcactgcccgggcttcgccagcctcaagacctccggggccgtcaagcccgaggacgccgcggcgctggcgcgctccctgcccaggctccggtccctgtgcctcgaccgctcctacctgcccaaggaacagttcctctccatcctcgccgcctgcagggacctacgggagttcagcgcgcgctgctgcgtcggcttcgacgacaaggacgaggaggtgctcagacgaggggccaggatccagcggttcgacgtagaagggtccaagctaatggacgacctggaggacgagttcgccgccggtgacggtttctgcgattcggcctacgttgacgtgatgtga

SEQ ID NO: 130140 - DNA, 257 bp, Zea Mays
aaaaaaaaaaaaaaccccaatttgttgtagggagtttttaccgaacaactggagcattggttccggttactctctgcctaaggttgatcaggctgatggaaatggatggtcctgatatccaaggcgccagccactcgggcacaaaaactgctctcttatctaaaatattcatgcccagaagtagtttctctcccttttatgcacatttgagatctaacgtttgtacatgatggtctgaaactataacatgctatttt

SEQ ID NO: 130141 - DNA, 1124 bp, Zea Mays
gacaagtgaaaatacccgttgggctcggctcgcgcggcgccgtcctctcccactctctacgcacgaacacagcacgcgccgcaccccgctctctctctcctgcgttcccatctgcggcggggagtgagcacattgaggacggtctactcctcgttcgcgtgcggttcgtcccgagcgatccggcaaccatgaacatcttcaagaagaaggtcgaccccaaagaggctctcaggaccagcaaacgtgaaatggcggtcgccacgcggggagttgagagagagattggttccctgcaaatggaggagaaaaagctggttgcagagataaagaagactgccaagactggaaatgaggctgcaaccaaaatattagctcggcaacttgtcaggctgaggcaacaaatcctcaatttgcaaggcacacgggcacagattcgtggagtagctactcacacacaggcaatgtatgctggcacttcaatctctgctggaatgaaaggtgcaagcaaagctatgtcagcaatgaacaagcaaatggaaccggcgaaacagataaaggtcatgaaagaattccagaaacaatcaacacagttggacatgacgcttgagatgatgtctgatgctattgatgaaacacttgacaaagatgaggcggaggaggaaacagaagagcttacaaaccaggtccttgacgagattggcgtcgatgtggcttctcagctctcttcggctcctaaagggcgcatcggagctactaacaagaaagtcgataatggtcaagcacgtcctgcaaggaacgtggcggctcctgctctagaaccctcctctgctgaagttgaggatctggagaggcgactggcatctctgcgccgtacctgagtctgagctgttgaagaaagaacttgtttgtaatactagcagttattcatctatatatgtaaagttggtttatatgtgtagggaaaacagcgagctgcacatgatacggttgaacctacttaatgttttatttaatttggaagttgactgcacagtgaccctagtcgctagtcccataagccgacggaactaggcgaagccagggcttagggtcacgaagggtttagggtcacgaaggattttaat

SEQ ID NO: 130142 - DNA, 257 bp, Zea Mays
gtcaatcggcgtatgtacaaggctcaaggttcgactagtaagcatacaaacagtagaagaaacggccaactcactcggttaatattcttggccaacactggtcagcagggtttccgatctaggagcaccaacaatcgatagagttagcatctcttctgctttgtgttgcttcaacaagaattcgtcggatcatcacttatcggcagatcaacttcgtcgaggtagatgttctcagccatctaccatatgtggaggac

SEQ ID NO: 130143 - DNA, 1161 bp, Zea Mays
actcggcctgacgccgaccgataaaccccttcccccatcgcttcgctttcgctcccattccccaccatcgccccctttgctcatctccatcccacctgccaatcaaatccttgcgcctcctcccgccatttcgcccccgctcaccaggctaccccccccccccccccccccaaaccctaacccataccgacgatgccgaaggccggcagcggggtggcggacgaggaggacttccgcgccgaggtggacgagcgcctcatcaacgaggagtacaagatctggaagaagaacacacccttcctctacgacctcgtcatcacacacgcgctcgaatggccttccctcaccgtgcagtggcttcccgaacgcaccgagccgccggggaaggaccactgggtccagaagatgatcctcggcacgcacacctccgataacgagcccaactacctcatgctcgcgcaggtccagctgccccacgaagacaccgaggccgacgtgcgccactacgacgatgagcactccgacaacgggttgttcggcgcggccaccggcgaggtgcaaattgttcagcagataaatcatgatggagaggtcaatcgagctcgctatatgccccaaaattcatttataattgctactaagacagttagtgcagaagtatatgtcttcgactacagcaagcacccatctaagcctccactagatggtgcatgcaaccctgatttacggctgaagggacataattctgaaggatatggcttatcatggagtatttttaatgagggacatttgttaagtgggtctgaagatgctcaaatttgcttgtgggacattaaagcaaatagtagaaacaaaagtcttgatgccctgcagatttttaagcatcatgatggtgtcgttgaagatgttgcttggcacttgaggcatgggtacttatttgggtcagttggtgacgatcatcatcttttaatttgggacctgcggtctccctcgcctgctaggcctgttcagtctgtggtggcacaccagggcgaggtgaactgcctggctttcaacccgttcaatgaatgggttgttgcaactggttctactgacaagactgtcaaattatttgatcttaggaagattcatacttctctgcacacctttgactgtcacaag

SEQ ID NO: 130144 - DNA, 537 bp, Zea Mays
atggcgcatgacgagaccggctacagcaagaacgagtcgtacctcgatggcgatgatggagaatacggggagcacgtcggagctcggccaaacatggacagtaccaccgcgtcgaggaagcgagcttcgacgccgtcgccttcggccgagacgaagaacgcttcacgtacgccgagctccggcaaggctggacccaagttgcggcggagtgtgccgcgcgcggacgatatggcgagagactgccgccggtcttcgtcgctgccgaagtcaaagcagcacgcaacagccatggtcggacggagacaacaccttgggcgcggtggcttccaacatggcccaacgggatccattttccgaccattggtgacaacggaaacggccacccttccctccaccgagtacggagtcgtatacggactctgttggaaacacctccgcgctctgcctacgcaaacgcagagggcgctccctaggatatggatacggagggcgccgttgctggagttggtctcaccgggtgaagcaacagtcatatag

SEQ ID NO: 130145 - DNA, 978 bp, Zea Mays
ttgtctaaggcaaaatagactttttattgagggtctgtgtggtaatgtagttcaaaaaaaattggaaagagactattcattatcatgggccgaacaatgtttaggatgggccactttacaagcccagcggctggttgccagatgggatgaactcacattcctatccagaaacatagtccgtttaggcccaaaagaagcggcaccacgagtccacgagggtccaactgatgctcgggctccccaatccccacccggaaaggcccaatcgctcacaggttgcagcgcttcgaccctcctccggagtaatccacagcagcggtgggagcaacagggacggtggagacatggaggagccgctaccgaagcccgccccctcggcagccgcggaggaggtggcggagcggttcaggtcgctcgtcgaccccgatgatgttgcctccatcaggcagacgcagcacctcataatggggcgattgcaagatagcaatgcagttctcacacattttaatgagtattccgaacgatgctttgtagaagtgtctggtgattttgctagtaaaactcgccttctcaagtctatgaaggctgatctcgaccatattttcacaaagctaagagagatgaaagctaggttagcagctacctatccagacgctttccctaatggtgcaatgtcaaagacgatggaccagagaccagaccttgaaagtcctttagattagtgcgtctaacatcaaaattccgcatattagtgacgacatctgttgtcataccaaagatttatttaattcctcattaggcttgaagcgacatatatctgttgccaaaaaaaaaaaaaaaacgagtgacctgtgcttccgcatctctgtgtattagaactgggcttaaatgcttaatatatcatcatctttgttgtgttgtactgttgtagtattgcatcttgccagatcttctaagagccttgaccctacatccttt

SEQ ID NO: 130146 - DNA, 1399 bp, Zea Mays
tgctggtgtgctctgctctgcgtctctcgctccaagcctctgcaagtctcggtccaaatccattgggtaaacaaagaagagtcatatgaattgtagagctagttgatatgaattcatcgaaatccattgcctagttcggacagttatactgctgcagtacccactctttgtgtgattcttggcgaggtgcacatgtctgtcgcatctatagccaacagatttcccatttggaggcacgaacaaactatagagcaatccaatagggctcgggattcttgatctgcagaaactaaaataaaatgaagtatctgccgccagcacccgacaatgggattggggtaaatgtaagaattggtgaagttaacttgttggagggctcatccttggcagcacctgacaatgaagaactggctgcagggtaaggaaagggattctgtgcagctgaagattttttggctcttgctgttcctcacactgtcatggaaggcgtcgcccttgctgttgcggaggactagtgctgggaccagccgcagacaatgcagcttccagccctagggcagcgacaagctggggatgaggacgtgacgttgagcctcatgcggtgcctcagaggaaggcgagagtggctggattttagactagtcttgaacaggttataggtcattatcaaaaccagaaaaggtcacacccaaccaaacgaatcctccactctgtgaacccaaaccggaccactacacttctgagcttatttctcaccaaaccagattgacccgaaatgaaaaccaaaccatgaaatctgggttcggtccaaaccgatagcaggaaatatgagtaacactagttgatcacatattcacatcaattgcttggtcatggaatacattaattgtcattttccattctgaatcgtggttatgattttcctttactatgcagaatggggcgattgcaagatagcaatgcagttctcacacattttaatgagtattccgaacgatgctttgtagaagtgtctggtgattttgctagtaaaactcgccttctcaagtctatgaaggctgatctcgaccatattttcacaaagctaagagagatgaaagctaggttagcagctacctatccagacgctttccctaatggtgcaatgtcaaagacgatggaccagagaccagaccttgaaagtcctttagattagtgcgtctaacatcaaaattccgcatattagtgacgacatctgttgtcataccaaagatttatttaattcctcattaggcttgaagcgacatatatctgttgccaaaaaaaaaaaaaaaacgagtgacctgtgcttccgcatctctgtgtattagaactgggcttaaatgcttaatatatcatcatctttgttgtgttgtactgt

SEQ ID NO: 130147 - DNA, 367 bp, Zea Mays
gcggaggcgtgtctcggttcacatcgtgctggcgcggcagtggacggatccgtagaggacgacgcgcaggcgcgggaacagaacggatggagtagagagtagagacagcgcctcggcacgagcatggatagagttcttgcttggtcggctgctccattgggcgatgacggagtacaccgctgcctgctgagatgcctaaagctcgagaccgtgcccggtaggccagatccgggctcctccagtggagtcgaccatggatctcgactccagaagctagatgtggaggtggcgatggtcctaggcgcgttagaggtggcggcagtgagcggctgtggacgggacctagcggtgcattaaggatctagag

SEQ ID NO: 130148 - DNA, 777 bp, Zea Mays
ttttttttctaaaattctaagccgcaaaaatccggctccacaatcccgctgttcgcgagccactccctctcacgagtgacgacgaaaccctaggccatggcttggcgcggcgccgcctcccgctccattatcgccgccgtccgtgctcgcgccgcatccccgtcttccaccgccgcctcgcgcctccgctcgacggctccacttcccgccccctcgcgccggtccgtccccgccttcgctttcgcgaccgcgaggccgttggcggcgatgtcggggtccccggcggcggccgtggtgaagctcaccgggcactcggcgacgagcgtgcgggcgtgctgtgagctctcccagggcacttaatgcgcacttttgtccttaaatgcaaggattggattctttggaggttgcatcccttggaaactcatcgggcttgcgtccttttccatgcattttgcagagtacttagcgcctcgtgtgtcggcaaacggacagtatatctgctgtaacttacataaataatcatatgttagcctgctgctactcactgccccgcatcgattggaactaagttgatgtttggttcacataattgtataacgttaaatcatgtttgtttaagtctaaccttaatcggattccacactaaaaactgatattggcctattcaaatttattactgctgttatttatgttatattttgttttattttgcgaaccaaacggcactgtacaaattgttcctttgtacgagctcatgaaagaggaagatttttgtcc

SEQ ID NO: 130149 - DNA, 375 bp, Zea Mays
attttgtatgaatttttaatgttgggcttaccctgaccttgttattttgcaggcacttaatgcgcacttttgtccttaaatgcaaggattggattctttggaggttgcatcccttggaaactcatcgggcttgcgtccttttccatgcattttgcagagtacttagcgcctcgtgtgtcggcaaacggacagtatatctgctgtaacttacataaataatcatatgttagcctgctgctactcactgccccgcatcgattggaactaagttgatgtttggttcacataattgtataacgttaaatcatgtttgtttaagtctaaccttaatcggattccacactaaaaactgatattggcctattcaaatttatt

SEQ ID NO: 130150 - DNA, 732 bp, Zea Mays
ttttttttctaaaattctaagccgcaaaaatccggctccacaatcccgctgttcgcgagccactccctctcacgagtgacgacgaaaccctaggccatggcttggcgcggcgccgcctcccgctccattatcgccgccgtccgtgctcgcgccgcatccccgtcttccaccgccgcctcgcgcctccgctcgacggctccacttcccgccccctcgcgccggtccgtccccgccttcgctttcgcgaccgcgaggccgttggcggcgatgtcggggtccccggcggcggccgtggtgaagctcaccgggcactcggcgacgagcgtgcgggcgtgctgtgagctctcccagggccaaaatgggaaggatggttgatgaggagatcagacggaatgattcatatcctgatgcacttaatgcgcacttttgtccttaaatgcaaggattggattctttggaggttgcatcccttggaaactcatcgggcttgcgtccttttccatgcattttgcagagtacttagcgcctcgtgtgtcggcaaacggacagtatatctgctgtaacttacataaataatcatatgttagcctgctgctactcactgccccgcatcgattggaactaagttgatgtttggttcacataattgtataacgttaaatcatgtttgtttaagtctaaccttaatcggattccacactaaaaactgatattggcctattcaaatttatt

SEQ ID NO: 130151 - DNA, 727 bp, Zea Mays
ttttttttctaaaattctaagccgcaaaaatccggctccacaatcccgctgttcgcgagccactccctctcacgagtgacgacgaaaccctaggccatggcttggcgcggcgccgcctcccgctccattatcgccgccgtccgtgctcgcgccgcatccccgtcttccaccgccgcctcgcgcctccgctcgacggctccacttcccgccccctcgcgccggtccgtccccgccttcgctttcgcgaccgcgaggccgttggcggcgatgtcggggtccccggcggcggccgtggtgaagctcaccgggcactcggcgacgagcgtgcgggcgtgctgtgagctctcccagggaaatgacgacgatgcatgatgcttgggaagcaattttaaagcatggaaaaggcacttaatgcgcacttttgtccttaaatgcaaggattggattctttggaggttgcatcccttggaaactcatcgggcttgcgtccttttccatgcattttgcagagtacttagcgcctcgtgtgtcggcaaacggacagtatatctgctgtaacttacataaataatcatatgttagcctgctgctactcactgccccgcatcgattggaactaagttgatgtttggttcacataattgtataacgttaaatcatgtttgtttaagtctaaccttaatcggattccacactaaaaactgatattggcctattcaaatttatt

SEQ ID NO: 130152 - DNA, 840 bp, Zea Mays
ttttttttctaaaattctaagccgcaaaaatccggctccacaatcccgctgttcgcgagccactccctctcacgagtgacgacgaaaccctaggccatggcttggcgcggcgccgcctcccgctccattatcgccgccgtccgtgctcgcgccgcatccccgtcttccaccgccgcctcgcgcctccgctcgacggctccacttcccgccccctcgcgccggtccgtccccgccttcgctttcgcgaccgcgaggccgttggcggcgatgtcggggtccccggcggcggccgtggtgaagctcaccgggcactcggcgacgagcgtgcgggcgtgctgtgagctctcccagggccaaaatgggaaggatggttgatgaggagatcagacggaatgattcatatcctgatgtaggtccttttatttttctgtgtgttatcagtgttaagaaattagaagaacatagtgtgcaatatttggtgagtttaaaattgttgtttcattggtttagtgtattgtgaggttgtgtcctacacgaatgttggttttactgtttagtagtattcgatctttctagagaaacctgttttaattgttttctagatgatattagagaaaatatgctattatttttgacaaaactacttatatctgtgctgcgctactggtttttatgatgtaaattagcttcatagtcttggtgcactatagatgttggtgattttatccattgttatgtttattgatctccaaggttcggtgcaagtactcctgcacatccattatttatagaatcatgataatacttttgtactcatgcacatatattttttgtgtccat

SEQ ID NO: 130153 - DNA, 1660 bp, Zea Mays
cagaacactgtgtgcgaagtctgtggagatattggttacagacaacttctgctgcgttgcagagactgcaagcattatgctgtgcaccaatactgtctggacaaagttgtcttcaatgcgtcatcaatagaatggttctgttacgaatgcctacataggcgtggcgacgacgttacttgcgccagatctccagagcaggtctcaagtgaagggccatcaagtcatgcccattgtggttctccagaacatcagctaactactaccaagagcgtggagtcaataataagggatgtggggccatattgttcacccaatagtgatggctgtgccgactcattttccagcccccctggcgtagaaagcatcccaagcgttcgaggaacaagtgcagatcccattgatgtttcaagcacttcttcgtctcgacatgataccagcatagaagcgtctgcaagcagtgaaaggtccacggggtgtcagacggctagctcctgtcgtcgtgtgaaaactgtggagatggctacggtgtcctcatcgtctgatgaggagtcaggagaagacattgtctctgaaaacgtcgttttgggatatgttttggcatatagatgctatctatctaaagcacagaagaagagagtgatggggcttgttcaggaaattcaacctcaattcacagcctttgtatcaataatgcggaggggcaatgtgcaacccccgggtcctaacctgggaatcaccaaggaatatgcaactgcacatttcccagatagaagcacacacatcactcttgggacccctggcaagagcaagaagtggcatcccagattctacaggagagatgtaagcagaaactacatggttacgggagagtggttagactttgtccgtgacaatcatgtccaggagggagacatctgcctgcttttaccaacaagggatgatgtgatgagacgcacgtttacggtctacgttctgcacgaaacatctcattattccgcaggtgggcctggcgcgtctagtgttgcgaagatggcttcagaaatccgtactgaggaagaaccagctgctggagagagtgtttcctcgggaactagtggtgcgcaagagtttcctcatggatctgctgtggagagcggcggagactctggtgactcattcgagcctccatacttcgtaccatgcaagagtcctctatccgaatcccagaagaggatcgtcgaggagcgagtgcgagctatccgatctgaaatccctatttgcgtggcagtgatgaagaacaacaacgttggtttcgctcaacgttggatgctagaattaggttcgcgatacggttcggtgtatctcccaaccaaagggcaaaccatattgctctgttgcgcggggaagacgtggaaggccaagatgatgtttcataatggtcggcggtggtttctcaatggaggatggcccaattttgctcgtggcaatggcctgcgcgtcggtgacatctgcctattccaactggagaagaacgagagcacgcttaccatggctgtccatatcattcgcagggagcagttttagtttgccgtatatgaaagtgtgtcgcccgcccctgttctttcggggcttattgcgcttgcgctatgtactccgtttcaaatatgttttgacttttcag

SEQ ID NO: 130154 - DNA, 1479 bp, Zea Mays
cccaaacataccaaagtaggagtgctcatcatattacatattcacatccatatccatgcttacacacagcacgcacatcattatttgttctaccacgaagctagcgacgacatggcgtgctctgaatctgaagacgacatggcaatggcatggatcctagcagtagcagtagttaggcgaggacgaggctcttcttgaaatgcgcgatctgaatgttctccacgttgagcttcttgaagttgctgttcttcctggtgctgaagaagtcgccccagttgtaggcgtcgtacctgggcggatcgtccttgctcaccagctcctccaccggctccaccatggtgtaggtcgccgggttgaagaagtagggcatggagaacctctccctcgccgagttcaccgacacccggtgctccgcgctctcgtacctgtcgttgctccacaccttacgccacacgaagcgatctgagaagcctatacacatgcagtgcatgcaacctacgttcagctcagttcatcaggtgggcacgtacctggatgaggtcgccgacgttgatgatgaacgagtcgggcacgggcctgacgcggacccactcgccgtcggagcgccgccggacgtcgagccccccgacgtcgtcctggtacaggatggtcagggcgccggcgtccttgtgccgccccacgccgagggccaggtcggggctcgggcaaggagggtagtggttcagccggatgaaggtcgtctggtccttgaagaagccgtgcagccggtcgggcctcagcttcaggctccgggcgatcagctccagcagcttgaacgccagctcttccatcgctttcgcgtactcctccagcgcctctctgcggaaacttacgtacgtacgctcacgattcccttaatttattaacgcaactatgatcgaaagggatatatagttaatttcgtcacctgaagcccggtagatcctggggccacttgttatcgaacacaagctcgccgtcggccacggctgccggcggcggcggctcgcgcggcacgaggtcgtacacctccttccagtccctcacgttcttggtgtgctccgactcgtagtacccgagcggctccgcctcgttcctccgcacggcggccttccgctctgccggcagcgcgaagaacgctcgctgcgcctccgtcgcgcgcgccacggtctctgcgggcacgccgtggcccacgaccacgaagaagccccagtcccggctcgccgcgcccacctcggcggccagcgcgtccacggcgccgccgctggcggccagaggcgagaggtcgatgagagggatgccggtggcctcggtgacgatgggcttggggcggtgctcgggggcctgcacgaaggcctggtccatagtgaggccgcccatggcgaatcacgcctcgctcttgctgtgcgtgtgaggctgagatgagctgcgtgtcttggctaggacacgcaatgtaccttg

SEQ ID NO: 130155 - DNA, 1948 bp, Zea Mays
ccggaatacatactgagcgatggctctttaacaggctcctccgatccaccgccaggtcccggcgtatcgatccatagccataatgggggaagcagaggagcgttgctcggccggggccggctgctccttctccctcacgtgcctggaggacggcgccgacctcgacaccggtggctccgcggcggagagcgccgatggcggcaagctggctgcctctctttacggcgacgccgaggaggaccaggagtacatcgaccacctcgtgtccaaggagagcagcttctgccgctccccttcctcgtccctgtgctcgcccgtcgtctccgacgtctccgatgctggcgccgagacgtgcccgtgcccttcgtccatggcggcctcatcccacgagtggttccgttgtgcacgccgcgccaccgtcgagtgggtcttcgaggtgaccgacggatcggttcagcacagcacagacgcaggcttacttcggcttctcccaccgcacggcgtacctggccgtctcctacatggaccgcttctgcctccaccggtgcatggacaggtcagtgatgccctgggcggcgcggctgctggcggtggcgtgcgtgtccctggcggcgaagatggaggagtaccgcgcgccggcgctgccggagttccgcgccgacgacgagtacgacttcagcagcgtctccatccggcgcatggagctgctggtgctgtccacgctggggtggcgcatgggcgacgtcacgccgctggactaccttccctgcctctcctccagcaggctacgccggggcggcgatggcggcctcgtcgccgccaaggccgccgcgcttatcttctccaccgcggaagccgccagcgtgctcgactaccggccgtccaccgttgccgtcgccgccgtcctggcggcagcccacggtgccgtgacaaaggaagcgctggagtccaagatgagcagcctgtctccgtccagcctgctcgacaaggacgacgtgcacgcctgctacagcacgatgatgctgaacgagagctcgtcggcgacgccgagcaagctgttggcggccaagagaccggcgccatcagcctccggctccacaggcgccggcagtccatacgagtccgtcgacgcggactcctcctcgttcgcggccgcggcggacagcaacaagagggcgcggctggtggagctgccggccgtcggccgatgagaagcaccgccggtcaatgtagtcttcgcttcttccagctttgaattttcagttgtttgattggtcacgcgccgcgccgcgcgcactgccggagaaacggtgaccggcaatgcggcggtgttgtggagacggcgagcttcggtttggttccttgtgaggttcgatggcgagagaggacgaaaggagagctcgatcgagaaaatagcgagtgcgactgtgcccacacgatcacgactcagcagacaatgtatagcgcaaggcggtgagcagtgagctccagcgccacccgcccacccgtccacgcacccgggatgggaagcctgaagccgccgcgcaggcgcatcagcagtagacgggtcagcgccggccattctccatggtgctgctgctggttggcggtagctgcagcgtcgcaagcgagcgccatggccgcccatggccatggcccatgcctgccgaaagtggatgtgtacatgcatgccctgtgcgtgaggatggtgaccgaggggtggtttcgtggcagagctgtaccgcgctttagtcacgtgattcgcttgctcttgctgctgggttgcttgctactagctaggactacttgctattgcaccagcactgcctcttgatctgtacactagcaagttgtaagtgtaaccctacatctacatgcatggccctgagaattgaaatgcattgggtagtgggtatcaggcatttctggtgtacgagtatatatacgt

SEQ ID NO: 130156 - DNA, 759 bp, Zea Mays
agtggttccgttgtgcacgccgcgccaccgtcgagtgggtcttcgaggtgaccgacggatcggttcagcacagcacagacgcaggcttacttcggcttctcccaccgcacggcgtacctggccgtctcctacatggaccgcttctgcctccaccggtgcatggacaggtcagtgatgccctgggcggcgcggctgctggcggtggcgtgcgtgtccctggcggcgaagatggaggagtaccgcgcgccggcgctgccggagttccgcgccgacgacgagtacgacttcagcagcgtctccatccggcgcatggagctgctggtgctgtccacgctggggtggcgcatgggcgacgtcacgccgctggactaccttccctgcctctcctccagcaggctacgccggggcggcgatggcggcctcgtcgccgccaaggccgccgcgcttatcttctccaccgcggaagccgccagcgtgctcgactaccggccgtccaccgttgccgtcgccgccgtcctggcggcagcccacggtgccgtgacaaaggaagcgctggagtccaagatgagcagcctgtctccgtccagcctgctcgacaaggacgacgtgcacgcctgctacagcacgatgatgctgaacgagagctcgtcggcgacgccgagcaagctgttggcggccaagagaccggcgccatcagcctccggctccacaggcgccggcagtccatacgagtccgtcgacgcggactcctcctcgttc

SEQ ID NO: 130157 - DNA, 2244 bp, Zea Mays
tcgcagaccgcaacgatgtcggccgcggcagggacgccaccggaagacggaggggatcggccgtggcagtcttaccataccgcatacaccaacgccaaagctggaatggagggtgttgacaaagagaaggtgcagaaggtaatctacgaaatgagcaagggctcaaaatatttcgaaaatgagcagaggaaggaggcagccaccaaacaaaagattgaacatctccgtgcacaatgtgcagtattgactgataatgacatatcacattttcagaaggttgcagataagaaaatgttagagttggaagcttcacgagatctttcaaagatatggcttcacactgacatggatgccttttatgctgctgttgagacattggagaacccatccttgaagggaaaacccttggcggttggtagcatgtctatgatagctactgccagttatgaggcacgcaagtttggagtgcgtgcagcgatgcctggttttattggatgcaaactatgtcctgacttggtttttgtcccaccaaactttgagagatatactcattatagcgagctgacaagaaaagttttccagaggtatgatcccaacttcattgcaacaagtctagatgaagcatacctcaacataaccaatgtttgcattgagagaggcattacaggcgaggaggttgctattgaacttaggtctgccattcaccaggaaactggtctaacatgtagtgctggggttgctccaaaccgtatgattgcgaaggtttgctctgatattaacaagcccaatgggcagtttattttgccaaatgactgggaagctgtattgacatttgtatctacattgcctataagaaagataggtggcataggtaaggtaacagaacagatgttacatcaggttcttggaatcagtacatgtcaggagatgctgcaaaaggctgcttttttatgtgctcttttttcggaaagctcagctgatttctttctgtcggttggtctcgggttaggaggtacagaaaccccagaacaaaggcaaaggaaaagtatcagttgcgagcgaactttcacagcaacaaatgattcttctttgcttttcaaaaaattagctagccttgcagaaaatttatctgatgatttgcaaaaggagggtttcaagggaaaaacactaacactcaaactgaagactgcagattttgaggttcggacaagggcagtaacaacacggaactacatcgactccaaggaagatattctggtctatgctacaaagttgattaaagctgaaatgcctatttctttgagattgatggggttgcggatgtctcagctacatgatgagaaggacgatccatctacttcaacacaaaagacactagatatattctttcgttcatcaaacagtaactcaaatggcaatggaaccactgttcagagaatcactaattccccagggcaggataatgattctattagtctcacaaccaaggaagagtacttggcacctgatgctggaacaagtgtttccacaggccaacaggatttcttcctacatgatgagatctgttttattcccgaacaacaacggagtttagacaacgatactaaagaggctgtcctaagcgacccgttaggtggaacaaagtcagatgatgtgtcttccagtgcaaaggttacgcccactaagaagttggatgaacctgatcccttgatcagcccgaaggctgtgtcttcatcaagtaaacctgaccagcagtcatggattgatggctacatttgttccatctgtggatttgaactgcctccgggcttcgaggaggagaggctggaacattcagattttcacctggctgaaacactccagcaggaagaagcagtggacggcacaagacacatctcaaacgagagctgggtggctgaaagaccacgctctactgcacccacgcccaagaagaaactcaagtcttctaaagaaggaaagcatattcctattgactctttcttcacaaagtgtaataagagcccgtaaccgtaaggtaggacttgccggcaactctgtaactatgggcatgctagccaagtgttgtacgtgttaactttattcttgatgagagcaatatatgtaaatatcaccctcaactctcactaatagccaagtgttgttacagagttccacggtgtttccacatacgcaggccttcatgacaaaaaaaaaaaatggagagtgttttttttttctttctaa

SEQ ID NO: 130158 - DNA, 469 bp, Zea Mays
caaactaataaaagtctatttcatagaaatagtttcataatctttattttacaacctgtacaaaccaacactcaacataaatcatgaagactccgaaaagtcaaatgcaacactttattctgacagaaggcagtaaacatcgtgtatgtcctttaacgagccaaacaaacagtaaacaacaccttactaatacagacttcaaaccctagaagtagatgtacatatagttcaagtaactcaggaaactgacaaatgcaaaaggcaaggagacactgactagtaaagtagtaatattttgaacagatgtgccaattaacatgtgctaccctgactgagtgttgacctactgtgcgttgcaactatgagctgtatgatttctgacatctttttttttccttttttactgtagtcaatttggcactaacctggaacacataaaataaaaagataaggacaagcttgtgaatcg

SEQ ID NO: 130159 - DNA, 705 bp, Zea Mays
gatccatgcacgcctcccgaaggcaggctatagctggattattatatcaaggttcctcatgatcagttgccttccttgctcaagagttagggccaaaataaatgcaagacagaaggagtggtatgaaatggggccgggacagaggtgctcatcatatatatggatcagcgtaacacagagaaatcaatggtgggaaggtgagagaggcagacagacacagcagagagaagcatgcatggtgtgctgcagctgcagcgcaggacgacgacgacgacggcagcagctagcagcgagtggtgatgtgagatagagaaacaaaatgcatgcagcaaatagctttcttcgcttttttttttttgcaggcggatcggagggggagcggcaggcatgaattgatgaaggaattaacacaccaatgcaacttggaggagcgctcagctaaacatgtatcttcgttcacttgtgcatttatttggtgtcgttgaacatgtggatcttctttctttcttcacccctctcgttagtattcttcgcctttaatttcactcctttttccgtttccctttcacaatttctttctgccgtgagtacgtcttcagagagagagaaacggttctgcccgtattgcttgcattgtgtctataaataaatagaagtatttatttggacatgaatggatggagggcaaggagctacctattcatc

SEQ ID NO: 130160 - DNA, 1080 bp, Zea Mays
cctcggtctcctcgctcgccgaccctgccccctactgaactgccgcgcgcgcgtcgtggagtagagatccctccgtccggccatgaagtgatcccgtggccttcttcatcgtctcttcattgatttcatcagcactgcgtgcatacaaggaggagaggagtccggccgctggcagcgaagatgtcgtcctctaactctccatgcgccgcgtgtaagctgctgcggcgcaagtgcacccagggatgcgtcttcgcgccctacttcccgccagacaacccagcgaagtttgctagtgtgcaccgtatctttggtgccagcaacgtctccaagctgctcaacgatcttccggcggtgcagcgggaggacgccgtcaactctctcgcatacgaggcggaggcgcgcatccgcgaccctgtctacggctgcgtctcccacatctccgtcctacaggtcaggatcaggcaggtgcgcgacgagctcgtcgccgcgcgcaaggaactggccgcctacattgggcccgccgcctttacgcctttcgtcgcgacgccgcagcagtaccaccaccagtatgccgcaggcgctggcggcggcgtgcctctcgcgacgggcatgggtctcgcagtcggcgtcgggccgcagccgcaccagcagcacggtcacccgcaccagcagcagatgatggcgcacgggcagcacctccaccaccagcaccatctgatggctgctgctgaggcgcagcagcagctcgctctggccgcgcaggtcgcgcgcgagcaggatgtcatgatgaggcaggcggtggtctacgcgcacgccgtgcccgggagcggcgccacggtggccgttgggccgcccgacgcggtgccgtacgagggcggcttcctcttccagcagcagcaccaccagcaaccgccgtcgcaggcgcagacgaccgtggcgctcacgtaccagatggagcagtccccgccgccgtcgtccccgggccagtctcactctcaccccgaggtgtcgcagcagaagaacacggatggcagcgacgagggcagcggtggcggcggtctcgttccgccgccggcctga

SEQ ID NO: 130161 - DNA, 987 bp, Zea Mays
atgcccaagccaccggccggcttcgtgctgaatgaatggggcaggtgcatcgccgctgcattcaagtgcatcttcatcatcgtgcggagttggcctgccgccggccaccaataccatcgcctcggtccacccaccagttgcaacgctggtcctgtgctctcaccatttgatagggagttcagtacaaagaagatatcaattatgaagaggattgctctaagtgctctcatcaaaatatatggttgctttttgtttcacctggcatcggacttcgataacatgcgtcctcacctgatcattgttggcgcactgaagatgatcaacatcattgcgcctagctggagagtcatccctgcaacaaacatgatcgacaaaatccgcaaagaccctcagctcaagaaaaagatctgtttcaatccgtacatgtacagaggaaacctcgcactgcaaataggctgcaaactcctttccgtcagcctagacatcaagaagagcctgcacgagtattctccgaagtataacccccaatctttatattttcataataacgtattttacattcccttttatatattgtttgatgcggccaagaggacgcacgtccacgacacatcacctggcacgctgactaccaccgtgcacgctgacgacgtcaacgccatagcggttttccctgtttgtccgctccacgttaccgcgccagaggtcttgttcgcgtccgtagggctgctcgacatgttcaacgccgacaacgtcgtgaaggagtgtgtcgtgaccagcggtgctggcggcaaggccatggcactcaggtccatgggtcgtgggtgcggcctgttcagcgcctactattcgcacgagccggtgaggtgcctactggacatggtggaagtggagttcagttatgatgttgacatcgacctcgtgttcgtcgacctgcccgtactagagcaggagcggtaccggtggacactggagattgtggtgtag

SEQ ID NO: 130162 - DNA, 1879 bp, Zea Mays
atcttgcattctcgctgtccagcaaaatactcgaaaaccacctcgcaagacttggaaaccgcaacgcctcttcctccttgccaggacaggagtctcaactctcaaccaagtggagagtggaccgaccatggccaccgccgccgacatccgcgtctccatcggctaccagacccgcttcgggctccgcctcgccgccgcgctctcctccccacccccatcccccgccagcaactccgccttctccccgctctccctccacgtcgcgctcagcctcctcgccgccggcgcgggtggcgccacgcgcgaccagctcgccgccgccctcggaggcgacgcgcccgccggggccgacggcctgcacgcgctcgccgagcaggtggtgcagctcgtgctcgccgacggctccggcgccggcggcccgcgcgtcgccttcgccgacggcgtcttcgtcgactcctcgctgaagctcaagccggccttcgaggagatcgccgtgggaaagtacagggccgacacccagtccgtcgacttccagaaaaaggctgctgaagctgctggtcaagtgaactcatgggtagaaaaaattacttctggtctcatcaaagagatcctgcccccaggttctgttgaccacaccaccaggcttgttcttggtaatgcgctctattttaaaggagcttggactgagaagtttgatgcatctaaaacaaaagatagcgagttccaccttcttgatgggagctcagtccaagcacctttcatgtccagtacagacaaacaatatatcgtggcttacaacaacttgaaggtgcttaagcttccataccagcaaggtgcggacaagaggcagttctccatgtacattcttcttccagatgcaaaagatgccatctggagcttggctgaaaagctgagctctgaaccagagttcctggagaaccatgtcccaatgcacaaggttccagtcggacagttcaaagtccccaagttcaagatatcctttggatttgaggcatctgagttgctcaaaggtctcgggctccagcttccgtttagtgctgaagcggacctgtcggggttagttgattcaccagagggacggaacttgtctgtttcgtccgtattccacaagtcatttgtcgaagtgaacgaggaaggaacggaggccgctgccgcatctgctgcaacagttgtgctccggtcgttcacgatgcctcaggatttcgtcgcagatcaccctttcatgttcctgatccgcgaagacttgactggtgtggtgctgtttgtcggccacgtggtgaatcccctccttgctccatagtgtgttgttcagaagtgtggccttggtgcggttccatcccctcacagatgtgtggctttgacagctgatcaagctttatgtgtaatctgccatgttttgtttttgaataaatagatgcttgatcgatgtatgtaaggctgcgagatgatagttcagaattggtatgtgtggtcatggactcatggtacttactgtttcattcttcctctctgatgtttctggttctagtgacctttttccagtgacatctgtaagactgataacatatagattctgttgtgaagcacgtatcggttactgatgattatatttactgtttactttcgagttccacatcctgcttgattctgatgttcagtctttttttatataaaaataatgaattaggtttgtgccaattgtttcacaatgacacggtgttcacgatgataaggcaggcagaaatgagtagtttggtacaaatctctttgaatgaaaatacgtgaccctgaaaactgaacaatccgtttattcgttcggttatttctatacctcattggaagggattgaaaaaaaata

SEQ ID NO: 130163 - DNA, 1696 bp, Zea Mays
cctccgcttctcttccgtggtctggcgtctatccacctgctcctgcggtcctgcccccgctgctgcctgctgccgtgcagggacagccggagcaggagcaacgccgcccgccttcaccgtcgtcgcccatggccgacatgcaaaactacgccgccccgccgctcctcacccacgctaccgccaagcgcaagcgtgtcgccctcaaccagctgcccacgctccccaacgccgtgctcggcgcgcacgacgaaggcggcggcggcgatgacaagcccgtcaagaagcagcacctcctccccgccgccaagcccgagcccaatgcagctcccgcgcctgccgccgccgcctctgatgtcgaggaggacccgcagctccgcaagccctacgcgtccgacatctactcctacctccgctccacggagtcgcaggccacgcgccgccccgccacggattacatcgcggcggtgcaggtcgacgtcacgcccaacacgcgggccatcctcgtcgactggctcgtcgatgtctccgaggagtacagattcgtctccgacacgctctacctcaccgtctcctacatcgaccgcttcctctccgccaacgcactcaacaggcagaagctgcagctcctcggcgtcgccgccatgctcatcgcatccaagcacgaggagatcagcccgctcaatgtggaggatttctgctacatcaccgataacacctacaccaagcaggaggtagttaagatggagagcgatatactgaatgtcctcaagtttgagatgggaaatcctactccaaaaacgttcctgaggatgttcaccagatttagcaaagaagacaccaagaagtatcgtagcctccagctggagttcctgggtagctacctttgtgagctcagcttgctagactacagcttgcttcgcttcttgccgtcacttgttgcagcctcggtgctgtttgttgcaaggctgacccttgatccacacacccatccctggagcaagaagatgcagacactaactggctacaagccatttgagttgaaggactgtgttgctgccatacatcatttgcagctcaaccggaaatattcatccatgatggcgacccgggataaattcaaggaacgcagggtaagcatgggccttgacagccgcacatggttttatgtcagatcgtttgcataagcatagtcgcagtgtcctaactggaataaacctcttgaacagtttaagggtgtatcagctttgctaccacctgttgagatcccagcgtcatacttcgagaaactgaaggagtagttgttcctggacattctagtaagccaaacacacagggctaaggttgttaaggtcctgaggttcttcgatgctgcatctaggctcgagtaggtgcattcagagttgatttgtttgaagttcaagatcaatagaaggctaggcgtgtcaaattttgtacttgtgaatcataactgtacattaaaaccaggtttctttatttgatggggcacaactccaaaattttcatttgtttcctatttcttaatgaaatagggggctttgccccttcgtcaaaaaaaaaaaaaaaacaactccaaaattttcatttgttggctcttgctccattttctcccttttttcatatagttctatacggagcacagtatctagtatctagtggtcagatataagagaggaca

SEQ ID NO: 130164 - DNA, 2040 bp, Zea Mays
gggccatccgtttagccatgcctaacggtccatgcacagccactgaaatcaaataaaaagaaataaaatggaacaccgctcacgtcagtctctgacagcccccaaaactcccgcgctctcggcacggtaggcggatggcggggtgggcgccgcgggactttgcggcctcgcgccgtcccctgaaacgctcagaatttagtaaaaaaaatccctaatctttccctccctccacggcgtgccgcaggcaaaactcgaacgagtttgcaaatcgaggccgcggcgatcgaaaccgcaaagccagagcacccgaggctcttccctccaaccggagctctcccaagtcccaaatccttcgaattcaaaaaaatggcggtcccctctccctccattcccaccgccccgcccgctacttaaccgcgcgcccgccactcctgctccgccctccgcttctcttccgtggtctggcgtctatccacctgctcctgcggtcctgcccccgctgctgcctgctgccgtgcagggacagccggagcaggagcaacgccgcccgccttcaccgtcgtcgcccatggccgacatgcaaaactacgccgccccgccgctcctcacccacgctaccgccaagcgcaagcgtgtcgccctcaaccagctgcccacgctccccaacgccgtgctcggcgcgcacgacgaaggcggcggcggcgatgacaagcccgtcaagaagcagcacctcctccccgccgccaagcccgagcccaatgcagctcccgcgcctgccgccgccgcctctgatgtcgaggaggacccgcagctccgcaagccctacgcgtccgacatctactcctacctccgctccacggagtcgcaggccacgcgccgccccgccacggattacatcgcggcggtgcaggtcgacgtcacgcccaacacgcgggccatcctcgtcgactggctcgtcgatgtctccgaggagtacagattcgtctccgacacgctctacctcaccgtctcctacatcgaccgcttcctctccgccaacgcactcaacaggcagaagctgcagctcctcggcgtcgccgccatgctcatcgcatccaagcacgaggagatcagcccgctcaatgtggaggatttctgctacatcaccgataacacctacaccaagcaggaggtagttaagatggagagcgatatactgaatgtcctcaagtttgagatgggaaatcctactccaaaaacgttcctgaggatgttcaccagatttagcaaagaagacaccaagaagtatcgtagcctccagctggagttcctgggtagctacctttgtgagctcagcttgctagactacagcttgcttcgcttcttgccgtcacttgttgcagcctcggtgctgtttgttgcaaggctgacccttgatccacacacccatccctggagcaagaagatgcagacactaactggctacaagccatttgagttgaaggactgtgttgctgccatacatcatttgcagctcaaccggaaatattcatccatgatggcgacccgggataaattcaaggaacgcaggtttaagggtgtatcagctttgctaccacctgttgagatcccagcgtcatacttcgagaaactgaaggagtagttgttcctggacattctagtaagccaaacacacagggctaaggttgttaaggtcctgaggttcttcgatgctgcatctaggctcgagtaggtgcattcagagttgatttgtttgaagttcaagatcaatagaaggctaggcgtgtcaaattttgtacttgtgaatcataactgtacattaaaaccaggtttctttatttgatggggcacaactccaaaattttcatttgtttcctatttcttaatgaaatagggggctttgccccttcgtcaaaaaaaaaaaaaaaacaactccaaaattttcatttgttggctcttgctccattttctcccttttttcatatagttctatacggagcacagtatctagtatctagtggtcagatataagagaggaca

SEQ ID NO: 130165 - DNA, 1916 bp, Zea Mays
acccaacaccccagtatcctgaattcctgaatcctgatgcggtttagcgcaccgaggtagaccgagcgagacagccagccagcggggcaagctgaaaaacctatcttctatcaccacctcggagcccgagtggaaggggaaggcaggaatcgccccgcacgcgcccccatccgcctgccggcgacggcccacatgccgaccgcctacagcctccgcgcgccgccctccaccgcgcagcagcgcctcaggctgcccccgccgccgctgccgctttgcccggcgggtggaggggccgcccgccggaggagggttgtcggggtagcgtccgcgtccgcgtcgcccttcgacgagctgtacgcgcgggggaggcccgcacatggaccctccaagaaatccatgctctggaacttgatccaggacatagagcctctggaccttagtgtcattcagaaagatgttgctcctgaaacggtagatgcaatgaagaggactatttcgggcatgttgggtctgcttccatctgatcagttccgtgtcattgtagaagctctttggaatcccttcttcaaattattggtatcttcaattatgactgggtatactctgcgaaatgctgaatacaggctttcttttgaaagaaatcttgaactgtctgaagaagttgcagaatgccaaaaaagtgatgtcattgaagataatcatcatgacatcaatttgggtacacctgtcactatttttagattagcagaagaagacatgccccaggaccctgaaaaaactgatgacgaatcatcatatgaaaatatgggagaagagctcggcgacttaaccctgcaggcagaagagtatattattcagatgcaatctcgtttggatgccatgaaaaaagagctacatgatctcaggagaaagaattctgctctgcagatgcaacggtttgttggggaggaaaaaaacgacttgctggactatttgagatcactaacaccagagaaggttgctgaactatcagagtcttcatgtcccggcgtgcaagaagcaatccattctgtggttcatggtctgctggctactctttcccccaagatacactcaaaggcccctccaccgctagataacacttctggaggggtcttaaaccttgggggcgaggatgatgactgtgcagaacttgtggagaatgcttccctcccatttcagcccctaatatctgttccccgtgattatcttgcacgcttgctcttctggtattgtgaagctgacttaataggcattgttatgttcatatatcatgtagcaactgaacaccgacattttcaattgtttaggtgcatgctgctgggtcactacatccggggtctggagtaccggttagagcttgctcagcttctgcgaatatccagcgacgtgggttctttctctggtggtgatgatcatgttgtttgagggtaccacgtttactggtattcctcaccgggaagaatggaaagatctggccaagcaatgcagaggtggccgttacactgcgttccctctctgaaatgatgccccaagcccccaatacaggtggcgctgctgagctatatattagttgtagttcctgtaaattcagaaaacagtcactcgggtcgggtgtaaagctagtgttacatatgcacgtgaagcactttctttttttcttcctttgatgttgtgccgtataaaaaaggtttggtggttagttggtgtttatctactggtagcatgataggcttccttgtattctagttgtatgtatctggtggttgtgattgatgtccagcgtccatttagcttgtgtggcttcttgattcgaataaagtttaacttattttttggaactcacgagcacatactttcattggaattatatttacattgttgtccaatgtccattt

SEQ ID NO: 130166 - DNA, 1776 bp, Zea Mays
acccaacaccccagtatcctgaattcctgaatcctgatgcggtttagcgcaccgaggtagaccgagcgagacagccagccagcggggcaagctgaaaaacctatcttctatcaccacctcggagcccgagtggaaggggaaggcaggaatcgccccgcacgcgcccccatccgcctgccggcgacggcccacatgccgaccgcctacagcctccgcgcgccgccctccaccgcgcagcagcgcctcaggctgcccccgccgccgctgccgctttgcccggcgggtggaggggccgcccgccggaggagggttgtcggggtagcgtccgcgtccgcgtcgcccttcgacgagctgtacgcgcgggggaggcccgcacatggaccctccaagaaatccatgctctggaacttgatccaggacatagagcctctggaccttagtgtcattcagaaagatgttgctcctgaaacggtagatgcaatgaagaggactatttcgggcatgttgggtctgcttccatctgatcagttccgtgtcattgtagaagctctttggaatcccttcttcaaattattggtatcttcaattatgactgggtatactctgcgaaatgctgaatacaggctttcttttgaaagaaatcttgaactgtctgaagaagttgcagaatgccaaaaaagtgatgtcattgaagataatcatcatgacatcaatttgggtacacctgtcactatttttagattagcagaagaagacatgccccaggaccctgaaaaaactgatgacgaatcatcatatgaaaatatgggagaagagctcggcgacttaaccctgcaggcagaagagtatattattcagatgcaatctcgtttggatgccatgaaaaaagagctacatgatctcaggagaaagaattctgctctgcagatgcaacggtttgttggggaggaaaaaaacgacttgctggactatttgagatcactaacaccagagaaggttgctgaactatcagagtcttcatgtcccggcgtgcaagaagcaatccattctgtggttcatggtctgctggctactctttcccccaagatacactcaaaggcccctccaccgctagataacacttctggaggggtcttaaaccttgggggcgaggatgatgactgtgcagaacttgtggagaatgcttccctcccatttcagcccctaatatctgttccccgtgattatcttgcacgcttgctcttctggtgcatgctgctgggtcactacatccggggtctggagtaccggttagagcttgctcagcttctgcgaatatccagcgacgtgggttctttctctggtggtgatgatcatgttgtttgagggtaccacgtttactggtattcctcaccgggaagaatggaaagatctggccaagcaatgcagaggtggccgttacactgcgttccctctctgaaatgatgccccaagcccccaatacaggtggcgctgctgagctatatattagttgtagttcctgtaaattcagaaaacagtcactcgggtcgggtgtaaagctagtgttacatatgcacgtgaagcactttctttttttcttcctttgatgttgtgccgtataaaaaaggtttggtggttagttggtgtttatctactggtagcatgataggcttccttgtattctagttgtatgtatctggtggttgtgattgatgtccagcgtccatttagcttgtgtggcttcttgattcgaataaagtttaacttattttttgg

SEQ ID NO: 130167 - DNA, 1722 bp, Zea Mays
attgatggagaatcaagtagctccatgaacttgagattaggcatttagacttggcaaatcttgagaattatggagaaacaagagtgaggtacacagcactgatctgttgttaactgatcgggtgcgggcgtaaaacaagtcggcccaagtcccaacaacggatcggaagcgatccccattccacatccaccaaatggccgacgccgacgctgccgccgtccccgttgatggccccgcccgcaccaccgtgctggactcgctcggcgaggacatcacccgcatcgtctaccccgtctccgcctgcatgctcctcgtcgtgctcctggtctccctcctctcctcgccctcctccccgtcgcccttctccgcctccatcgcggccgccaccggcggcgtctccggaggggacgacatacccacggcgctcatcaccgccctcaccttcgtcgtcgccgtcacggccgccaccttcctgctcgcgctcctcttctacctccgctgcacgccctgcctccgcgcctacctcggcttctccgcgctctccgtcctcctcgtcctcggcggccaggtcgcgctcctcctcctctcccgcctccgcctcccgctcgacgccgtctccttcgcgctcctcctgcccaacgccgcgggggcgctcgcgctcgccgcgctggtcccggcctccgtccccatcgcgctccaccaggccgcgctcgtcgccgtcgccgtactcaccgccttctggttcacgctgctgcccgagtggaccacctgggcgctgctcgtcgccatggccatctacgacctcgcggcagtgctgctccctggtggccccttgagggtgctgctcgagctggccatacagaggaacgaggagatcccggccttggtctacgaggccagaccggtggatccccgccatggccggaattggcgcttgtggagggaagggaggcaacctggcgcggatttggatgccagttccacggttgaggtgattggggaggtacttcagcctgactctggaaacagttcggcatcccaagttcatgaacctgccactcttgctggtgatattagtaattcaaggcccagggtgacattggcggctgctttgagctcctctgattcttctactgtcgcacaagttggggaagtttcagcattgcaggagcatagagttgctgttgctgaaatgatggtacctttgatccagccacgccctcagagatctgaagaagaggtggaagatgaagatggcattggattaagctcatctggggcgatcaagcttgggttgggggacttcatattctacagcgttttggtcggcagggcagcgatgtatgactacatgacagtgtatgcctgctaccttgccatcattgcagggcttggcatcactctgctcctgctggcattcttccgcaaggcattgccggccctaccagtgtccattgccctcggcgttctgttttacgtgctcacaagaacactgcttgaggaatttgtcgtgcagtgctccacaaatcttgtgatgttttaatatgcacgcaacattgcttattgctgtaccattgtagttcatgatcggcacctttaccaatgattagctcgtaattttctgcaagtgttaattttactggtccgtgcactgatttattatatgaagatatttggaattcctgtcatattttccactactaatcttgttctgtatgcccc

SEQ ID NO: 130168 - DNA, 1330 bp, Zea Mays
aaccgagcccacccaccaaccaaattccgcgagaccgcgactgcttctccatccttccacgaactagacgagggaagagcgctgaagctgtggaggaaaacgaaggatctccccgtgcttgtgtatgccaggtcgcctgctctccgtccgcatcccgtccctcgcgaaactcggcgctcccagcaggtgtgcaaaatccatggcttcagacactggcaagaagctcatccagatcgatgtgagctcggacacagtatgcccttggtgctttgtcggcaaaaagaacctcgagaaagcgatggagcaaagcagggacaagtttgacttcgaggtttcgctccccctcttcagatccccgtcatgatcccggtttcagaattcttgtttacgcgggtgccaaccctgtgtctgtctgcttgctttgcttggaaggtccgctggcatccgttctttctaaaccctgatgcgcctaaggagggcgtcaggaaatctgacttctacaaggcgaagtttggtcctgttcagtatgagcgtgtcatttctcgcatggccgagatatttcgaggactcgggcttgagtatgacatgtcggggctgacaggggatacgatggatagtcataggctcatagcacttgctggacaccaaggctatgacaagcaaaatgctcttgttggagaattattccttaattacttttgtgaaggaaagtatattggtgacaagcaggttttgctggacgctgcaagaaaggtgggcatagaaggggccgaagaactgtttcaagaccctaccaaaggagtcgatgaggttcaggaagaactcaagaagtattcatctggcatctccggggtaccacattttgtgatcaatgataaatatcaactcagtggtggccagcctccaaatgtattcatgagggcgtttgagatggctgcaaaagatggagcttaatggcatttaaaaggagctcctccagtagtcttcgcatatgttaaaaaggaataggagccgaatttaacaataaagttccagcacagctcatcgctgatttgcgaaaaatatgtggaatcagttgtatttccgtagttctgatatggtgataattagtggtgaagatggtgtggatgttcactttcgaataaaattctaggcgatcggatatggcatatgggttagaatgccccatcatcagagcccggtctgtatttacatttggttcgataggatgtgtgcaagatatcagaaaacaacaaagttcagatttgatattcgaaaggaataaaaaaaaagctagcatacacagctgcatttagattgattgttacca

SEQ ID NO: 130169 - DNA, 1327 bp, Zea Mays
aaccgagcccacccaccaaccaaattccgcgagaccgcgactgcttctccatccttccacgaactagacgagggaagagcgctgaagctgtggaggaaaacgaaggatctccccgtgcttgtgtatgccaggtcgcctgctctccgtccgcatcccgtccctcgcgaaactcggcgctcccaggtgtgcaaaatccatggcttcagacactggcaagaagctcatccagatcgatgtgagctcggacacagtatgcccttggtgctttgtcggcaaaaagaacctcgagaaagcgatggagcaaagcagggacaagtttgacttcgaggtttcgctccccctcttcagatccccgtcatgatcccggtttcagaattcttgtttacgcgggtgccaaccctgtgtctgtctgcttgctttgcttggaaggtccgctggcatccgttctttctaaaccctgatgcgcctaaggagggcgtcaggaaatctgacttctacaaggcgaagtttggtcctgttcagtatgagcgtgtcatttctcgcatggccgagatatttcgaggactcgggcttgagtatgacatgtcggggctgacaggggatacgatggatagtcataggctcatagcacttgctggacaccaaggctatgacaagcaaaatgctcttgttggagaattattccttaattacttttgtgaaggaaagtatattggtgacaagcaggttttgctggacgctgcaagaaaggtgggcatagaaggggccgaagaactgtttcaagaccctaccaaaggagtcgatgaggttcaggaagaactcaagaagtattcatctggcatctccggggtaccacattttgtgatcaatgataaatatcaactcagtggtggccagcctccaaatgtattcatgagggcgtttgagatggctgcaaaagatggagcttaatggcatttaaaaggagctcctccagtagtcttcgcatatgttaaaaaggaataggagccgaatttaacaataaagttccagcacagctcatcgctgatttgcgaaaaatatgtggaatcagttgtatttccgtagttctgatatggtgataattagtggtgaagatggtgtggatgttcactttcgaataaaattctaggcgatcggatatggcatatgggttagaatgccccatcatcagagcccggtctgtatttacatttggttcgataggatgtgtgcaagatatcagaaaacaacaaagttcagatttgatattcgaaaggaataaaaaaaaagctagcatacacagctgcatttagattgattgttacca

SEQ ID NO: 130170 - DNA, 1243 bp, Zea Mays
gggaccgtgaaggcgtgaaccgagcccacccaccaaccaaattccgcgagaccgcgactgcttctccatccttccacgaactagacgagggaagagcgctgaagctgtggaggaaaacgaaggatctccccgtgcttgtgtatgccaggtcgcctgctctccgtccgcatcccgtccctcgcgaaactcggcgctcccaggtgtgcaaaatccatggcttcagacactggcaagaagctcatccagatcgatgtgagctcggacacagtatgcccttggtgctttgtcggcaaaaagaacctcgagaaagcgatggagcaaagcagggacaagtttgacttcgaggtccgctggcatccgttctttctaaaccctgatgcgcctaaggagggcgtcaggaaatctgacttctacaaggcgaagtttggtcctgttcagtatgagcgtgtcatttctcgcatggccgagatatttcgaggactcgggcttgagtatgacatgtcggggctgacaggggatacgatggatagtcataggctcatagcacttgctggacaccaaggctatgacaagcaaaatgctcttgttggagaattattccttaattacttttgtgaaggaaagtatattggtgacaagcaggttttgctggacgctgcaagaaaggtgggcatagaaggggccgaagaactgtttcaagaccctaccaaaggagtcgatgaggttcaggaagaactcaagaagtattcatctggcatctccggggtaccacattttgtgatcaatgataaatatcaactcagtggtggccagcctccaaatgtattcatgagggcgtttgagatggctgcaaaagatggagcttaatggcatttaaaaggagctcctccagtagtcttcgcatatgttaaaaaggaataggagccgaatttaacaataaagttccagcacagctcatcgctgatttgcgaaaaatatgtggaatcagttgtatttccgtagttctgatatggtgataattagtggtgaagatggtgtggatgttcactttcgaataaaattctaggcgatcggatatggcatatgggttagaatgccccatcatcagagcccggtctgtatttacatttggttcgataggatgtgtgcaagatatcagaaaacaacaaagttcagatttgatattcgaaaggaataaaaaaaaagctagcatacacagctgcatttagattgattgttacca

SEQ ID NO: 130171 - DNA, 1309 bp, Zea Mays
caagatttcacctcctacgtgccgaatggctcctgtgtctcacaacaatgattccgattcgagtgatagtgacgacaacacaatcatactggccactcttcttaccctatgcatcgaagctaccaggcgtaggcgcaggcagtcttctatccctcgccgcgtgatcgctagggatcattttgctagggagaaccttatccgccatcactacttcggccctaaccccgtgtatccagctcacatgtttcgccgaaggtttcgcatgagtcggccattgttcctccgtattttgcaaggcctccagcagcaggatagttacttcactcaacaggtcgacgctacaggcctcgccggtcttggaccacttcaaaaagtatgtgcagcaatgcggaccctagcttacggcttacctactgatgccatcgacgaatatatacagataggcgagtctacggctagacaatgccttattcgtttctgtcgcgcactcattgcatactttagtgtgtggtaccttcgaactcctaaccaggccgacattgcacgcatcatgcaacatagcgagtcgagggggtttccaggaatgctggggtccatagattgcatgcattgggagtgtaggaactatcgtggtcgaaattctagacctaccatgatacttgaggcggtcgcatcgtacgatctatggatttggcatgcttttttcggcatgcctggtacaaacaacgacatcaacgtgctacataggtctccggtttttgacccaatgacaagcggtcaaatgccccccgtgcattacacagtaaacggacatgcatacaactttgggtactacctagccgatgacatataccctaactggccaacttttgtgaaagccattcggcacccctgggaggaaaagaagatctatttcacgcagatgcaggaaagtcaccggaaagatatcgagcgcgcattcagtgtgcttcaagcacggtgggcagtgctacgtggtcttgcttacagacgggatcgtaaccgtctaaccgagatcatcactgcttgcataataatgcacaacatgatcattgaagatgaaggggagtttgctgccaacaccgactttggagacaatgcttctgccactgcacattgcgaactcatacaagagggaaggtcggattgggtcatcgatcactttgatctacgtcgccaggaacgattttgcaatcttcaaaatgatcttgtcgagcatttgtggaccaaacgtgggagtatgtgatgaaacttgaaccttagtcctttaaatgatgtggctccgtagtgt

SEQ ID NO: 130172 - DNA, 2208 bp, Zea Mays
aggagggatgctagttgctggtcgctggagtcggtctaaagaaagaatggaggggacgttgctgctgctgctgcttggcctgctcctcgtgctacccctgctcctcgtcaaactcgttgtcgtcaacaagtacttcccggccgccccatggcagcccgggaagccgcctctgcgtctgcctccggggccacggcagctgccggtgatcggcagcctccaccacctcctcgcgtcgcgccacggcggcctccttcaccgcgccatgcgcgagctgtccatccagcacggcccggtgatgctgctccggctgggcgccgtgcccacgctggtggtgtcctcggccgaggcggccagggaggtgctgaagacccacgacgcggcgttcgccagccggcaccagacgccgacgctggacgtgttcagcctcggcggccgcgacatcctcttctccccctacggcgagctgtggcgccagctccggcggatctgcgtgctggagctcttctcggcgcgccgcgtgcagtcgttccgccgcatccgtgaggaggaggccgcggggctgctccggtccgtggccgactcctgcgccggcggcagcgcggtggtggacatcggcgagcgggcctgccgcgccatgaacgacaccgtggtgcggtcggccgtcggcgggcggtgcgcgcggcgggacgagttcctgcgcgagctccacagggccgtggtgctcacctccggcttcaacctggccgacctgtacccgtcgtcgcggctggtgcgccgcctcagccgcgcgctgcgggagaccgagcggtgcaaccggaacgtccgcgacattatgggcgacatcatccgcgagcagctgcagaccgccgccggcgacggcgggcggggagaacgggaggaggaggagaaggacaacaacctactggccgtgctgctgaggctgcagagggacggcggcgacgacgcgcagtgcccgctcaccaccgacgtcatctccaccgtcgtcctggagatcttctcggcggggagcgagacctcggcgacgaccctggagtgggcgctgtcggagctgacgaggaacccgcgggtgatgcgcagggcccaggccgaaatgcgggaggccttcagggggcagcggaggctcggcgaggccgacacggcgaggctgaggtacctgccgctggtggtgaaggagacgctgcggctgcacgtgcccgtgccgttcctgctgccgcgggagtgccgcgaggcgtgccgggtgatgggctacgacgtggcccggggcaccaaggtgctggtgaacgcgtgggcgatcgcgagggacgccgcgtactggggcgaccccgaggcgttccggccggagcggttcgagggtggcggcggcgccgtcgacttcagaggcgccgacatggagttcatcccgttcggcgccggcaggcggatgtgccccggcatgtcgctggggctcgtcaacatggagctggcgctcgcgggcctcctctaccacttcgactggacgctcccggacggcgacgggaaggtgctcgacatgagcgaggcgttcgggatcaccgtgaagaggaagtccaagctcgtgctgcgcgccacgccgcgtgttccattctcgtattgatgttgacccatccatttgcttttctgtattactattattatattttatggattcgccacagcaacaatggagatgagatgagatggagtagagtacggacagggatagcgacgttgctcacacgacacgacgcggtagtcgcagagcggtcagctgccaacccaatctcaatccaccttttcggcaggatcaggactgcggcagcaccaggcaggcacgtgtggcggtcgccggcggatcaggacagcggcagcacgccagcaccagacaccagtgcgcgctcgtgtcctgagtcttgagtcctgactggcaacgacgatattgttgtgaaaatacacgtttgatcatggataatattgttagagaatgctagtgggcttggcctatattgttagcgaagccgcgataatcttgtagaggctagcggtttagcatgtactccatcttttttttatttatcatattttagtaaaaaatgaaactagcggagaacaaatgtttgaggcagtatatttatgtaaattaaatataaagaagattctcttctttatagcgtataaaaataaccttttcta

SEQ ID NO: 130173 - DNA, 453 bp, Zea Mays
tatttaatataagcactaatttcactgatcctattactactagcttacatgactttatattttacacatggagaaacttcgaacagaaaaaaacttgagtccgctttcagttcccctttctccaagttcacataatgttcttgattttttagtcaatactttattaccaccattgttatctttttggaaaacgagagatataagtaatgtctaaacatacttgcttacaaagtgcacatatgttcagtacatgcactaaaattacaattatacactcaagaaccttttggtttccacataacaagccaaaatgcagtacgtttacggcctatttcgcttcaatcgtctatttatctgcaccaaatgatgtgtttcttattgaaaacaattttcaatttaattcttctgcaggactcaacatgcagaaactaggatttctaaactacaaaagag

SEQ ID NO: 130174 - DNA, 1050 bp, Zea Mays
atggcgggggctgcgcggaggagcgtcggggacgaccgctatgagcagcacaacgcggccaggatggcgttgagggcgtcggtcgtgcggtggaccgtgcagaacagggtcgcggcggcggcgaagcggccgtggcgcgcaagggtggacagcaggcggtgctggtgctggcctgttgcgtcaggccgcgctgttacgcaagtctgcatgggcagagatgaaggatttggtgagaaagccaaggctgttgtgaagatctcatcgtttcagatcattttggctcagggtgtcacaggctcgtttccatggtctgccctgccctttgccccaatgtggctggagttgatggggtttacgcacaacagaactgggctcctgatgataacgtttgcactggcaagctcacttggagggctgctaggtggaaatatgggggatcactttgctacttgcttcccgaattctggccgaatagtcctgtcgcagataagctcagcttctgctattccgttggctgctctgttgcttttggggctccctgataactcttctggttccttgcatggacttgtcatgtttatcatgggtctgagcatctcctggaatggtcctgcaactaacaagcaactattggagatgcttctgaataattgcggagagcctgtccataggcaggtcattgataatggccttcttccaatacttgtgaagatagtgaagaaaaagaaaagaaggttaataactcatgcaaatgcgaagagcaagagtgaaaagttccctccgccgcatcaggatggcgcacttggatttcccttgggctgttcgaaccacatggaaccttcatttgaacccccaaacccttctcccttcagcactctattggagatgcttctgaataattgcggagagcctgtccataggcaggtcattgataatggccttcttccaatacttgtgaagatagtgaagaaaaagaaatgggagaaaatgggaggtgaatttggtcctgtaatcgaactgaagaagttcagagcagtccaaaacatctga

SEQ ID NO: 130175 - DNA, 1037 bp, Zea Mays
tccaagaaggttgtcaagaaactttttagagatgatggcacaggagatgacgatgctgctggttccgcagacgttgatgctgagtaacgttgcagtgcttttggacacgagcaccaccagctatggaggcccgcttttgggaactgaggatcgcttttgggaactatcccagttcatctaggttgttgttagaacttcccccctactgtgtagggcgtatggttttatgcttgtaagatatggacagcgctatgctgtgtgcttgactgcaagatatgccttttgttgcttggtcatagctatgctatgcgtgcaatcctgcgaggaccatactcgcgatgtgtaaagcatgcctatatagtctaggcctgaacaaaccagaaacgttgcttcctttggtgcttctactatttctttttgtcgttctgtgctactaccagccatgtatttgtcgttactatgtaaagcatgcctatatagtctatttgttgttctgtgctactgccatccatctattatgtgctactaccagccatctctttatcttatagtacaggaaataaacgccggagcagctcctatgttccgttgaagaacgaagacaatccaattctggatgatgagtgagaaagatactaaggtatatcatgtaacccatccttgaattctagattacctttattcatgtgctgtaggttggctatattgtcatggtggataaatttaccaatagagttgcgcggttgtccagctgagctagcctctaattgtactattgcatcatgatagtcacacttaccatggtacgtaatgaactcatcctgaataatgctccagaaatttattttacattttttttatagaaaatatagatcataccatgaagagggccgttttcaatgcattttaggtttcgaccgtaaccaatgtatttttagtactaaactttagtttccagtttttctaaattactgatgtcattttcgtttttagagttatcgttttcgatttcgtttccaggaaaaaaaataataaaa

SEQ ID NO: 130176 - DNA, 733 bp, Zea Mays
gacggcgcgagcgcccgtctcctctcagctcgcgacggagccacgacagccagcgacagcgcgtgacggcgcgtgggttgcgcccgcccggcgcttcgcgtggagctcgattgcgacacagccccagaccgcgatgcagatctcggctgcgacgcggctgccaacggcagcgcgccggcgtccgcgcgcgaggacggtcgtcggctgtcgggcgtgcgtggtgccgtgatctgcgacgaacggcgcgggcgaccgggtctgtgagactgcgacggagtgacgccggccaaggacggcgcgtgggttgcggccggcgcttcgccgttagccagatctgctacgtagcagaagggcaggcacgcgcagatcctctggctgtcgtcggcctcttctgcagctgttccagggaaacagcatacatgcccagatctatcctccgttgtgccaacagttcagtgcgctgctcgatgagggaaggatatacaacttgaagtatttcttagtcaggaaagctaacagattctacaaaccggtagaaaattgcaacatgatcagctttacaaagtggactacggttgaggttatcctccagatcccccctgcttttctggtttgcacatataacctcactcccatagaccagctccaaccgcgcgtggactacaaggaatatttcactgatgtgctcggtgttgtcagcgtgatctcccaggtttcatcagtacgcacaagg

SEQ ID NO: 130177 - DNA, 2024 bp, Zea Mays
aacaatccgtggtatccagagtcagtctagaccgccatacggaggttgggcgtccgacgcgcgccggcggtgcttccagagcccctgcccccctgccgcgcgtccccctccgacttcacccgtgagtcttcttcctcccggtcatgccccttcttccctgagtaggaggcgacagatcagaatcctcctagctcgtgcggcaccgtgcgaggagcacggttcggctccggtgcccccacgcgtggaaggagcgcgggcgaggtgttggcggctccggcggcgcggtgtgcaaggcgagagcgtctccgggctgaggccaccgaaggtcgagcgcgcaggagggctatctgcttccgcgtgcggagctcttatctcagcacgacccacccctcccgacgggatagagtattgaagtacacaagtgcatatgcagctggatttggagtggtaaagacgggaaccgaagagctggtggattagaggtgtggggagatgtaccgtgggggccttgaccgcttcaagaaggcacagaccttggagcccttctcagtgaagtctgagtcaggcaccaagaaggcacctgcagctgcaggaacagctaaagcactggctccgttgacactgccactggattctaattttgtgccaggtcagaaccaccaaagtcctcaaggcaccatctcaagggtggctgggcaagatggtgatgctccagggcatgttgggacacaggtcggtggagggcagtcgacgtggcaacctccagactgggcgattgagccgcgcccaggggtctactatcttgatgtggtgaaagatggggaggtcattgacaggatcaatctggacaacaggaggcatctattcgggaggcaggttcctgcttgtgacttcgtgttggaccatcagtctgtgtcgcgtcagcatgctgctgttattccacacaggaatggaagcatctatgttatcgacttaggatcggttcatggcacctttgttgcgaatgagagattaacaaaagacaacccagttgaacttgaagttggtcagtcacttcgctttgctgcatctaccagaacctatatcctgcgaaagaacgcagctgctctattcccaactcctagccttccatcggatgttagtttgccatctcctccggaccccaatgatgaagatgctgttgtggcatacaatacagtacttaaccgatatggtataagtaaatctgacatattatccagttccaaagattcttcaggaggcgcctctagtgcaaatgatggtaaacatgcagttgaaaggctcttaaagagaggtaaaaagcgcagagtgtcatttagagatcaggttggtggagaacttatccaagtggttgggatttcagatggtgcagatgttgaaactgaaccgggccccataggtgtaaaggaaggcagtcttgttgggaagtatgaatctcttgtacaggttactgtcataccaaagggaaaggagcaagcatcacgaaaagaatgtacctctacctcaccgagtggggtaacagataagctacaagaggtgcttaaaaaagtaaagagcgcaacaagacctggaatctacgatgacctttatggggattctgttccagcaaaagtgggctcatcttgggcatacaaatcagatgatcaacctgttgaggagaagacgcgtggcatgaatttaaacatgaattcagccgatgacagtgacgacttgtttggtgactagtgattcagaattgtcagtggatacaaaaaaatatatattcttcagaattttgtggcagggttgtttcatttgctagatgctttttttttcttagtttatacatgattgtaccctgctgcaaatcaaggtatgttcttttgcctaatgttagcaacctaaggacatgctttcttgtagtgatgctcttggtgagtttaaccttgtttgcccctattttttcttaatcactttggtgattttttacctccgctgtttcctttagccaaccagctgttata

SEQ ID NO: 130178 - DNA, 326 bp, Zea Mays
aagtagaaaagttaagggaagaaagttgaaactagatgagtttatttttagaccggttcaaaacgaacaactctagcaaactagatcatattctaaactgtatcaattcatttcgctcagggacggaccgagagggggggcaaagtaggccatggcccccctcaattttctctctctcttatatatctaatatttatttagtgttagtatagagaaaaattaaagttttaggtcggttgaagttttctgtttgtataagtataacactgtctccagcaggtagtgtaaaataggggacacagaactgtagatgatactgtttgtag

SEQ ID NO: 130179 - DNA, 1005 bp, Zea Mays
gaagtcaaatccggccgtacgcccacggatgtggaggtgtatatgcaagggcataggggttctgatcctcagaatcctgatgtgttatgcactcagacggccaccgaccgtctagcttcgtatgggcacgagatggttcaacgccatggggaggagtacgattggaggagccagccaatcgaccctcgggcagcatatgctagcgcaggaggacaagcccatggacggttgggtattttttattctacaattgattccagagagctgagacgccatggacgacaatccacatcgtcgtcttcacagtcgtcccgttcacgatcatccgcccatgagatagagcttgcagtgttgcatcaacaggcagagtaccatcaatcagtcttgagggaacaattggagtacaagaggcaacaatctgaataccagagacaacaagccgagtaccagaagaagagggacgagtattatgcaagcctccaggcccaaaatcaacctcttctctcgcaactagcccaacaagcgggcgtcccgatgccgacatatgggatgccgcctccggactttgcactgccaatgccaatgttggcgcctccacctccgcctccgtcacaattccctatgggatttcagacaccacccgcttcagttgccgcacctagagatgggtctggtcaagacgacacaacacattcgtgggtgaataaccttttcaacacgcagagtccagccggaggagtgctgcacgaagaacctgaacatggagaacatggcgaggcggccgttcttgagctccttcaccttgagcttggcggtggtgtccaggtcgtcggcgaggcccagcgggtcgatggcgccgccggggtacaccttgtcaagcccttccccgagcgggccgccgccgacgcggtagccctcgacgaagcccatgagcaccacctggcacacccagatggccaggatgctctatgcgtgcaccaggttcgggttccctaggtgttgaat

SEQ ID NO: 130180 - DNA, 750 bp, Zea Mays
tgggcagagcgatctttgcctccacctggcaggcggccattgggctccccgacgcgcgatatccagaggcgcggtggcagccaatggcctgggcgcggacgtggcgtgccgcgcgtccaccagctgcgtcgcgaaccgttgagccatcagcctgccatataaagatctcctccccgcaccggccattcccaccaccagtccaccaccactttctcactgaccagtgaccactgtgccgcggcgtgctcggacggacacaaggtcgacgaccacacagagaacgacgatggccacgtcggcgctgcaacagaccaccagcttcctagggcaggccctggtctcccgccccgccggcgtcgatgccggcagccgcatcaccatgcgccgcaccgtcaagagtgctccccagagcatctggtacgaccctgaccgccccaagtaccttgccccgttctccgagcagacgtcgtcgtacctgacgggcgagttccccggcgactacgggtgggacaccgcggggctctccgcggaccatgagacgttcgcgcgcaaccgggagctggaggtgatccactcctggtgggcgatgctaggcgcgctggggtgcgtgttcccggaggtcctggcgaagaacgacgtcaagttcggtgaggtcgtgtggttcaaggccggcgcgcagatcttctcggagggcggactagactacctggtgttgctatgaatcgatctttcaaagcaaacaacagcgat

SEQ ID NO: 130181 - DNA, 858 bp, Zea Mays
tctttcattgaagaaacaaactaagcacaaaactgtcgtgggttaatttcccaacccccattgggacaaatcatttctggcaaagtggcactcgacatgacaattcatgcatcatcgacaccggtcattggttcattatcctcggatccatctccgccatcttcatcatccgcgtgtgcaccctcgctcccaccgtcctccatccgataatccaccttgaaatcgtagtccgcgtccatgtcgttcagcgcgctgggcctgctcgccttgcgccgtttcttctctgctttgctcttgcgagggtcgagtacgccctcggcggtgtacaacttgtcgttctgcgtgctggcgctggctgccttgcttcctcctgagtccttcacgtcgggcatttgctcctccctgtcccggctttcctggatggcttcgcttggtttcttgccaccatcctgcatctcttcatcgatcgccggtggagcattaggaggaatctcaatatgatggaactcctcaatggacttcaaaccaccaatatatgaagattcagctttgtaaatatcatcgatattaaattctttcccatcctcggatataatcactgcatctgagtcctccccagcatctcttttaggcggcagtgtaaaatatggtattttacctaaaaacaagaggatcaggtcactagtaacaataatttacagcgttaagggcaaaaaaatcaggcataccttcattccagtcatgaagcacaattctcgctgcagcttcaacatccactacaccaccctttttcaatttcccacgtacagttgctactttctgaaggaaatcatcaactgaaccaaagtttggaacctt

SEQ ID NO: 130182 - DNA, 2119 bp, Zea Mays
tatataaatcttttcagagaagactcgaatacagaggatgaatttagaattgatggagatagttttagggagacaaaaggaggacaaaggccttcgatgctgtaaattgtaaatttactcgctcccgtgaccgacgtttctgacccagcccatggggacggcggcgccggcgatgatgccgacggaggaccttgaggcagccatcgccgagctccctgccaagaagggcgtcctgcgcgaggccttccacaccctcgccgcctgctcgccctacccgctccccttcacctgggaggacctcgatgcccacgtgtcctccgtccaatcctccatctcgcgccggttcagccagctgcgggcgctcgaggctgcgggcacagcacgcagtagtaagaataaggaagaggataacgaggtggaagaagaggatgaggtggtggaggaagaggaagaagaagaggaagtggaagaggagatggtggaggaagatgaagaggaagaggaggaggaagatgaggaagagggggaggaagaacaggaggaggaagaggaagaggaggtggtggaggaagagggggaggaggaagagggggaagaagaacaggaggaggaagaggccgacgacgagattgacaatcaaaaggaggaagatagagagggcggcgaggataacaagcgggatgctgacgaagagacgctgactaccaaggtctctgcagggcaaggcaaagagactgaaggtgaggaggagcttgatgggtatgcacagggggatggagaggagcagggtactgaagaggaggagatggtcgaagagacgactaagaaacagcttagagggcttcctgcagatgggagaaaggaatttgtagaggcatgcaagagaatggatgcagagacgctggtcgagttcgtgatctgtttcagcatctctagtaagaagttgctgtccgcaatgcaccatgccccagatccggcggcacttgtccttcaagtggtcaagctactcgtatccaacaagaacttcaggtgctacaaggtctgggtgcaatgtatcacactatttcgttggttgtctatgaaatctgccaaacattctgcagacacaacagagcaggccaagctggtggcgaaggattggaagaaaatgattgacaacacagtgtgttgtagggaacttgacacgctgtctaggggtcttctccaatttcttatcgcatataacattgtatctgaattcaatatccatgatatcatcagtatatttgctatggttcgcaaaggttacaagaataacaacattgccaagctttgcgaggatcttgggcttgcagacagggccacaggtttaattgactatatgattggaaatgggcagcatcccgaagtttttcatttggtacaaaattttaatttggaggacaagtatcctccattttctcttctgaagggatacattcagaaggccaagcagacttttgtggagatgtttaaaaagagtcaaacacacgagtccttgaactgggctataccaaaggaactatggattgcacattatctagctgagcagaaactcactgattctaagcaacgcagtgctatcatggcagaaattaaatatttgatgagtggatatgaaaagaaacaaaggtcagaaaatctctcaacatgggcttcacagcatccgccaacggaatctaaaaggaggaacaggaagcgcaaggaggaggagcaggagcaccatgaagcacaatacaaccagcagcagcaggaacagaatgaaaacaagttaattcaaggaaagcggcatcagctgcatcaagaaaatatggcgcaagtgacacagcagcagcagcagcatatgcaaccgacaacaaggccagctactcttaagcttccgacgcctgctattcctctggttctgaatgcagctcagatccaaaactttgcgcgtccagcttacgccgctgtgcctggagttcacaattaccctgcccagccaggttggtctgcagctcaaggaagtccattcgtaccacagttcatgtcaccgcagtatatgggcctgccatttaatccctttggccttcatcctacttgctatcccagacgcagatag

SEQ ID NO: 130183 - DNA, 2233 bp, Zea Mays
tatataaatcttttcagagaagactcgaatacagaggatgaatttagaattgatggagatagttttagggagacaaaaggaggacaaaggccttcgatgctgtaaattgtaaatttactcgctcccgtgaccgacgtttctgacccagcccatggggacggcggcgccggcgatgatgccgacggaggaccttgaggcagccatcgccgagctccctgccaagaagggcgtcctgcgcgaggccttccacaccctcgccgcctgctcgccctacccgctccccttcacctgggaggacctcgatgcccacgtgtcctccgtccaatcctccatctcgcgccggttcagccagctgcgggcgctcgaggctgcgggcacagcacgcagtagtaagaataaggaagaggataacgaggtggaagaagaggatgaggtggtggaggaagaggaagaagaagaggaagtggaagaggagatggtggaggaagatgaagaggaagaggaggaggaagatgaggaagagggggaggaagaacaggaggaggaagaggaagaggaggtggtggaggaagagggggaggaggaagagggggaagaagaacaggaggaggaagaggccgacgacgagattgacaatcaaaaggaggaagatagagagggcggcgaggataacaagcgggatgctgacgaagagacgctgactaccaaggtctctgcagggcaaggcaaagagactgaaggtgaggaggagcttgatgggtatgcacagggggatggagaggagcagggtactgaagaggaggagatggtcgaagagacgactaagaaacagcttagagggcttcctgcagatgggagaaaggaatttgtagaggcatgcaagagaatggatgcagagacgctggtcgagttcgtgatctgtttcagcatctctagtaagaagttgctgtccgcaatgcaccatgccccagatccggcggcacttgtccttcaagtggtcaagctactcgtatccaacaagaacttcaggtgctacaaggtctgggtgcaatgtatcacactatttcgttggttgtctatgaaatctgccaaacattctgcagacacaacagagcaggccaagctggtggcgaaggattggaagaaaatgattgacaacacagtgtgttgtagggaacttgacacgctgtctaggggtcttctccaatttcttatcgcatataacattgtatctgaattcaatatccatgatatcatcagtatatttgctatggttcgcaaaggttacaagaataacaacattgccaagctttgcgaggatcttgggcttgcagacagggccacaggtttaattgactatatgattggaaatgggcagcatcccgaagtttttcatttggtacaaaattttaatttggaggacaagtatcctccattttctcttctgaagggatacattcagaaggccaagcagacttttgtggagatgtttaaaaagagtcaaacacacgagtccttggaattatatggctgcatggcgccctgggtagcacgaacactggacatccaggccacattatgctgtagacagaaatttgaggccgctattcttctgttgacagatttttttaggaactgggctataccaaaggaactatggattgcacattatctagctgagcagaaactcactgattctaagcaacgcagtgctatcatggcagaaattaaatatttgatgagtggatatgaaaagaaacaaaggtcagaaaatctctcaacatgggcttcacagcatccgccaacggaatctaaaaggaggaacaggaagcgcaaggaggaggagcaggagcaccatgaagcacaatacaaccagcagcagcaggaacagaatgaaaacaagttaattcaaggaaagcggcatcagctgcatcaagaaaatatggcgcaagtgacacagcagcagcagcagcatatgcaaccgacaacaaggccagctactcttaagcttccgacgcctgctattcctctggttctgaatgcagctcagatccaaaactttgcgcgtccagcttacgccgctgtgcctggagttcacaattaccctgcccagccaggttggtctgcagctcaaggaagtccattcgtaccacagttcatgtcaccgcagtatatgggcctgccatttaatccctttggccttcatcctacttgctatcccagacgcagatag

SEQ ID NO: 130184 - DNA, 1339 bp, Zea Mays
gcgagtggcggggagaggaggcggcggcggcaagggcgcgacgggggaggatgatgtcgctgcagcctgcaggagttgtgttctctggccttgagagaaaggagtcgccaattttagtgggctcctgttgtgtttttcggtccattcctcccaaggcccagcatctgccagtcgcatgccgtgacgcacaaaacccacggcggcacggctccattccgcgtccgcactctctatataaagtgtccctctcttccctccaagccctagacgcaccccttcctcgtttcgccgcctccgccgacaccgactgcctacctcagctgccgtcgccatgggcagaaggcctgctagatgctatcgccagatcaagaacaagccgtaccctaagtccaggtactgccgtggtgtccctgaccccaagatcaggatctacgatgtcgggatgaagaggaagggtgttgatgagttcccctactgtgtgcaccttgtctcttgggagaaggagaatgtctccagtgaggcgctcgaggctgcccgcattgcctgcaacaagtacatgaccaagtctgcaggaaaggatgccttccaccttagggtccgggttcacccgttccatgtcctccgtatcaacaagatgctttcctgtgccggggctgataggctccagactggaatgaggggtgcctttggcaagcctcagggcacctgtgctagggtggacattggtcaggtcctcctttccgtgcgatgcaaggacaacaatgctgcccatgccagcgaagctctgcgtcgcgctaagttcaagttccctggccgccaaaagatcattgagagcagaaagtggggcttcaccaagttcagccgcgctgactacctgaagtacaagagcgagggcagaattgttcctgatggtgtcaacgcaaagctgctcggcaaccacggcagacttgagaagcgtgctcctgggaaggctttcctcgatgccgttgcttaagtgcggatgcgaatcctgacgttttgctttagcgtatcttactttgcttcgtggaacatgaatttcaagtgttttgagggtattacagtgccttatgtgaacttgcctatcttgtgctgaacatcggaatgtatcctccgagtatgtttaatcgcattaattttattggaaattggttgcggaacaatgtccaatttactcgaatttgatttcaccacgatcttttcttatccttaaaatttgtatagaatacgtatttgtgtgccatcgcctttccggagctcaccaaacagtcgttcctgcagcagcgtgaaactggacttcagagagaatattgggacgaga

SEQ ID NO: 130185 - DNA, 1380 bp, Zea Mays
gtttttcggtccattcctcccaaggcccagcatctgccagtcgcatgccgtgacgcacaaaacccacggcggcacggctccattccgcgtccgcactctctatataaagtgtccctctcttccctccaagccctagacgcaccccttcctcgtttcgccgcctccgccgacaccgactgcctacctcagctgccgtcgccatgggcagaaggcctgctagatgctatcgccagatcaagaacaagccgtaccctaagtccaggtactgccgtggtgtccctgaccccaagatcaggatctacgatgtcgggatgaagaggaagggtgttgatgagttcccctactgtgtgcaccttgtctcttgggagaaggagaatgtctccagtgaggcgctcgaggctgcccgcattgcctgcaacaagtacatgaccaagtctgcaggaaaggatgccttccaccttagggtccgggttcacccgttccatgtcctccgtatcaacaagatgctttcctgtgccggggctgataggctccagactggaatgaggggtgcctttggcaagcctcagggcacctgtgctagggtggacattggtcaggtcctcctttccgtgcgatgcaaggacaacaatgctgcccatgccagcgaagctctgcgtcgcgctaagttcaagttccctggccgccaaaagatcattgagagcagaaagtggtgagtgcataatagttcattgctgctgtggaattaaactgtcacagtatagtaacttgcataagttattttgtattattattgtttataatgtgcactatcttgttcaggggcttcaccaagttcagccgcgctgactacctgaagtacaagagcgagggcagaattgttcctgatggtgtcaacgcaaaggtacaccatcgttttcccttggataatgcgtattttttttattttggacgatccatgcttgataacagtttctacctttacatctctgagcagtcttctaatgtttgctctctcatctacgagggcagtccataatctaatgttatcttctccctaccttttacagctgctcggcaaccacggcagacttgagaagcgtgctcctgggaaggctttcctcgatgccgttgcttaagtgcggatgcgaatcctgacgttttgctttagcgtatcttactttgcttcgtggaacatgaatttcaagtgttttgagggtattacagtgccttatgtgaacttgcctatcttgtgctgaacatcggaatgtatcctccgagtatgtttaatcgcattaattttattggaaattggttgcggaacaatgtccaatttactcgaatttgatttcaccacgatcttttcttatccttaaaatt

SEQ ID NO: 130186 - DNA, 1482 bp, Zea Mays
ttcatttgcagcccatgccggcccagctcagcggattacgagaacccgccgccgctccgccccataggtaggttttgtttgggatctcaccgtttcttcctcgtctccgtctctacacggcggcgccgccgccgccagctgctgccaggagccaagcccaagcctgagcttaaaccatgccgattggttctcttttcgtgtcgaggctggccaggtctagccatgccctccccgctgccgccgccgcggccatctctcaggcgcccaggccccagcacatcgcatctcctatattctccggccttggagcagcggctcgtgatttcagctcaagggctctatggaagggagcattcgtcgatgccttcctggctagaataaagaagaacagagaaaacatgaatgggaagaagatttggtctcgtaggtcttctattttgccggaatttgttggttccactgtgctcatttacaatgggaaaagtcatgtccggtgcaagatcactgaagggaaggttggccataaatttggagagtttgcttttacacggagacgaaggccccatcgaacaataacaggaaagggaaatcaaggaaagggcagaaagtaaaagtagaaatgtgcatgaaaggtgggtttaaggacagcttgatgacggcgtagctgacgaacaagcacttgaatcaccagaattcatgatctggactgttttttcttagaccaataaccgcaggaaaatgttagctcatcttacttaggggtaatttggtaactctatttttccaagacatttttatttttctaagagaaaattaactaatttttcttagtaaaatagaaatcccttagaaaaatgaggttgccaaaccagctcttaaaaatttgcctacggactctgttcctctgttatttcctgcttgctatcggtgtgatcggtataccttaaactgattgtaagttatgctttagagtgattgtttatgaacaaaactagctacatttctgactgctgcaagcaaacttgagtgcctcaagtagccgtcaggtagaaaatcctttgctttgcacgtactctcgctcctttgccctgcacatttgctgaagcaaacaagttttgccttgcatcatttaagcagaagaattcacccggtggccacttaaatagcagaagaattcctcgaagaactagagacagaatcaatatacacttctttaagcagtagtcgcattatttgaacgaaatggagcaatttacctcgtcaagatcaataagtacctcaatatatatagttttaatgtgagtcagggagactatgaaggagatcaggttgacaggcaatcccaacgcagcaggtgtcctggccgcagtggctggcgggacgcggagggcttggctgagttaggattcgttatgtgagagcaactatacaattgtggttatttgccgtactggttaattttattttatttttaccagtttt

SEQ ID NO: 130187 - DNA, 495 bp, Zea Mays
tcaggtaagtaccgtctgatcgtgaagggtatcttgcgcgctctcagctccttcattgcaatctaaaattggtcagtttcaccctcaagctcaaccatgactggagcattcatgctgcaaaaagactaaggttagtattaggttggaagataggttttttacatgttcaacactcaaaattattaaccttatctgcaaggctcgtgtacccaggatgcgcgcacgttcgtacttcgtcatgtattttgttgttttgcgttcacgcttggtcttttcctgttccttatcttcaccctcaccacctatgacgtcatcaggggcatcttcgttgttctcaggctcttcttcagctccttcctgttcaacagaggtacattggttgtattggccatataatatcttcctataaagcatagaagttgaataaaagtataaaacaatagtaatgtgcctgcacctcaatctccggttctgggggctcatcctcatacctgt

SEQ ID NO: 130188 - DNA, 1839 bp, Zea Mays
ccagtcgttgccgcttggccgcctgctcagtgctcaccacacacgtccaaccgcacccagacacccatccttatatacgcgcgcagcttaacgtacgcggtgacgccgccagcagctcgctctcgcaccgaccgtcccagaaatatctcgtcggcggtcagttgagctgcgagcaaccatcaaccaatcaaggacgacgacgcacggatcgatggccacgctctcctcctgcagccgcctgagtagcggcaccggcgccgcggctatccgccggcagccgaagccgacccgtgcaggagtcctgttcaccagccggcggggctcctccgcgagcgttcgcacggccgccgccgctgccactgcggcgccggccgccgtagagcagcagaacacgggggtgtcggtgtcgctgccgacgtgggcggagttcgagctcgggcgggcgccggtgtactggaagaccagcaacggcctgccgtcctccccgggcgaggggctgaccctgttctacaacccggcggcgagcaagatggccccgaacgacgtgttcggcgtggcgttcaacggcggcttcaaccagcccatcatgtgcggcggcgagccgaggcagatgacgctgcaggtccgcgggaaagccgacccgcccatctacaccatcaggatacgcgtgccgcagcacgccacaagcttgatcttctccttcaccaacggggccgagtgggacgggccgtacaccctcaagttcagggtcccgaagccatggcagaagaagccgctgagcttcttcaacgagggcctggcggacgagctcaacagggagggcgcctgcgacctggccatctacccggacgagaacatcgccatcaccagctgcgccatggacggctacctcgacgaggggggggatcggtgcaagctggatatcgtgagcgggtgcacggaccccagctccgacatgttcgacccgctggccaccgtcgacgacggctcctgcccactcgagtctgattccgaggaatgaaggagcttcagttcgatccttttttttgtggggggcaaggaaacgtggtccatacatcttatcagtgcaagtttgtgatcatgtgatacatgaagcatatacgtgtacgtatttcaccagactacctgcaccggtgagcaagatgatctcctacttgcaccaccattagagcagtggatatgatctcatacttgcgcgttgcactagtagagttgtggatacttaggatccatcattgcaaactctgatacaaaccagtgtaagctgagctgcatggattgcagatctgtatacctacggctcatgcagctataccgtcctggattgtaccacacaatcaatattatcaaatgtaagatacgacttggagggaagcttataaagacttccccgtgaatggaagagcaatcggttcatgaatcatcggagcacagctctcaaccattggcataaacaacactgatcacatccagtgtcagatattaggcacacaaagcacgcatttggctacgctgcaactgcatgtctgaaactgaaacaaacaaaaacaagcatagcgcaaccaacaaccatgctagcattacggttccagagttcaaggcaaccacagacgttaagttaacatagcatcatttcgtcttggttcattcgctacagtatccactcatagtggcaacgaagacttgtaactacaggaaagacccactgcaccacataccctttccatgccaagtagatccgcgtcttcagtctccaccaacctggcgtttccaggagtcctccacaatgagctcgtctactccccagtcttcatagct

SEQ ID NO: 130189 - DNA, 1854 bp, Zea Mays
ccagtcgttgccgcttggccgcctgctcagtgctcaccacacacgtccaaccgcacccagacacccatccttatatacgcgcgcagcttaacgtacgcggtgacgccgccagcagctcgctctcgcaccgaccgtcccagaaatatctcgtcggcggtcagttgagctgcgagcaaccatcaaccaatcaaggacgacgacgcacggatcgatggccacgctctcctcctgcagccgcctgagtagcggcaccggcgccgcggctatccgccggcagccgaagccgacccgtgcaggagtcctgttcaccagccggcggggctcctccgcgagcgttcgcacggccgccgccgctgccactgcggcgccggccgccgtagagcagcagaacacgggggtgtcggtgtcgctgccgacgtgggcggagttcgagctcgggcgggcgccggtgtactggaagaccagcaacggcctgccgtcctccccgggcgaggggctgaccctgttctacaacccggcggcgagcaagatggccccgaacgacgtgttcggcgtggcgttcaacggcggcttcaaccagcccatcatgtgcggcggcgagccgaggcagatgacgctgcaggtccgcgggaaagccgacccgcccatctacaccatcaggatacgcgtgccgcagcacgcgtcgttgcgcgtgcagccacaagcttgatcttctccttcaccaacggggccgagtgggacgggccgtacaccctcaagttcagggtcccgaagccatggcagaagaagccgctgagcttcttcaacgagggcctggcggacgagctcaacagggagggcgcctgcgacctggccatctacccggacgagaacatcgccatcaccagctgcgccatggacggctacctcgacgaggggggggatcggtgcaagctggatatcgtgagcgggtgcacggaccccagctccgacatgttcgacccgctggccaccgtcgacgacggctcctgcccactcgagtctgattccgaggaatgaaggagcttcagttcgatccttttttttgtggggggcaaggaaacgtggtccatacatcttatcagtgcaagtttgtgatcatgtgatacatgaagcatatacgtgtacgtatttcaccagactacctgcaccggtgagcaagatgatctcctacttgcaccaccattagagcagtggatatgatctcatacttgcgcgttgcactagtagagttgtggatacttaggatccatcattgcaaactctgatacaaaccagtgtaagctgagctgcatggattgcagatctgtatacctacggctcatgcagctataccgtcctggattgtaccacacaatcaatattatcaaatgtaagatacgacttggagggaagcttataaagacttccccgtgaatggaagagcaatcggttcatgaatcatcggagcacagctctcaaccattggcataaacaacactgatcacatccagtgtcagatattaggcacacaaagcacgcatttggctacgctgcaactgcatgtctgaaactgaaacaaacaaaaacaagcatagcgcaaccaacaaccatgctagcattacggttccagagttcaaggcaaccacagacgttaagttaacatagcatcatttcgtcttggttcattcgctacagtatccactcatagtggcaacgaagacttgtaactacaggaaagacccactgcaccacataccctttccatgccaagtagatccgcgtcttcagtctccaccaacctggcgtttccaggagtcctccacaatgagctcgtctactccccagtcttcatag

SEQ ID NO: 130190 - DNA, 439 bp, Zea Mays
ccagtcgttgccgcttggccgcctgctcagtgctcaccacacacgtccaaccgcacccagacacccatccttatatacgcgcgcagcttaacgtacgcggtgacgccgccagcagctcgctctcgcaccgaccgtcccagaaatatctcgtcggcggtcagttgagctgcgagcaaccatcaaccaatcaaggacgacgacgcacggatcgatggccacgctctcctcctgcagccgcctgagtagcggcaccggcgccgcggctatccgccggcagccgaagccgacccgtgcaggagtcctgttcaccagccggcggggctcctccgcgagcgttcgcacggccgccgccgctgccactgcggcgccggccgccgtagagcagcagaacacggggtaagtggcgtaacaaaaacaagctgtctgctgcatgccatcg

SEQ ID NO: 130191 - DNA, 226 bp, Zea Mays
aaattttctccacatcacactgcgaaagaggtgtaggccttacggaggcacgtaaggctgtctccagcaacgttctctatatccatcctctatatccgtcctttacagtcttctctaaaagattacatcctctatatctcttttctctccaacaatatcctctaaattacgtcctctatactcaaatacctatattagagacattttttatttttattttttatac

SEQ ID NO: 130192 - DNA, 1341 bp, Zea Mays
accgaggtccaagtaggctgctgcttcttccggttggtcctgccctccttgctgacctcggagcggagcggagcagagcaaggaaccggcaggagggaaggaaaggtccatggcggggagatcgacgtacgacaaccccttcgaggagggcgcagccgcggccgaggtcaaccctttcgcggaccaagctaaacgaggaggaccgacggctcagtccagctattctggcggcgctttctacacgacgtcgcaacgcccggctcctcctagcacacgcctttcgccgcttgctcctgaacctgctggcttctacaatgacttcgctactccagtggatatccccatggacgacacaaacaacaaggacaggaagacaagggagaaggagcttctggccaaggaggccgagttgaacaggcgtgagaaggaaataaaaaggcgagaagacgccgcagcacgagctggcgttgtgttggaagagaaaaactggccaccgtttttccccatcatccataacgatattggcaacgagatacctgtccatctgcaaagtacactgtatgtcgcattcgcgtcactcttagggttggtcgtgtgcctgttttggaacataatctgcgttacggctgcctgggcaaaagggtcaggtcctaaaatatggtttctcgcaatcatatacttcattcttggatgccccggcgcctactacctttggtaccggccactataccgtgccatgaggaacgagagcgctcttaaatttggatggtttttcctattctacttggttcacatcgccttctgcgtgtacgcagctgtttctccttcgattctcttcgtggggaaatcgttgaccgggattttcccagcaatcagtttgataggcgacagcgtgattgtcgggatcttctacttcattggctttgcactgttctgcctagagtctttgctaagcatgtgtgtcattcagcgtgtttacctctacttccgaggaagtgggaaggaagcggagatgaggcgggaagcagcacgcagtgctgcgagggcagcattttgacgaaccgtgtgtgtatatatagcacggcgtgtgttttgttcatagtttgaagtgtctgtagatcaacatacatatgtagagtagcgttggtgtactgtaaatcttcagaatttttcttaccagtatttgagccctaatacaaataataaaattgtaatgatgatctcactcaaccttttaggaaaaaaatatatacttacattgtcaagggttgtactcatacccactcgcaaagatcttttttcccctaataccagcaaataataagttcttcaaaatttggg

SEQ ID NO: 130193 - DNA, 95 bp, Zea Mays
ttttttttgctattatagtactttaatacttgttttattaggcttctctgttctagtattcataacttcatcttcttcctaatagtattctcaag

SEQ ID NO: 130194 - DNA, 552 bp, Zea Mays
aacaaattagtgactaacgagtacaaagtacgaacacacacacacacaccagcaggcagccgcgcgcgggctcgatcgcaatggcgtccaaatcctccactgcggccctcttcctctacgcggctctcctgctggtcctggtgctggtggcggtttccacgctggcccaggcgcagccgacgccgccgccgccgcccagctcctcgtgccccttcaatggctccgtgccgctatccaacatcacagaggtccttggactgctcgcggagctggacctgaacactgccgcccagtgcctctgcaccgctgtggaaggtgtcacttccctcgtccgcctcctcctcggctccatcgggctcatgctgcccttcgacttcgtgtgcaccagcacctaggcgcatgcatgcacgtgtaataatctgcttaattatactatattattactgcgtactagtaatacgtgtgtatatcacgggcatgcatatgcacgtgcagcgctttgcaagttgcaacacacacaaggcagtatatgcatgtgtgctgtgtgcttag

SEQ ID NO: 130195 - DNA, 542 bp, Zea Mays
gcctccgggcgcaagtgaaataccaatacttcactcccaacaccccttcgcgggtcgatggacatggcgtctggccccccgcgccgcacggcgaggtgggccgaagcaggggctgccggcgaaccgcgccgggcgcagcacgtggtgggcgacatcaagttgttgttctcggtgcagcgtcccggcgcgcggccggccattcggccctaaggacccatcgagcgaccgagcttgccctcggaccgcgaccccaggtcagtcgggactacccgctgagtttaagcatataaataagcggaggagaagaaacttacgaggattcccctagtaacggcgagcgaaccgggagcagcccagcttgagaatcgggcggcctcgccgcccgaattgtagtctggagaggcgtcctcagcgacggaccgggcccaagttctctggaaagggacgcctgggagggtgagagccccgtccggcccggtcccttcgcaccacgaggcgccgtcaacgagtcgggtgtttggaatgacgaatctctagatcga

SEQ ID NO: 130196 - DNA, 2709 bp, Zea Mays
tacaaacaatttatgctgaaggaaaagtttctataatcaagaaggttgtttgtctcaaggcctgccgggaattacatgctgttggcgctctcacagattatctcttgcccgaatcgagtgttccatgtgaagatgaacctgatattgttgtggacaaatacaaaaatgggcaacctgactactttccagagcaattagtggataattggtcgtccttttctcgtcgtggcttttattattgctacatggtatcactggaaggttgttctaaaactactccagctgagatagtattagctgtaaagtgcgacatgggatctgacttcatctcgaactcattcaaattgtggggtgtgcaagattatttgagttttaccatgagatatgttggcatcattcatctaaatcaggaacaggtaattgccgcgagaagattccagacaacaattctttctttgcttattagtaatgacctttcggaggtcagcaattatattaagaacttacttgaaatgccagcatctcctggagctgtgtatctacttctgccagtagtttctggaaaaattgattggcgtagcatcaaattctcagcctcggaaatgcctgaagctactaacatggatatgcgacactgctatccttgtaaagatactggtatagtgcagacaaaagatggcactttctgctcgtgcatgcttcgaaattctattgtctgtacaccacataatggcatgttttatgctgtttgtggctttcttgacttgaatgctaattcgcttctacatagaagtgatggcagtttccttagctacaaaacctattttaaggaaaggtacaaccttgatttaagatgtgaagatcaagctctcttggaagctcgtaaacttgtggaagtgcggaactttctccacaagtgtaactataaaaaagaaaaagaaagaagtggtaagagtgtggttgaattgccacccgaactgtgcatagttgtcatgtcaccaatgtccgcaattactttgcgcagcttcacatttattccttctataatgtatcggatccagtgtatgctcctttctatgaatttgaaaatgcaattgggtccaagcatgcagcagtttgatattccagcactaaagattctggaagcacttacaacaaagaattgccaagaggaattttcgcaggaatcattagagacacttggggactcttttctcaagtatattacaacccaacacttttttgtcaaatacaaacatcagcatgaaggcatgctaaccaagatgaagaaaaacgtgatctcgaatgcagctttatgtcagctggcttgcagtaacaatcttgtgggatacattcgaagcgaagctttcaatcctaaaacatggatcgttccaggggttggctatgacatatgtgataggagtctgaggaagctgaaaagtaagagaattgcggattcagttgaggccttaatcggggcgtatctcagtactgctggtgagcaggcagcatatattttcttaaaatctttaggaatggatatagagtttcacaaaatgccaattgagagggtaatcacaatcaaagcagaagagttcattaatgttaaaagtttggagctattgcttgactatagtttcaatgatccttcattgttgatggaagcactgacacatggttcatatcagattgctggcactactccatgttatcagcggctggagtttcttggggatgctgtattagatcatatttttactgattatttctaccatcagtaccctgaatgcactcctgaactgctgacagatctgagatctgcttctgtgaacaatagctgctatgctcatgcagcagtaaaagcaggattacataagcatgttcttcactcgtcatcagcactgcacaaaaggatggccgactacctggacaagtttgagcagtcattttcaggtccatcacatggttgggaagcaggcatcagtctgcccaaggttctaggtgatgtggttgaatctatcgctggtgcaatttacatcgacgccaagcatgacaaaggggtcgtttggagaagcatgaaacggatactggaacctcttgtgacacccgacacccttcagaatgaccctgtgaaagagctccaggaattctgtgatagcaaaggttacactttggagtacacggtaactcgtgacaacggtgtatcctcggtggtcgcagaagtgcggaccgaagggactacgtacaaggccactcggacaggcttctctaagcttgacgccaaaaagttggcagccagttccgtgctccgtgatttgaaggctgcggacacaaagcagtactctgcaaatggtatcagttgcacttaaacttcatagctctatggtatatacttttgtacaaaatcgtcgaatcagtaaggtgtgcaggtgcctaggcacgctaccctacttttactgcatctacgtctacggccacactaaagcagtacgtgcaacaatgttttgttttggtcatgtctcttgagagtgaaagtgtagcgttatttttattttgattcgcatttttgggataggcctggtggtgcaccagggcaccaagcgagtatgtggtccgtagggtttttagattactcttgtttcgagatgattggattaaattcttgtagagctgattggatggttcaatatcttggtttttagaatggtc

SEQ ID NO: 130197 - DNA, 948 bp, Zea Mays
ccaccaaacccctccgcattctctcgtgcacgcagcacgcgtccctaaacctccctctcccttccgctttttgtaatcctcgtcgccatgacccgcgccgccgccgaagccgccggggaggtggtggtggaggaggatctgccgccatcctgcgacccgcagacacaggcgagatggtaccagctggaggcgctggagcgcgcgctggccgggaacacgcttgtgttcctcgagacgggcgccggcaagacgctcattgcggtgttgcttctccgccgcttcgcacaccgcatccgctcctccccgccgccctccttcgccgtcttcctcgtccccaccgtcgtgctcgtgaaccagcaggcgggcgtcatcaaggagcacacggacctccgcgtcgcccagttctacggcgacatgggcgtcgacttctggaacgcggacacctggcgcggcaggatcgacggggccgaggtgctcgtcatgacgccacaaatccttcttgataacctccgccacagcatcttcaggctgcgggacatcccgctcctcatcttcgacgagtgccaccgcgccaccgggaattccccgtacgcctgcattcttaaggagttttatcatccgcaactgaattctaggccatcagattccattccaactatatttgggatgaccgcttctttaattgcaagaaatttggcgcttgacaaatattcagaagaaatatctgagtttgagaatctcatgaatgcgaaggtgtacactgttgccagtgaatcagcactattgcaatacattccaattgcgactacaaagatagttgagtacgatgattatatcgtaacgtctgagttatatagtcatactatccgttgcttgaacaaattggaaacaaagcatttagaaatcctgaaggggaaactgcatggttcacctttggaaaattcagag

SEQ ID NO: 130198 - DNA, 1565 bp, Zea Mays
tttttccttccttcagaacctacgagtgttaagttgccacctgaactctgcaaaatagtcatggcaccggtgtcagcaaatactttgttcagcttctcatttgtgccttccataatgtaccgtatccagtgtctgcttctttctgcaaagttgaaaatccagttgggcccaagaatgcaacagttcaacataacagctatgaagattctggaagcacttacaacaaaggaatgccaggagaaattttcaatggaatcattagaaacacttggagattctttcattaagtatgttacaggccaaaatctttttaacaaatacaaacatcgagaggacatgctaacctctatgagagaagaaaaggtctccaacccagctctatgccagctagcttgcaaaagcgaaattgtgggatacattcgaggtgaactatttaacccccaaaaatggaccattccagggttcggttatgactcacgcggtaacaacaaggttttcttccgagcaaccaataatatgtacagtctgaagaaaatatccataaaaagcaagagaattgctgatacagtggaagccttgactggggcctacctcagtacttgtggtgaactggctgcagttcattttatcaaagcactaggaatggatgttgaactgcatagtaaaatgcaagttgaaaggactattacaacaaaatctgaagaattaattgacgcggaaagcttgcagacaatgctcaaatatgtgttctatgatacttcactgttagtagaagcattgacacatagttcttacaatattactggtattacagcttgcaatgagaggcttgaatttctcggagatgctgtattggactacatcttaacttattacttttacagaaaataccccaattgtacaccagcactgttgacaaatctacgaaaagcttctgtgaacaactgttgctatgcacatgcagctgttaaagcagggttacacaagcacattcttcattcatcgtcaaaacagatggttaacgatcttgagaattcagggcggtcattttcaggcccatcacatggttgggaagctggcattagtctcccggaggatctcgcagatttgtttgaagcaatagctggcgcaatttacgtggacagcgggaacgacaaagaggttgtctggagtgccatcaggcggctactggaacctcttgccacccccgggaccatggagcctgaccccgtgtcggaactgaaggaattatgcgagcacaaacactaccctaagccatcgtactctccaactcgtgacagtgtagctggagtgacaagggtggttgcacaggtgacggctgcgcggactgtgtactccgggactggaacaggccgcaaccaggatgtggcagaggttctcgctgcaaaggctctgctcaaaaagataaaggccgcagcaagaggatgaagcttggacttggcttggaccgggcgggcatttgatatttgggaatttgcgcacatgatagctgttctcgcagaggtaacaaaacaaactactgtagtatataaatgttgtgtata

SEQ ID NO: 130199 - DNA, 904 bp, Zea Mays
aagggagggcggccccagcacaagcgccgcccattgatcgctttcctctccttccctctcccctcccagtcgctcgcctaaacctcaccagcgaccagtcgccatcaccatggatggacccgcctccccctccgccgccgccgagactgatacgcggggaggagaagctccatccaaagccaagcgaggcaatgccgaggagaaatatcaacatggacaaccggtttactttcctgaggaactaatggacaattgggtttctttttctcttcgtggcttgtattattgctacaacatctcgttgcaagggtcttgcaacacaactgctgatccaacggacataattttagctgtcaaatgtgacatggggcctgacttctttcggtactcttttaacttgggtggtactgatattaccattaagtacctgtacaagattcatctgaatcaggaacaggtactttttgctagaagattccagatcacggttctttctttgctcattaacagtaacagttcggaggtcagcaatgctataaaatacttccgtgaatggcaggtagatttgggggttgtctatctacttctgcccacagcgtcaggcaaaattgattggtgcggtatcaagttctcaacatcatcagcatatgatgtgactgataaaaatatgagacattgccattcttgtaaagatgctgatatactgcagacaatggatgacccttgctgcaggtgcatacttcagaattctgttgtatatgcccctcgtgaacgaaaattttatattattacaggacttgacttaaatgcaaaccaacctctggatttgaacaataggagtgctgttagctgcaaaaggtactaaagattagatttatgtttgcccttacatttgttacatgtt

SEQ ID NO: 130200 - DNA, 244 bp, Zea Mays
cctgtacatctctggataaggattatttatttttgtactttttggacgctttaagatttttttggggttagatggtattggaaggcagttgagattaatgatttggtctctcgaacgaatccaccattttctatgcacatattatgtattagtaatatataatgataaagagccgacagtctatcttttccacacactagattttagggttttcctgtgaggctgtgaaaaaaccctttatgtg

SEQ ID NO: 130201 - DNA, 2480 bp, Zea Mays
atgtggaggctaaagatcggcgagaggccaagcaacccgctgcttcgctcgcccaatggcttccttgggagagaggtgtgggagttcgaccccgccgcaggcacgccggaggagcgcgccgaggtcgataggctgcgccaggagtacacccgcaaccgcttcacgcgacggcaatgcagtgaccttctcatgcgcatgcagtatgcaaaacagaaccttcataatacaaaccttccggctatcaagattgaccaggattcagacgtcacagaagaaactatactaattacattgaggcgtgctcttaatcaatattcttctttgcaaggacctgctgggcattggcctggggattacggcgggatttcgttcattttaccactcatgatatttgcattacatgtcacacgatcaatggatgaagttttgtcaatagagcatatacgtgagatatgtcgctacatttataacatgcagaatgaggatggaggctggggaacacataccttgggaccaagctccatgtttggcacatgtgtaaactatgcaaccttaaggattctaggagaggtgcttgatggagaaaatgatgcattatccaaagggcgttcttggattttgtctcatggaagtgcaactgcagcaccacaatgggcaaagatatatctctcgatgataggtgtatacgattgggctgggaacaatgcaatcattcctgagttatggatgcttccacattttctcccaattcatcctggaaggttttggtgcttttgtcggatggtttacatgccaatggcttacatttatggaaaaaagtttgttgggcctatcactacaactattttagaaataagaaatgagctctacaatataccatataataagatcaactggaacaaggcttgcaattcttgtgccaaggaagaccttatctatgagccttcatggttgcaaagtattgcaatggcttatttgaataagtttatagaaccattatcaaatctttggccaatgaataagctacgagaaagagctatgagtgacctcatggaacatatccactatgaagatgaaaccagcaactatgttggcttatgccctataaacaaggcattaaatatgatatgttgttggatagaaaaaccaaactcaaatgaatttagacaacatctcccaaggattcatgatttcctatggcttggagaagacggaatgaagtcaaaggtgtatgttggttgccatagttgggaaactgcgctcatagttcaggctttttgctcaacagggctcaccgaggagttttgttcgactcttcaaaaagctcatcagttcttaaaaaatgcacaggttatcaaaaacattcctgattacaagagctactaccgtgaaagaactaaaggttcttggactctatccaatggagaaaacttttggcctattgctgatacaactgctgaggcacttaaggcaatactgttgctgtctaacattccttcagaacttgtcggggatccaataaaacaagaacgactatatgatgccgttgattgcctcctttctttcgtgaacaaagatggtacattatcatcagctgaatgtaaacgaacaacttcatgggtggagtttatcaatccttctgagagttttcgtaatatcatcgtcgactatccatatcctgaatgcacatcatcattaattcaagctttagtgctgtttagaggcaagcatccaatatatcgtcgtgatgagatagacaaaattatcaaaagtggtgcatcattcattgagaaagtacaacgaaaggatgggtcctggtatggttcttgggctgtgtgtttcacttatgcaacattctttgctataaaaggattagttgctgcaggaagaacataccggaatagtttggctattaggaaagcatgcaacttcttgttgtcaaagcaactaggaaccggtggatggggagaaaactatcttggttgtcaaattgaggagtatgttgacagtggcagtccacatggagtcaacactgcacaggcgatgctagctttactctacgctgggcaggtcgaacaagacccagcgccactataccgtgctgcaaaagaattaattaacatgcagatggagaacggagaatttccccaacaagaaattgttggcaacttcaactcctcacttttcttcaattacccgaactaccgaaacttatttcccatctgggctttaggagaatttcgccgccgacttgttgcaaaaaaaggttaagatgggtatcttaagctatttctaataattgtatttgggatacaagtatccatgtatattttatttttcgtgatgatgggaatgtaacacaaaataaaatttatatttagtacgtatatgttaatatttgtaagattatcacaaacaagttgataatcatcagtgatctggttcctcaaattcaataacaaggatgcaaaatgtttggt

SEQ ID NO: 130202 - DNA, 1273 bp, Zea Mays
caatccttcaccatcctaagctagccaagcatgtggaggctaaagatcggcgagaggccaagcaacccgctgcttcgctcgcccaatggcttccttgggagagaggtgtgggagttcgaccccgccgcaggcacgccggaggagcgcgccgaggtcgataggctgcgccaggagtacacccgcaaccgcttcacgcgacggcaatgcagtgaccttctcatgcgcatgcaggaaagtacagtcccggcctggacataataaggcactgaactatatatcccctccattttttcgcccaaatctagtaagtagccctttgtaaaacctcagcaatttcttgaagatcgacccccccagatgaaccatataaccaagagagaaaccatgaacccgattaaaagatggcccctcatctcctgaacttccaaagtggtattaaatccgctaacaataactacttgtggttcagtatgggcaacattagccaacaacactagtactacatgcttctaacgggcgatattatacaccctgaggaggtaataggaatttcattaaagtttcatgggtattaaataagctaatatgttatagtattaatgaagaggggtatgaccaaaaaaaattataggaaaaatcaagttttataaagctacacaccaaagtcttgaaaacggtacgttacataaaacataaaacccgacaggaacttaactgacaacaaaacagacttaacttctcttaaatgtgtgccacgtaacatcattgtacatgctctaatcagacctgttctacattatatggcattctaaaattttagattcagagtatttcaaattttaattggaaaaaaaatcagtattttttcagtgtagtgtgcaggactagcttgtttgattttcaatttgaattactgcatacacatttatttcatctacgacgtgtttaatgaagtcttacgttgtatatctctcttgcagtatgcaaaacagaaccttcataatacaaaccttccggctatcaagattgaccaggattcagacgtcacagaagaaactatactaattacattgaggcgtgctcttaatcaatattcttctttgcaaggacctgctgggcattggcctggggattacggcgggatttcgttcattttaccactcatggtatgagttttctttgtgattttggtttatgagaaaccaaagtttgctttgattttatcaaagcacacaataaagtaacataaattttttaaatgtgataaaaacat

SEQ ID NO: 130203 - DNA, 223 bp, Zea Mays
atgttacatttgcagatatggacctcggtggttttctccacattaggaaagctggaagagcctttttgaactcagtttttttgctaacagtggtgttatggtgaaacagagttttgtatgtatgtaccaacagctaaaatgtaaacacaacattatcatagttgagtacaagaataattatctcttatatcttattgcaaaatctgaaacagttctcctgtag

SEQ ID NO: 130204 - DNA, 3064 bp, Zea Mays
atcccccaataagcccctaatcattccccgcacggatcacaccacatatgtttgggcacttcctgttcctggggtcctcgcccacgtaggctaacaacgcaagcattgtaccgaaaaccccaggcatcagatgctccaatctttgctgcccatacataggccgcctctagagagcaaaaaagagaagtgcaaacaaagatcctcaaaaggacaggcagccaaatgccccaccacagcgtagcccctcctcactgactcacctgcaaaaaccacttgcaaaccacacaaaccgaaaccgccagctcccctgcctccatttttagcaacttttcccttcaatctcccgtcgcagtcacccttcttgcacccccgcgcagcttccgacacctccgaccttctctggcggcgccccgccgttggacgctcatggagaagagcccgggcgccgcgccgacatcatcgcccgaggaggaggtggcggcggatggccgcgggcacgttgaggacgcgacggggcagaaggagcaggcgacgccggtggtgctcaagaaggggccgtggacggcagcggaggatgccatgctcatggaccacgtccggcaccacggcgaggggaactggaacgcagtgcagagggtgaccggcctgctgcgctgcggcaagagctgccgcctgcgctggaccaaccacctccgccccaacctcaagaagggctccttctcccccgacgaggagctcctcatcgcccagctccacgcgcagctcggcaacaagtgggcgcgcatggccgcgcatctgccggggaggacggacaacgagatcaagaactactggaacacgaggaccaagcgccgccagcgcgccggcctgcctgtgcacccgccgccagaggtgcagctccagctcgccctcgccaggcgctgccgctacgacgacttctcgccgctgccgtccccgcaggagctgtccggtgtccaggcgctggtgggcgccgccgcctcggccgggtacgccagctcccgcccggcgcccctcgacctggctcggcagctcacccagacgacgaaccagcagacggagactgtgcagttcctctcgccgccacccttctcggcgccgtcgtccccgtgggcgaggccgttcgcccggaacgcgcagtacttccagctcgcgcactcgtcgtcgcccgtgtccccgacgacgccggacctgtccctcggctacggcgcgcgcagcgccggcgccgaccagagcaggctcccgccgctctcgccgtccccttgccccagagtggtggagctcccttcaaaccaatacgcccaaccgacgccgccggcctcggccgccgccaccgcacttggaggtggtggcgcagcgctgccggatcatcagaacgcggcgagcctcgagaagatgctgcgcgagctgcatgacgtcatcaaggtcgacccgccggcgctggtcccggccagcggcggcgctgccctggagtggcatggtggcggaggtgagtagtgcatgccgtgtgtgaagcattttctctcgcatcttccctttatttttggatgcacgcgggagtagggagttcgatttgttgctttgcggggggaagagaacaaatatgctcatgattactgtgtgaactggcagattagcgtgaaccttttcgttcgtggttccaaaatctccatttgttttcacttgctacgtgccaccgcccaccggcttcttcaaaagctaaacaatttctgatctttatcgcggtgtcaccatctagttttaatcggcgtttcacttacttgccagcggtagtaggaataaatgtgctcagcttggtgaaagtaagatttggacagaatccgaaacatgcatggacagcacagtgtttggagtctcttttgttttttttgtctttctttttgatagttttaaggttagagaagcttctgcactgcaggtactgtctgtggagagggcattctttttgtccttgcaacgagacagtgacagactacctttgatcttgatccatgattactttagcttatcctgtccagtgctttaacaactttccccccttcttttctatcatctacctaatcaaacgtaatatgattccaattcatacttcctttttcgcaatcgtatggttgctcgttagcttgcataacaacacgtcacatttgctgttatattattccgcacaatgcaagtttaacataatcaggataatcatacagagttatatttcttttttctggagatcaactagagaggttctcgttcttttttttaaaaaagagagagagagaatagagagcttctcgtgatcagtgaaaagaatataattaaaccaggaccaatgatttataaaagctaccgattttaaatttttaccatgtgcgtgctaccgcgcgaatgaatatatatatgaactttcatgaagcaattccatctttcagaatttgtgagcggcctgcaggccctgcagcagcatcgggttgacgacatggatactctgttcggcctgctgcacccgccgctccgccgcgcgccggagacggtggcggcggcagctgcaggctccacccactccggctcgacctcgcagcacagcagcgacgaccagaagcccaccgacgtcgtcggcctcggcctggacctggacctccaggtcgccggcagcaccgtctcgtcggaccaggaggactggggcctcgacgccgtctgtcagtggagcagcgtgtccaggatctgctgatcgcgtgcacggactgcagggatcggcgtagcgatgccgaatcgtcggtcaagacatcgtgcatgcatccggtgattctgagaactggaagagagagagaatgcctttttttttgaacgtttaaatttcttgctgctgtcagatgccaagcagcatgggcaaacggatttgtttcccgttcaatgttcatgacgactatggttggttagttaccgagtcggctgcgcaacccaacggaatttgcgtcagcgtctctggcatgtccctttcttcttcttttttcgcgaccgtacactgactgac

SEQ ID NO: 130205 - DNA, 1838 bp, Zea Mays
cctcaaaaggacaggcagccaaatgccccaccacagcgtagcccctcctcactgactcacctgcaaaaaccacttgcaaaccacacaaaccgaaaccgccagctcccctgcctccatttttagcaacttttcccttcaatctcccgtcgcagtcacccttcttgcacccccgcgcagcttccgacacctccgaccttctctggcggcgccccgccgttggacgctcatggagaagagcccgggcgccgcgccgacatcatcgcccgaggaggaggtggcggcggatggccgcgggcacgttgaggacgcgacggggcagaaggagcaggcgacgccggtggtgctcaagaaggggccgtggacggcagcggaggatgccatgctcatggaccacgtccggcaccacggcgaggggaactggaacgcagtgcagagggtgaccggcctgctgcgctgcggcaagagctgccgcctgcgctggaccaaccacctccgccccaacctcaagaagggctccttctcccccgacgaggagctcctcatcgcccagctccacgcgcagctcggcaacaagtgggcgcgcatggccgcgcatctgccggggaggacggacaacgagatcaagaactactggaacacgaggaccaagcgccgccagcgcgccggcctgcctgtgcacccgccgccagaggtgcagctccagctcgccctcgccaggcgctgccgctacgacgacttctcgccgctgccgtccccgcaggagctgtccggtgtccaggcgctggtgggcgccgccgcctcggccgggtacgccagctcccgcccggcgcccctcgacctggctcggcagctcacccagacgacgaaccagcagacggagactgtgcagttcctctcgccgccacccttctcggcgccgtcgtccccgtgggcgaggccgttcgcccggaacgcgcagtacttccagctcgcgcactcgtcgtcgcccgtgtccccgacgacgccggacctgtccctcggctacggcgcgcgcagcgccggcgccgaccagagcaggctcccgccgctctcgccgtccccttgccccagagtggtggagctcccttcaaaccaatacgcccaaccgacgccgccggcctcggccgccgccaccgcacttggaggtggtggcgcagcgctgccggatcatcagaacgcggcgagcctcgagaagatgctgcgcgagctgcatgacgtcatcaaggtcgacccgccggcgctggtcccggccagcggcggcgctgccctggagtggcatggtggcggagaatttgtgagcggcctgcaggccctgcagcagcatcgggttgacgacatggatactctgttcggcctgctgcacccgccgctccgccgcgcgccggagacggtggcggcggcagctgcaggctccacccactccggctcgacctcgcagcacagcagcgacgaccagaagcccaccgacgtcgtcggcctcggcctggacctggacctccaggtcgccggcagcaccgtctcgtcggaccaggaggactggggcctcgacgccgtctgtcagtggagcagcgtgtccaggatctgctgatcgcgtgcacggactgcagggatcggcgtagcgatgccgaatcgtcggtcaagacatcgtgcatgcatccggtgattctgagaactggaagagagagagaatgcctttttttttgaacgtttaaatttcttgctgctgtcagatgccaagcagcatgggcaaacggatttgtttcccgttcaatgttcatgacgactatggttggttagttaccgagtcggctgcgcaaccc

SEQ ID NO: 130206 - DNA, 1538 bp, Zea Mays
cagttgtgttcggggaatcgaacacaacttgcttgggaagggcgagtgcgagtccattatatagatttcatcgccgcggccatttcacaacagctatggcggccacggcgagcgatcagaagaccccactcctcctgccgttgccggatggcggcggcggcgggcacggggcgagcgcgcagctggagcgtatcctcggcgacgagtcggcgccgcgggcacggcggctggcgcgcgcggcgcgggaggagctccggctgctgctggccctggccgcgccggccgtggccgtctacatgatcaactacgccatgtccctgtccacgaggatcttctgcgggcagctcggcacgctcgagctcgccgccgcctcgctcggcaatgtcggcatccaggtcttcgcgtacggcatcatgctgggcatgggcagcgcggtggagacgctgtgcgggcaggcgtacggcgcgcacaggtacgagatgctgggcatctacatgcagcggtccttcgtcctgctggccggcgccggcgtcccgctcgccgccatctacgcgttctcgaagcagatcctgctgctgctgggggagcccgagcggatcgcggaggccgcccgggcgttcgtggtcggcctcatcccgcagatcttcgcctacgcgctcaacttccccatgcagaagttcctgcaggcgcagagcatcgtggcgcccagcgcctacatctccgcggccacgctggccctgcacgtagccctcagctgggtcgccgtgtacaggctgcgcctgggcctgctgggcgcgtcgctggtgctcagcctcagctggtgggtcatcgtcgccgcccagttcgcgtacatcgtcacgtcccggaggtgccggcggcgcacgtggacgggcttctcctgccaggccttctccggcctgccggagttcttcaggctctcgtccgcgtccgcggtcatgctttgcctcgagacgtggtacctgcaggtcacagtgctcatggcaggcttgctcaaggacccggagatcgcccttgattcgcttgcagtatgcatgtccatatcaggatgggtgttcatggcgtcggtaggattcaacgcggctgctagcgtgagggtgagcaacgagctcggcgccgggcaccccaaggcggcatccttctccgtcaaggtcgtcacgattgtgtcgttcacggtggcgtcgactatagccgccgtcctcatgtgcctccgcgactacctcagctacgtcttcaccaaaggggacgacgtcgcgcgcgccgtgtccgccatgaccccgctgctcgccgtcaccattgtgttcaacggaatccagcccgtcctgtctggtacacactcctactcatcaaatctgtctcgatcgagcaacgtgctagctacttcctctatagtattcctattttacttctccctctatatatctcatttctacatagtagcgttctctaaatttcgttctttattcaccgccgggccaataccggcgcacactcggctcgtcggcaaacgtgcaatataa

SEQ ID NO: 130207 - DNA, 1573 bp, Zea Mays
cgctgacgccacgcgttcgcactgactgactcaactgcaatcgcaatgggcagctgggcatggggagcgcggtggagacgctgtgcgggcaggcgtacggggcgcacaagtacgacatgctgggcatctacctgcagcgctccaccgtcctgctgatggccacgggggtgccgctggcggcgctgtacgccttctcccgccccgtcctggtcctgctgggggagtcccccgagatcgcgtcggccgccgccgtcttcgtgtacggcctggtcccgcagatcttcgcgtacgccgccaacttccccatccagaagttcatgcaggcgcagagcatcatggggcccagcgcctacatctccgccgccgcgctcgccgcccacctcgccctcagctacctcgtcgtctaccgcctcggcctcggcctcctcggcgcctcgctcacgctcagcgccagctggtgggccatcgtcgccgcccagttcgcatacatcgtcaccagcagccgctgccgcctcacctggaggggcttctcgtggcaggccttctccggcctgcccagcttcttcaggctctccctcgcatccgccgtcatgctctgcctcgagacctggtacttccagattctcgtgctcatcgcaggcctcctcaaggaccccgagcttgccttggcctcactctctgtctgcatgacaatttcagggtgggtgttcatgatctccgttgggttcaatgcagcagccagcgtaagagtgagcaacgagctcggcgccggcaacccaagggcggcggcgttctccgtggtggtagtgacgctgctctccttcgtcctgtcggtcctcgtctccgccgtcatcctgctgtgccgggactacatcagctacatcttcaccgagggtgaggacgtgtcgcaggcggtctcccggctcaccccgctgctggcgttcacgctcatcctcaacggcatccagctccagcccgtcctctctggggtcgctgtggggtgtggatggcaggcgttcgtcgcgtacgtcaacgtcggctgctactacatcgtcggcatcccgctcgggtgcctcctaggcttctactttgacctaggagcagcgggtatttggagcggtatgatcggcggcaccttgatgcagaccttgatcttgatatgggttacattcaggaccaactggaacaaagaggttgaagaagcacagaagaggttaaacaaatgggacgacggcaaggctcctctgctgtcagcgcaagaatgaaacaactcgtctctctggtgcccaaccaaagaacaacgagacgtggatatgacctgtacggaactagggacgcccctcggcaggctcagcggagacgtcgacgtagtttgatatcaagtagcaattccaccatgtcctgaaatggacagaaccaggccaaatgcctggaatggacagaaccagatggctgatgaaattctacgtacattccatccggtccaatatataattcgtttcacttttttatattaagtttgaccgactcatctcattaaaaaatataattgttattaacttttactagaata

SEQ ID NO: 130208 - DNA, 2340 bp, Zea Mays
ctttattttattattattattttcctactacacaagggaccttttgagctgagatgatgcccaaaaacaaaaggacgctcatcatcagtgacgcccagtcgtcgccaagcagctagctagcatgccaataatttttttcttgttaatgttgtcgcagctggtactatactactactactacgccgtatatgaatgcgcttttgtctgcatgctcaggctgattccatccaacttgtctttcttctctcctctccacccatgccccgtccgtcgcagcaggggttatatagtgcccgcgaacggacgcgcaggcgccacgaagccgagatcgagcagctacctctccgatccgaggcctgagcgagcgagctgaggactgcagcctatataatatctagactagagtacaccacaacgacgaggcacatatatatacacgcggcggcggccagatccatcttggtatacacgtaatatatatacacgcacgatgggcagcgccggcggcggtggcgagagcaagctggagagcccgctgctgggcgcgtcgtcgacgggccacggcgaggcggtggtgagcgggcagctggagagcatcctgggcgacgcgtccgtgccgtgggggacgcggatggcgtcggcgtccgcggtggagatgcggctgctggtgcgcctggccgcgcccgccgtgctcgtgtacatgatcaactacctcatgtccatgtccacgcagatcttctcgggccacctcggcacgctcgagctcgccgccgcctcgctcggcaacaccggcatccaggtcttcgcctacggcctcatgctgggcatggggagcgcggtggagacgctgtgcgggcaggcgtacggggcgcacaagtacgacatgctgggcatctacctgcagcgctccaccgtcctgctgatggccacgggggtgccgctggcggcgctgtacgccttctcccgccccgtcctggtcctgctgggggagtcccccgagatcgcgtcggccgccgccgtcttcgtgtacggcctggtcccgcagatcttcgcgtacgccgccaacttccccatccagaagttcatgcaggcgcagagcatcatggggcccagcgcctacatctccgccgccgcgctcgccgcccacctcgccctcagctacctcgtcgtctaccgcctcggcctcggcctcctcggcgcctcgctcacgctcagcgccagctggtgggccatcgtcgccgcccagttcgcatacatcgtcaccagcagccgctgccgcctcacctggaggggcttctcgtggcaggccttctccggcctgcccagcttcttcaggctctccctcgcatccgccgtcatgctctgcctcgagacctggtacttccagattctcgtgctcatcgcaggcctcctcaaggaccccgagcttgccttggcctcactctctgtctgcatgacaatttcagggtgggtgttcatgatctccgttgggttcaatgcagcagccagcgtaagagtgagcaacgagctcggcgccggcaacccaagggcggcggcgttctccgtggtggtagtgacgctgctctccttcgtcctgtcggtcctcgtctccgccgtcatcctgctgtgccgggactacatcagctacatcttcaccgagggtgaggacgtgtcgcaggcggtctcccggctcaccccgctgctggcgttcacgctcatcctcaacggcatccagctccagcccgtcctctctggggtcgctgtggggtgtggatggcaggcgttcgtcgcgtacgtcaacgtcggctgctactacatcgtcggcatcccgctcgggtgcctcctaggcttctactttgacctaggagcagcgggtatttggagcggtatgatcggcggcaccttgatgcagaccttgatcttgatatgggttacattcaggaccaactggaacaaagaggttgaagaagcacagaagaggttaaacaaatgggacgacggcaaggctcctctgctgtcagcgcaagaatgaaacaactcgtctctctggtgcccaaccaaagaacaacgagacgtggatatgacctgtacggaactagggacgcccctcggcaggctcagcggagacgtcgacgtagtttgatatcaagtagcaattccaccatgtcctgaaatggacagaaccaggccaaatgcctggaatggacagaaccagatggctgatgaaattctacgtacattccatccggtccaatatataattcgtttcacttttttatattaagtttgaccgactcatctcattaaaaaatataattgttattaacttttactagaata

SEQ ID NO: 130209 - DNA, 890 bp, Zea Mays
tcggccaccagacagccacatcaactgcttcggtgcttccgcagttctgcaagtgctgtttggtttagctgcctcttgccgctggcagccagcggaagccaaccaccttgtccccgtcgagcaccgagaccgcgactcctcaccgcactgcgccgctcgcgagaacctcgcgtaagcttcggcaagcagcatccgtcccgccgatcgcaatgccggaggacaaggagtacgcgcccctgccactcggccaggcggcggcgcctgaccccgaggaccccgtcaagtcgccgccgcgacccagctcgcctgccacgtccactcgcaaggcatgctttgctgttcttcaaagctgggtgtcaagaaaatttatgaccggatgtgtagttcttttcccaattgctgtcacattcttcctcacgtggtggtttattcaatttgttgatggttttttcagcccactctatgcaaaactggggtttgacatgttcggccttggattttttacctccctggtgttcatacttcttgttggaatctttgtgtcttcttgggtgggttcaactgtcttctgggttggagaatggtttataaaaaaaatgccatttgtaaggcacatatactctgcatcaaagcaagttagtactgctgtttcaccagatcaaaatacaacagcattcaaagaagtagcaattattagtcatccccgtgttggtgaatatgcgtttggattcataacatcaaccatggttcttcaggtactttttcatcactgcagctatgtatggcttagaccagcaaatgtggtcttttggtgatgagtattttcctagttaatatgctgtccgcagattttgtatacattttttttggtgattcagccttatgcatct

SEQ ID NO: 130210 - DNA, 106 bp, Zea Mays
ttttcagatttcaaccattatcgatatttttttagttggaattgttttttattccgtaaatcctactttctgtcttcttgatttcgatttcatttctataattact

SEQ ID NO: 130211 - DNA, 2320 bp, Zea Mays
atgctcacctcgttgctcccgccgcccaccgtcccggtctccaagaccgccaagcccaggccatccgcgctctccgtctccgcccccgccccttcccccgccgcgacatccgacgatgcgcccggcggcggcgggccccgccgccgcctctccgcgctcatccgctcgctctgcgccgcggggcgcaccgcggaggcggcgcgggcgctgtccgcggcgggcgggggcgcgggcgtcgtcgcctacaacgccatggtggcgggctactgccgcgcgggccagctcgcggccgcgcgccgcctcgccgcgtcggtccccgtggcgcccaacgcctacacctactttcccctcgtccgcgccctctgcgcgcggggccggatcgccgacgcgctcgcggtgctcgacgacatggcccgccgcggctgcgccccgaccccgcccatgtaccacgtcaccctcgaggcagcctgcagggccagcggcttccggggcgccgtcggggtgctccgggacctccacgggaggggctgcgccctcgacgtcggcaactgcaacctcgtcctccaagccgtctgcgaccagggaccggtggacgaggccgtccgcctgctgcgggacctgctgccgtccttcggctgcgagccggacgtggtgagctacaacgcggtgctcaggggcctgtgcatggccaggcgctggggccacgtccaggacctcatggaggagatggtcgccgcggggtgcccgcccaacatcgtcaccttcagcacgctcatcggtcacctgtgtcggaacggcctgttcgagcgggtgcatgaggtccacgcgcagatggcggagcatgggtgcgcgcccgacgtcaggatgtatgccactatcattgacggtgtctgcaaggaagagcgtctcgaggtcgcacgtggcatcttgaacaggatgccttcctacgggctcagtcccaacgtggtttgctacaatactctgttgaagggcctgtgcagtgccgatcggtgggaggaagcagaggggttgctggccgagatgttcgataaggattgtccactagatgatgtcacattcaacatactcgttgatttcttgtgccagaacgggctggtcgaccgggtgatcgaagttctcgagcagatgctggagcacggatgcatgccagatgtcatcacatacaccacagtgatcaacggtttctgcaaagaagggctcatcgacgaagccgtcatgctgttgagaagcatggccgcctgtggatgcaggccgaataccgtaagctatactatcgtgctcaagggtctgtgcagcgcggaacgatgggtggacgcagaggagctcatgtctcagatgattcagcagggctgtcctccgaatcctgtcacgttcaacacactcatcaatttcttgtgtaagaagggacttgttgagcaggccatcgaactccttaagcagatgctagtgaacggatgcagccccgacctgattagctacagcacagtgatcgatgggcttggcaaggctggcaacactgacgaagcactggagctgttaaatgtgatggtcaagaaagggatgagcccaaacacaatcatttattcgtcgatagcttccgctctctccggagaaggtaggattaacaaggtcatccagatgtttgagaacatccaagataccacagtaaggtccgatgcagtgctctacaacgcagttatttcttcgctctgcaaaagaggggaaactgaccgcgctattgagtttttggcatatatggtgtccagtggatgcgttcccaatgaatctacctacactatccttatccgaggcttagcgagtgagggatttgtaaaggaggcgcaagagatactgactgagctgtgctccaaaggtgctctaagaaagcacttgatgaagcattttggcattgtatgaagtataaactggtagtcactgttcgcaagtgctggtgttatcaggattggttcctaattagcctgaaggtgtcatccacattgttttgctcctggaccacccaacccgtggtggttaggcatgatgtatcacgctgctcaaatgtaggctttgacagatggacgcacaaagtcaggctcaaaggctttcatatacattcctaatcagtggcagtaccttttattgtggagtttatctagaatacaaagacactagaagatccagtctgacatatcaaaattgatgagattagttttcagttgtttcagctgatgaacatagtacacagaatttttgtacggagttcctttctttatgggaaaaccatttttgagaatactat

SEQ ID NO: 130212 - DNA, 1720 bp, Zea Mays
acatttcgaacccaaggggaaagagaagcaccccctccagtccaaaccctaaactcagccaaacgcccaaacctctcccacactagccggcctcagtccacccatggcggcggcggcggcggcgagccagagcgatgttcctcaccggcagccggggcaacgtcgccccatgtgcgccgtatgcacgaagcccctccgcctctgcctctgcggccgcctccgctccccgcctgtggacaacgccgtcggagtcaccgttctgcagcacgcgatggaggcccaccacccgctcaactccacgcgcgtggcacgcctcggcctccgaaacctcgccgtcgctcaggtcaccgacgtcaaccaccgtgcccgcttcatcctcaccacgcttgatgccggcggcggcgccgcggcggcttcgggtcctgcaggcggtcctgtgtctgctcgttttggaaaccacgaccggtctgacgggcctgaggagatcgagttgcaggatggcggtggccttgcgtttcctcgtgatgggatttgtggtgccaaatcggatggaaagcatagtgcgacctgtgattttgaccagtccggattgagtgcctgtggtcatctgggcgctgaagacctcagttttggtggttcttgtgaaatgttggatcttggggacgtcaatggtgggatcttctgcaatcttgctggagaggatggttttcttagttgctgccacaacgatggtgggcgtgtcagattcatcaagaagacgaatagtgatggacagcctgctggacttgaaaggcctagctccgctgcaaaccagatagagaactctgttgatgaagcaactacaggtgaaagcaaccatagaagcgagatggaggtggcgtataatgtaaatggtagtctgtctcattctgtagttacaaatgactcagactcagatgaagttaatgggatggtcaatggctgcaacggtgtgggaaaagaaatagatgaagttagcgatgctattggacaggactggaccaggaaaagcatggataagtgcactattgcgtacacagagaaggaactaaggattggtattgagcgtggagtgaaacccaaaatcagatggttatcaagaggcccgcttggtgaagcagctgtctcaaatggctttcttgtcacaaagatacagatgaagaagtgtaaactcactggagaaataacagtgtttgaggaattctcaatcaccataccgccaaaatctgctttgctatttccgtgccagcgggcaatcagcattgatgcttcaggttgtcaggtacaacatttgattgtgttggatggcacttgggcaaaagcacagaggatgtaccatgagaatccatggctgcaacttctgccacacgtgaagctggagtcagatagggttagcttgtatagtgaggtgaggcatgagccaaaggctgggtgcttgtctaccattgagagtatagttgttgccatgaggaaactgggagaggattcaaagggactggatgatctcttggatgtttttgagtcgatgattgctgatcagcgacgatgcaaggatgagaatgtgaagcaaaagctcaactcctaatcataaaaaggtcttatcatcatcagtctgttatctaacttcatgatgacctctggatgcatttttcagtccagatgacatatatacgttaatttatactcagattttttttaatgc

SEQ ID NO: 130213 - DNA, 1340 bp, Zea Mays
tgtttatctgcagtttgtaaattgtgatttacgtgtatctcagcgatcaagaattgctttggtgctaacagttggagtctctttgatcagaatggaacctcaccttactttggctgcattgttggtcgagttgcaaatagaatcaaggatggaaagttcactctaaatggggtgcagtacaatctgagtatcaacaacccacctaacactcttcatggtgggtttaaagggtttgacaaaactatatgggaagttgccgagtataacaaaggggacaagccctcaatcaccttcaagtattacagtaaagatggagaggaaggttacccaggtgatgtttctgtcactgcgagatactcgcttctcccaagcgcgacactgaagcttgagatggaagctataccactgaacaaggccacacccatcagcctagcacagcacacctactggaacctggcaggccacagctcaggagacgtgctctcgcactcggtccagatctggggctctcagataaccccggtagaccagacctcaatacctacaggcgagctcatgccagtgactggcacccccttcgattttctgaccgggaccaggatcggaagcaggatcgaccgggtccccggcggttacgatcacaactacatgctcgactccggcgaagtgaggtcaggcctgcggcatgtggcgcacgtcgtggacccgtccagctcgagggccctggacatctgggccgacgcgcctggcgtgcagttctacaccggaaattctcttggtggcgtcgtgggcaaaggaggcgcggtctatgggaagcacgctggcctctgcctcgagacgcagggtttccccaacgctgttaaccagccgaattttccctcggtcgtgtttggccccggtgagaggtacagccatacgatgctgttcgagctctctaccgagtgagtcatgtagcccgtctgcctgcccgtgtagatagatagatatacaccgtttttattttccttgttgttttgtgcttgcgagtagtcaagaaactgtggcgcgcgcggcggttgttcaattgattcttggtttagggctgaatgttgtagcaggaatgcagcaagactagtaggaaaggaacggatttggggggaggtactaggttactaggtctgcatctcgttctgatgtgaacctgtcacttgtgtgtgtgttgagtttagttcattcaggatttagcagttcttgcatgaggtaggctaacatcgcatttcctgtcgagagaaaaactcgatcgaaacctgagtttagtatggtttcaggatgcagcaatcgacttatcgacattcacgttc

SEQ ID NO: 130214 - DNA, 1707 bp, Zea Mays
cccgactgagcgacgctagagtcgtgcgtcgtgtccccttggcgcggcgcccacctctgacctcgccactggagatgctgctgcgccagagctgaactaaaaccccgggaaatcaggcagcaggccgccggaggaaatggagcagctggtgggagttcaccatcaccaccactcgctctcccctcgggctcctcgcaccccgacccgcccgcagccgcagccgcagccgcacccgctcctccaccatctcccgtccaacaggttccgggatctccactcccagattcacaatcacattcaccccgcggtccccgcggccagcagggtgctccgcgccaccccgcccttcttcctcatcctcctcgccgccgtctacctgcttgcctccgtcaccatcttctccgcccccacgccgctgctccgcctccgattggcctctcccaggccgctgatcctcccgaagcccgcgccaccgccgccgccgcctgcgccggagctctttgatttagacggcgggagtgtccgggtccgcctcaccaatgtcggcgccgccgtcacctcgttcctcgtcccggacaagaacggggttctcgctgatgtggtgctcggattcgactcgctggatccgtacctgaatggaacctcaccttactttggctgcattgttggtcgagttgcaaatagaatcaaggatggaaagttcactctaaatggggtgcagtacaatctgagtatcaacaacccacctaacactcttcatggtgggtttaaagggtttgacaaaactatatgggaagttgccgagtataacaaaggggacaagccctcaatcaccttcaagtattacagtaaagatggagaggaaggttacccaggtgatgtttctgtcactgcgagatactcgcttctcccaagcgcgacactgaagcttgagatggaagctataccactgaacaaggccacacccatcagcctagcacagcacacctactggaacctggcaggccacagctcaggagacgtgctctcgcactcggtccagatctggggctctcagataaccccggtagaccagacctcaatacctacaggcgagctcatgccagtgactggcacccccttcgattttctgaccgggaccaggatcggaagcaggatcgaccgggtccccggcggttacgatcacaactacatgctcgactccggcgaagtgaggtcaggcctgcggcatgtggcgcacgtcgtggacccgtccagctcgagggccctggacatctgggccgacgcgcctggcgtgcagttctacaccggaaattctcttggtggcgtcgtgggcaaaggaggcgcggtctatgggaagcacgctggcctctgcctcgagacgcagggtttccccaacgctgttaaccagccgaattttccctcggtcgtgtttggccccggtgagaggtacagccatacgatgctgttcgagctctctaccgagtgagtcatgtagcccgtctgcctgcccgtgtagatagatagatatacaccgtttttattttccttgttgttttgtgcttgcgagtagtcaagaaactgtggcgcgcgcggcggttgttcaattgattcttggtttagggctgaatgttgtagcaggaatgcagcaagactagtaggaaaggaacggatttggggggaggtactaggttactaggtctgcat

SEQ ID NO: 130215 - DNA, 2968 bp, Zea Mays
atgctgccgctcgtcctggccaccctcaccagcgtactgctggccggcccagcagccgaccacggagccctcggcagcccgccgccggaccccgtgcagtgctcgtccggcggcggcacggccgactgcaccgtgtcgagcgcctacggcgtgttcccggaccgctccacgtgccgcgcgtccgccgctgtgtacccggcgtcggaggacgagctggtgcgcgccgtggccggcgccgccgcggccgggaccaagatgaaggtggccacccgctactcccacagcatcccgccgctggcgtgccccgggagcggccgcggcgagggcctcgtcatcagtaccaggcggctcgaccgcgtcgtgtccgtggacccggcggcggggcgcgtcacggtggagagcggcgtcacgctgcgagacctcgtcgaggaggccgccaaggccgggctcgcgctgccctacgagccctactggtgggggctcaccgtcggcggcatgctcggcacgggcgcgcacggcagctcgctctggggcaacggcagcgccgtgcacgagtacgtcgtcgggatgcgcatcgtcacgccggcggccgccgccgagggctacgccaaggtgcgcgtgctcaccgccgctgacccggacctggacgccgccaaggtctctctcggcgtcctcggcgtcatctctcaggtgacgctggcgctacaacctctgttcaagcgctcggtgacgttcagcgagcgggacgacgacgacctggcggagcaggtgggcacgttcgggtaccggcacgagttcgccgacatcgcgtggttcccagggcatgggcgggcggtgtaccgcatcgacgaccgcctgccgctgagcgcgcccgacgacggcgccatggacttcatcggcttccgcgccacccccacgctcgcgatccaggcaacccgcctcgccgaggacctcttcgagcgcgccgacaacggcagcggcaagtgcctgacgtcgcgggtgacgcacgcgacgctgtcggcggccgggtacgggctgcagtggcggagcggcgggctgttcgcggggtaccccgtggtggggccgcagcaccggatgcaggcgtcgggcggcctccccgtgcgccgcgccgtgctgttcgtcgccgaggtgcgccggcttcgggacctggagcccagggcgctgtgcggcgtggagctctacgacggcatcctcatacgctacgtgaaggcgtccacggcgcatctgggcaagcccgcgccgcgcggggaaccgtccggggacatggtggacttcgacatcacctactaccgcagccgtgactccgggcggccgcgcctgttcgaggacgtgctggaggaggtcgagcagatgggcatcttcaagtacggcggcctgccgcactggggcaagaaccgcaacctcgccttcgtcggtgccgcgcgcaagtactccggcctgccgcgcttcctgcgcgtcaaggacgcctacgaccccgatggcctcttctccagcgactggagcaacatgatgctcggcatcggcgggaggtcgcccacgacggacgcgcccgggtgcgcgctcgaggggatgtgcgtgtgctcgcgggacgagcactgcgcgccggagcagggctatgtctgccgccccggcaaggtgtacaaggaggccagagtctgcaccagggcaacgcaaagcccggagcccggcggcttcccccaacgctatccggcaccgccgctggctgctccagcaaaagcccgagctcagttcatcaatgtcggcactgccggccccaccgccggcgccaccggcacgctcctgcggcggtatcctcgactcccagaaccgtcttgctcctctttgtgctctagaaagcgccgggtctatccttcgccacctctgcggcctcctcctcctccgccgcctgccaggcgacctccgctcctttggatgctacgcgtcgccacaggcatcctcgatggtcgccaaccttgtggagggcgtgtcgtaccccttcttctactcgctcgccgacatgggtaccctccccgaccaccccacaagaacatcgctcgcctcctcaaggccaagcgcttccgcaagcccgacatctccgagaccatccaggagctgctcggcggcaaggtggggagggggcaactatccggtgggttggtggtggacgtgggagccaatgttggcatggcatcatttgtggccgccgtgatggggtttcgggtgctggcattcgatgattcgagcccgtgttcgagaatctgcagcggatattcgacggggtgtacctcaaccgggtgcagcaccgcattgtggtgtatcacgctgcgtggctgcagcttctgatcgagttgggactattacgatgcacagggtgattggtcgactggacaacagtgctatatctgcagacggtgcaaagttagcattaagtctaatgcagaaattgctgttgaagtttccacaattcctttggatgaacttgttccagatactgagagagttcttctgatcaaagttgatgttcaaggctgggaataccacgtactaggaggcgcatcaaatttgctttcaaggaggaaaggtgaagctccctatccctaccttatatatgaagaagatgaacacctactgcaggctggcaacagcagtgcacaggacataaggacatttctcactagtgttggttacaaccactgtaaaaggcatggaaatggtgctcacggtaaaaggaatagacaaatttgtttctgactgatgctcttatgctcctaagctaggtttgtatatgaactgtgaagaatcagctgagttctggcagttttggccctttgttacttagcaatgccagatgtttatacatgtcatgtgcccaatagttgtattgcactgagttctatggtaccccttggctttaacttttaggttaatttgttggttgctggacctt

SEQ ID NO: 130216 - DNA, 246 bp, Zea Mays
atgggccgcccggagccggtcgtgctgttcgctcagacgatcctccactcccagctggacgagtacgtcgacgaggtgctattttctgagccagttgtgatcactgcttgtgagtttcttgagcagaatgcatctccttctacgccaaacatttcccttgttggtttactgaaaatgggcataacttttataacatctgatgatattgatgtttggacccttctgattattggtgataggatttga

SEQ ID NO: 130217 - DNA, 1643 bp, Zea Mays
cgcgattccccaccccgcgcccgcagcccccccccccgtcctcccggccgcagccgagcacagccgccgcgcccacaaatcacgcgactcccgcttccatgtcctcgcgtcctccattgcagccgcatacatagcgtcgccccttccatcgatggcagccagccgcgcccgcaaatcacgcgactcccccttccatggcgtcgcccccttccatccatggcaggtccgcgcccctacgccccaaatcacgcggatggaaggggtcgcgagggagtctctctctggacgcgcccgtcgccgcctccaagctcaggagggagcggcgcccggcccccgcgagcgtgaacccggggccacaatgcttgaggcggaggaggggcctggcggttcgctgccagacggggtccaccgcagcgcccttcctcaggacggaggagccccccgcggctgcggcgggggcaaggaatgcccaggcggggttcaccttcgtcatgaagttcggcggctcgtcgctcgcgtcagccgagcggatgcgggaggtggccggcctcatccttagcttcctcgacgagatgcctgtcgccgtcctctccgccatggggaagaccaccaataacctcctcctaggaccttccatttctagctctcagcgcctgagtcagggtgctcgattctttcgcttactagctaacaaggctagatgcgcgtgtgcctgattcgttgtctgtgtaggccgaagagaaggcggtgagctgcggcggaggaggggcatctgaaatccctgagctcgctgtcatcagggagctacatcttaggacaattgatgagctcggtttagataagtcgattgtttcaggtacccaatcaaccagtcagtcaggcagagtggcaaaagctggggagcgatgcaggcgtcagagcagcaacaacggaggagtaaggcgcgatcctctgccagtgtagatgagaaggaaacacgcaaagagcatcaaaagcaagttcaacgatcttatgtcaacccatccacctctgaatgaggcatattcagatgtgtgtgtattcagagctcaatatgttacatcgaccttcccaacccgccggcagagcttaagaagctcaagcacaagaagtgcctcgtccagtccccccaactccttcatggatgtcaagtgccaacgatgcttcagcatgtccaattcgcttgtggcataggaatctcatcctagattcaatagaggggctgcaatgccggcatcgccatagctggaaatcgagcactgacggacaccgggcgccgagatgggccgtcttgtccaccgccgcaagaaccgcatgcgttggagccatccttacacctgctcctacttccgcgccagcaacccaacacgccgacgacacgagctcctccttataaaagtgacatctttattgtatagataacgaatggttatagttatttattcttgtgtccaagtggtattggatttttttagcttggggttaaagaaaagacagtcatgtactttgcatcttttttgtatttatgttttatgctaaattgtggaataacactatattagttgttagcaaagaatttctgagatattaaggttgatgataatatatgttgttatttcatttaa

SEQ ID NO: 130218 - DNA, 1728 bp, Zea Mays
cgcgattccccaccccgcgcccgcagcccccccccccgtcctcccggccgcagccgagcacagccgccgcgcccacaaatcacgcgactcccgcttccatgtcctcgcgtcctccattgcagccgcatacatagcgtcgccccttccatcgatggcagccagccgcgcccgcaaatcacgcgactcccccttccatggcgtcgcccccttccatccatggcaggtccgcgcccctacgccccaaatcacgcggatggaaggggtcgcgagggagtctctctctggacgcgcccgtcgccgcctccaagctcaggagggagcggcgcccggcccccgcgagcgtgaacccggggccacaatgcttgaggcggaggaggggcctggcggttcgctgccagacggggtccaccgcagcgcccttcctcaggacggaggagccccccgcggctgcggcgggggcaaggaatgcccaggcggggttcaccttcgtcatgaagttcggcggctcgtcgctcgcgtcagccgagcggatgcgggaggtggccggcctcatccttagcttcctcgacgagatgcctgtcgccgtcctctccgccatggggaagaccaccaataacctcctcctaggaccttccatttctagctctcagcgcctgagtcagggtgctcgattctttcgcttactagctaacaaggctagatgcgcgtgtgcctgattcgttgtctgtgtaggccgaagagaaggcggtgagctgcggcggaggaggggcatctgaaatccctgagctcgctgtcatcagggagctacatcttaggacaattgatgagctcggtttagataagtcgattgtttcagggacccttctccccaacacgcaggggtagcgtaggaggtgttgtggcggcattatctaggaagcggtctgtggacatgaggcagatcaacccgaaggtgcctaaggaggaggctgtcaccatctccggtcgactcgtccagatcctctccgaccatgggcccctcaccatcggcaacacctagaacaacacgaaggtacccaatcaaccagtcagtcaggcagagtggcaaaagctggggagcgatgcaggcgtcagagcagcaacaacggaggactctgccagtgtagatgagaaggaaacacgcaaagagcatcaaaagcaagttcaacgatcttatgtcaacccatccacctctgaatgaggcatattcagatgtgtgtgtattcaggatgtcaagtgccaacgatgcttcagcatgtccaattcgcttgtggcataggaatctcatcctagattcaatagaggggctgcaatgccggcatcgccatagctggaaatcgagcactgacggacaccgggcgccgagatgggccgtcttgtccaccgccgcaagaaccgcatgcgttggagccatccttacacctgctcctacttccgcgccagcaacccaacacgccgacgacacgagctcctccttataaaagtgacatctttattgtatagataacgaatggttatagttatttattcttgtgtccaagtggtattggatttttttagcttggggttaaagaaaagacagtcatgtactttgcatcttttttgtatttatgttttatgctaaattgtggaataacactatattagttgttagcaaagaatttctgagatattaaggttgatgataatatatgttgttatttcatttaa

SEQ ID NO: 130219 - DNA, 1930 bp, Zea Mays
cgcgattccccaccccgcgcccgcagcccccccccccgtcctcccggccgcagccgagcacagccgccgcgcccacaaatcacgcgactcccgcttccatgtcctcgcgtcctccattgcagccgcatacatagcgtcgccccttccatcgatggcagccagccgcgcccgcaaatcacgcgactcccccttccatggcgtcgcccccttccatccatggcaggtccgcgcccctacgccccaaatcacgcggatggaaggggtcgcgagggagtctctctctggacgcgcccgtcgccgcctccaagctcaggagggagcggcgcccggcccccgcgagcgtgaacccggggccacaatgcttgaggcggaggaggggcctggcggttcgctgccagacggggtccaccgcagcgcccttcctcaggacggaggagccccccgcggctgcggcgggggcaaggaatgcccaggcggggttcaccttcgtcatgaagttcggcggctcgtcgctcgcgtcagccgagcggatgcgggaggtggccggcctcatccttagcttcctcgacgagatgcctgtcgccgtcctctccgccatggggaagaccaccaataacctcctcctaggaccttccatttctagctctcagcgcctgagtcagggccgaagagaaggcggtgagctgcggcggaggaggggcatctgaaatccctgagctcgctgtcatcagggagctacatcttaggacaattgatgagctcggtttagataagtcgattgtttcaggtatgttgttgtttgctccactctgctcttggaacgcctcagttgttcctcttgctctatcatgaatgcttctgttatacaatgggatgtcgttctcttggatgtgccaaagttttctctccccttagtctgaataacaattcctggtggatgtatgtatgtattctcttggatgtgcgaaagttttccccttggatgtgcgaaacacatttactcctcaccgcaatctgcgcctccactctcgacccctcctccttcctcctctccctagggacccttctccccaacacgcaggggtagcgtaggaggtgttgtggcggcattatctaggaagcggtctgtggacatgaggcagatcaacccgaaggtgcctaaggaggaggctgtcaccatctccggtcgactcgtccagatcctctccgaccatgggcccctcaccatcggcaacacctagaacaacacgaaggtacccaatcaaccagtcagtcaggcagagtggcaaaagctggggagcgatgcaggcgtcagagcagcaacaacggaggactctgccagtgtagatgagaaggaaacacgcaaagagcatcaaaagcaagttcaacgatcttatgtcaacccatccacctctgaatgaggcatattcagatgtgtgtgtattcaggatgtcaagtgccaacgatgcttcagcatgtccaattcgcttgtggcataggaatctcatcctagattcaatagaggggctgcaatgccggcatcgccatagctggaaatcgagcactgacggacaccgggcgccgagatgggccgtcttgtccaccgccgcaagaaccgcatgcgttggagccatccttacacctgctcctacttccgcgccagcaacccaacacgccgacgacacgagctcctccttataaaagtgacatctttattgtatagataacgaatggttatagttatttattcttgtgtccaagtggtattggatttttttagcttggggttaaagaaaagacagtcatgtactttgcatcttttttgtatttatgttttatgctaaattgtggaataacactatattagttgttagcaaagaatttctgagatattaaggttgatgataatatatgttgttatttcatttaa

SEQ ID NO: 130220 - DNA, 2016 bp, Zea Mays
cgcgattccccaccccgcgcccgcagcccccccccccgtcctcccggccgcagccgagcacagccgccgcgcccacaaatcacgcgactcccgcttccatgtcctcgcgtcctccattgcagccgcatacatagcgtcgccccttccatcgatggcagccagccgcgcccgcaaatcacgcgactcccccttccatggcgtcgcccccttccatccatggcaggtccgcgcccctacgccccaaatcacgcggatggaaggtatgcgcctcctctccctattgctcagtgtaggcagtccccaaatccgcgcgtccgcgccacctcctactctgcgctccccgttccatgtcacgcgcacctgctcccgcaccggagaacccaccgcaagccgacctcgtcctgagatggcggtggcgctgtgcttcccaggggtcgcgagggagtctctctctggacgcgcccgtcgccgcctccaagctcaggagggagcggcgcccggcccccgcgagcgtgaacccggggccacaatgcttgaggcggaggaggggcctggcggttcgctgccagacggggtccaccgcagcgcccttcctcaggacggaggagccccccgcggctgcggcgggggcaaggaatgcccaggcggggttcaccttcgtcatgaagttcggcggctcgtcgctcgcgtcagccgagcggatgcgggaggtggccggcctcatccttagcttcctcgacgagatgcctgtcgccgtcctctccgccatggggaagaccaccaataacctcctcctaggaccttccatttctagctctcagcgcctgagtcagggtgctcgattctttcgcttactagctaacaaggctagatgcgcgtgtgcctgattcgttgtctgtgtaggccgaagagaaggcggtgagctgcggcggaggaggggcatctgaaatccctgagctcgctgtcatcagggagctacatcttaggacaattgatgagctcggtttagataagtcgattgtttcagggacccttctccccaacacgcaggggtagcgtaggaggtgttgtggcggcattatctaggaagcggtctgtggacatgaggcagatcaacccgaaggtgcctaaggaggaggctgtcaccatctccggtcgactcgtccagatcctctccgaccatgggcccctcaccatcggcaacacctagaacaacacgaaggtacccaatcaaccagtcagtcaggcagagtggcaaaagctggggagcgatgcaggcgtcagagcagcaacaacggaggagtaaggcgcgatcctctgccagtgtagatgagaaggaaacacgcaaagagcatcaaaagcaagttcaacgatcttatgtcaacccatccacctctgaatgaggcatattcagatgtgtgtgtattcagtttacagagctcaatatgttacatcgaccttcccaacccgccggcagagcttaagaagctcaagcacaagaagtgcctcgtccagtccccccaactccttcatggatgtcaagtgccaacgatgcttcagcatgtccaattcgcttgtggcataggaatctcatcctagattcaatagaggggctgcaatgccggcatcgccatagctggaaatcgagcactgacggacaccgggcgccgagatgggccgtcttgtccaccgccgcaagaaccgcatgcgttggagccatccttacacctgctcctacttccgcgccagcaacccaacacgccgacgacacgagctcctccttataaaagtgacatctttattgtatagataacgaatggttatagttatttattcttgtgtccaagtggtattggatttttttagcttggggttaaagaaaagacagtcatgtactttgcatcttttttgtatttatgttttatgctaaattgtggaataacactatattagttgttagcaaagaatttctgagatattaaggttgatgataatatatgttgttatttcatttaa

SEQ ID NO: 130221 - DNA, 2027 bp, Zea Mays
cgcgattccccaccccgcgcccgcagcccccccccccgtcctcccggccgcagccgagcacagccgccgcgcccacaaatcacgcgactcccgcttccatgtcctcgcgtcctccattgcagccgcatacatagcgtcgccccttccatcgatggcagccagccgcgcccgcaaatcacgcgactcccccttccatggcgtcgcccccttccatccatggcaggtccgcgcccctacgccccaaatcacgcggatggaaggggtcgcgagggagtctctctctggacgcgcccgtcgccgcctccaagctcaggagggagcggcgcccggcccccgcgagcgtgaacccggggccacaatgcttgaggcggaggaggggcctggcggttcgctgccagacggggtccaccgcagcgcccttcctcaggacggaggagccccccgcggctgcggcgggggcaaggaatgcccaggcggggttcaccttcgtcatgaagttcggcggctcgtcgctcgcgtcagccgagcggatgcgggaggtggccggcctcatccttagcttcctcgacgagatgcctgtcgccgtcctctccgccatggggaagaccaccaataacctcctcctaggaccttccatttctagctctcagcgcctgagtcagggccgaagagaaggcggtgagctgcggcggaggaggggcatctgaaatccctgagctcgctgtcatcagggagctacatcttaggacaattgatgagctcggtttagataagtcgattgtttcaggtatgttgttgtttgctccactctgctcttggaacgcctcagttgttcctcttgctctatcatgaatgcttctgttatacaatgggatgtcgttctcttggatgtgccaaagttttctctccccttagtctgaataacaattcctggtggatgtatgtatgtattctcttggatgtgcgaaagttttccccttggatgtgcgaaacacatttactcctcaccgcaatctgcgcctccactctcgacccctcctccttcctcctctccctagggacccttctccccaacacgcaggggtagcgtaggaggtgttgtggcggcattatctaggaagcggtctgtggacatgaggcagatcaacccgaaggtgcctaaggaggaggctgtcaccatctccggtcgactcgtccagatcctctccgaccatgggcccctcaccatcggcaacacctagaacaacacgaaggtacccaatcaaccagtcagtcaggcagagtggcaaaagctggggagcgatgcaggcgtcagagcagcaacaacggaggactctgccagtgtagatgagaaggaaacacgcaaagagcatcaaaagcaagttcaacgatcttatgtcaacccatccacctctgaatgaggcatattcagatgtgtgtgtattcagagctcaatatgttacatcgaccttcccaacccgccggcagagcttaagaagctcaagcacaagaagtgcctcgtccagtccccccaactccttcatggatgtcaagtgccaacgatgcttcagcatgtccaattcgcttgtggcataggaatctcatcctagattcaatagaggggctgcaatgccggcatcgccatagctggaaatcgagcactgacggacaccgggcgccgagatgggccgtcttgtccaccgccgcaagaaccgcatgcgttggagccatccttacacctgctcctacttccgcgccagcaacccaacacgccgacgacacgagctcctccttataaaagtgacatctttattgtatagataacgaatggttatagttatttattcttgtgtccaagtggtattggatttttttagcttggggttaaagaaaagacagtcatgtactttgcatcttttttgtatttatgttttatgctaaattgtggaataacactatattagttgttagcaaagaatttctgagatattaaggttgatgataatatatgttgttatttcatttaa

SEQ ID NO: 130222 - DNA, 2096 bp, Zea Mays
cgcgattccccaccccgcgcccgcagcccccccccccgtcctcccggccgcagccgagcacagccgccgcgcccacaaatcacgcgactcccgcttccatgtcctcgcgtcctccattgcagccgcatacatagcgtcgccccttccatcgatggcagccagccgcgcccgcaaatcacgcgactcccccttccatggcgtcgcccccttccatccatggcaggtccgcgcccctacgccccaaatcacgcggatggaaggggtcgcgagggagtctctctctggacgcgcccgtcgccgcctccaagctcaggagggagcggcgcccggcccccgcgagcgtgaacccggggccacaatgcttgaggcggaggaggggcctggcggttcgctgccagacggggtccaccgcagcgcccttcctcaggacggaggagccccccgcggctgcggcgggggcaaggaatgcccaggcggggttcaccttcgtcatgaagttcggcggctcgtcgctcgcgtcagccgagcggatgcgggaggtggccggcctcatccttagcttcctcgacgagatgcctgtcgccgtcctctccgccatggggaagaccaccaataacctcctcctaggaccttccatttctagctctcagcgcctgagtcagggtgctcgattctttcgcttactagctaacaaggctagatgcgcgtgtgcctgattcgttgtctgtgtaggccgaagagaaggcggtgagctgcggcggaggaggggcatctgaaatccctgagctcgctgtcatcagggagctacatcttaggacaattgatgagctcggtttagataagtcgattgtttcaggtatgttgttgtttgctccactctgctcttggaacgcctcagttgttcctcttgctctatcatgaatgcttctgttatacaatgggatgtcgttctcttggatgtgccaaagttttctctccccttagtctgaataacaattcctggtggatgtatgtatgtattctcttggatgtgcgaaagttttccccttggatgtgcgaaacacatttactcctcaccgcaatctgcgcctccactctcgacccctcctccttcctcctctccctagggacccttctccccaacacgcaggggtagcgtaggaggtgttgtggcggcattatctaggaagcggtctgtggacatgaggcagatcaacccgaaggtgcctaaggaggaggctgtcaccatctccggtcgactcgtccagatcctctccgaccatgggcccctcaccatcggcaacacctagaacaacacgaaggtacccaatcaaccagtcagtcaggcagagtggcaaaagctggggagcgatgcaggcgtcagagcagcaacaacggaggactctgccagtgtagatgagaaggaaacacgcaaagagcatcaaaagcaagttcaacgatcttatgtcaacccatccacctctgaatgaggcatattcagatgtgtgtgtattcagagctcaatatgttacatcgaccttcccaacccgccggcagagcttaagaagctcaagcacaagaagtgcctcgtccagtccccccaactccttcatggatgtcaagtgccaacgatgcttcagcatgtccaattcgcttgtggcataggaatctcatcctagattcaatagaggggctgcaatgccggcatcgccatagctggaaatcgagcactgacggacaccgggcgccgagatgggccgtcttgtccaccgccgcaagaaccgcatgcgttggagccatccttacacctgctcctacttccgcgccagcaacccaacacgccgacgacacgagctcctccttataaaagtgacatctttattgtatagataacgaatggttatagttatttattcttgtgtccaagtggtattggatttttttagcttggggttaaagaaaagacagtcatgtactttgcatcttttttgtatttatgttttatgctaaattgtggaataacactatattagttgttagcaaagaatttctgagatattaaggttgatgataatatatgttgttatttcatttaa

SEQ ID NO: 130223 - DNA, 1950 bp, Zea Mays
tttgtctaagctttgttcactgccgcacaatggatgcctttcagatgaacacgtttttttctcgagtaatgagaaagcctctagtgctacaaagatttacagtgcagaatgtacatccacccacgtttcgaataaacagtaatttgtactactactttagaacccattatcaaaagtgaaaacgaaaaaaaaaaagaaaacacagataactaatcaccggtccttctcggggctaacgtcgctgtcccgcccgtccggcgatgccgcgctgtcatccaccggcacgacgccggcgtccttgcggctcctgtacttgatcagaccgtagagcttcttgatctccctgatcggcgcgtccttggcgaaacctcccccgccccgcggcgactgccccgccgcgctggcctcggacgtcgcggtcgcgacgctggcctcgtcgaggtgcccggaccatctcgatgtcagcctcggcggccgcgccgcggtgacggtccgctgcggaggcggtgacggggccacgtgctgcagcgcgctgatgacggtgcggagcgcgcggctcgcggacccgcggttggcgagcatgatctcgccgagctcggcggggctgaggcgggcgccggcgtggaacccctcctccacctgcgggtacagcttgtggtccttgagccccaggtagttgctcgccagagccttgaatccctcgaagtcgcacatggtgaagtggatgtggacgtcgagccggccgggccgcagcacggccgggtccacgccgtccttgcccccgctcatggtgaacaccatcacgcgctcctcgccgcatgacgaggagagcccgtccatgaagccgagcacgcgcgcggtcctcgccgccgccgtctcgccgtccccgccgcgcaggtagcggtcgaggtcctccacgaggatgagcgaccgcggggcggtgtccaggagcagggcgcggaggtcgtcgcagccgccgcgggacaggtccacgtcgtagacgtcgtaccccaggaacctcgccatcgcggcggcgaacgtggacttgcccgtgccgggagcgccgtacagcaggtagctcctgcgccagacgcggccgaggcggtggtagtacgcgcggcccttgaggaagctctccaggtcggcgcggacgcgggccttgaggtcggggtccatggccaccgtgtcgagcgtggccgggtgcgtgaagggcgcggacgcccaccgcggcgcgccaccgccggcgttggcgtggacccgcagctcgcggcggcgcgcctccatctcgtcggcgacggactcgaggtgctgcaggtagggccgcagcacgcgggtgcggtcgtggcggcgcacgcggagcacgaggcggccgtcgccgccggcgttggtccacgcgaggcgcgcgccgaggaacgcgtcccgcgcggtgtggcccggccccagctgcagcgcgaagtcgttgctcttggccgccgacgacagcacgcaggcggcgtccgcgtcctcgagcgacggcagcgacgccacgtacgccgccgccttccggaacagcgggttctccgcgccgtcgacggcgaggcgcggcacctcgtagtactggtacgcctgcgcccactcgtccgcccaccgccacgcccgccgcaccgcgtgcgccgccgacttgtacgacagcaccagacgcagcgccagcaccgccagcgcggcgtagagcagggccccgatcacccctccgccgacgccgtcctgccccatcatcgccgttggcagttgctgcctccctccttgcttttgatctggtcacgtcggttcgtgtgtttcggcgagcagaggagattgttggatgggggcaggggggtgggttttatgggcggccaggcccgcgacggcgtctctcgagagtcgagacggggaaggaaaggggaactcgtgcggactcggggtcggggatcg

SEQ ID NO: 130224 - DNA, 946 bp, Zea Mays
atgctctttcagtgtaatgctaatcagctgaaggaactatgcaatagttcagtatcatcttcagtattaattccccaccttaacaaccttgtgcaacagactatgtttcagcaggatctaatcatgaacctacttagtaacttgcaacaaagtgagaaagttgatggaacacaaccaataatatcttctcaagtccgaacaatggagaatgataaagtagctgatacagttaactctgtgaaggaacggtcattacttgttaaaatttcagagttgcagtctaggatgataatactgactgatgaattaattgcagctaagctaaaacatgttcagttgcagcaagagctaaatgcactgtactgccgagaagaaattgtggatatcagggatgaggataacgaagaaacataatgaggatccatgccgtatgaattatccgcctctctctgagatgcataaattacctgcctctccctgaggtcaatggagaacaggagaaggaaagcggcggggagaacaagagaagaaaagtggaggtgccgcaaatatttgctggatctagagagtagctgcggttgtgttttttttctttgaaggttgtcttccccttgcttgctgtcatcagtcatcagtgtgtataaccgtctctttttcagtagttcgaggtttttttttgggtgactacaagatgaggcgtggtcatgctgctatttttctgtcatccccatcattggaagtagctgtgattatgtagtacgtaggctaccggggtggttaatctatgtagaattgcaggtgactgcataataaattgtattttatgtagcaataggatgtatattaaatattggcgcattcgttgatataatatcatatagggctatttgcaaacatccaaacaaggttgtttgcatatatctaataataaagtatgtatctactc

SEQ ID NO: 130225 - DNA, 525 bp, Zea Mays
atggcgtcggcggccagggcaaaggaagggccggggaagctgggagccacgggaaaagcgggttatgtagattcatcaggcgataagtccaaacgaagtgtagtagagattaaaggtcgcttctcagtgacatctgagaatgtcgatcttgcaaaggttcaggaaggtccacttagtagtctctcccggaaatcaccagagggttcactgttaagaaaatctgccagcactggtgattattttgttaatcctaagctgatggcagtggctgggagtagggaggcacatatatcaccattttcatggttggggcggaggaaactcggagtaatcaatggggactggggaatgttgaagttgaaggaggctgaaaggcatgatcttaatattaagagaaaaaaagatctcttagaagaccaaatacaagacgtcatgaaggcggcccataaatcacaggccaccaccagcggccccacacacaacccagagatccaccaacaaacacctaagaagcctaaggcctaa

SEQ ID NO: 130226 - DNA, 1872 bp, Zea Mays
ctcctctctcttgccgtccacgctcgactgcgcgagacactggtcaacgcccgggtggcaggcggctctggtggtgtgttgtgtgtgtggtggtggggtcgggtgagtctagctccgtcgcttgcgccggaagaacttgtcgggagctgtctctagccctcgggttccatggggaggaacggtagcgtgaagcgctcggcgtcttcgagcgctgcgggtgctgctgcggggccgccgtccttctctgtgaatcccgccgactaccggttgatggaggaggtggggtacggtgcgcacgccgtcgtgtaccgcgcgatcttcctgccgaccgaggatgttgtggctgtcaagtgcctggatctcgatcagctcaataacaacatcgatgaaatacaaagggaggctcaaataatgagcttgatagatcatcctaatgtaatcagggcttactgctcatttgttgtagagcacagcctctgggtgataatgccattcatgacagagggttcttgtttacacttaatgaagatctcataccaagaaggttttgatgagccggtcattggctccattctaaaggaaactcttaaggctctggaataccttcaccggcagggtcaaatacatcgtgatgttaaggctggtaatatccttattgatggtgctggggtagtgaagcttggagactttggtgtttctgcttgtatgtttgatagaggtgacaggcaaagatctaggaatacatttgtaggaacaccatgctggatggctccagaagtgctccaacctggcactggatataatttcaaagctgacatatggtcatttggaatcactgctcttgaactagcacatggccatgctccattttcgaaatacccccctatgaaggttcttctcatgacactccagaatgcaccacctggtcttgattatgaacgtgacagaagattctcgaagtcatttaaagagatggttgcaatgtgcttggtcaaagatcaaacaaagagaccaacagctgagaagttgctaaagcattcatttttcaaaaatgcaaagcctccggagttgactattaagaatatcttatctggtttacctcctctctgggaccgtgtaaaggctctccagcttaaagatgcagcacaattggctttgaagaaaatgccttcttctgaacaggaggctctctccctgagtgaatatcaacgcggtgttagtgcatggaacttcgatatcgaggatctcaaggctcaagcatcattgattcatgatgacgagccaccagaaataaaagaagatgatgacattccaagaaacattgaggatttatcttcacggaaccatttggcaaagtcatctgcaaatgaatgcaactccagccagcgagcttttgccaccactttaaattcggatggaaacagccccaccatgaacgaagcttttgattttgatattagcgatgctgacactacaagaagggctgatggatatgaaagcaacacaaggcagaatgattcgttgccctctacatcaaagagagatccagagtcgaatcattgggcaagtgatggccagagacaactgacttctggtgggaacaatagctcaacatctgaaaggggctatggttttgagaggcaaaaactttgggcatggttaatggattgtcaatatttagttatgctgagtgcttattactgttcggggtatgacagggatgcatctgtgcaaatgatatctgacaaacaaagaagtgagatgagaaaaacagcaagccttagtggtccactttcactgccaactcgtgcttctgcaaatagtctgtcagctcctattcgatcttcaggaggcagtcttgcactgctgtag

SEQ ID NO: 130227 - DNA, 613 bp, Zea Mays
ctcctctctcttgccgtccacgctcgactgcgcgagacactggtcaacgcccgggtggcaggcggctctggtggtgtgttgtgtgtgtggtggtggggtcgggtgagtctagctccgtcgcttgcgccggaagaacttgtcgggagctgtctctagccctcgggttccatggggaggaacggtagcgtgaagcgctcggcgtcttcgagcgctgcgggtgctgctgcggggccgccgtccttctctgtgaatcccgccgactaccggttgatggaggaggtggggtacggtgcgcacgccgtcgtgtaccgcgcgatcttcctgccgaccgaggatgttgtggctgtcaagtgcctggatctcgatcagctcaataacaacatcccaggcacagaggcacttcatggtcacattcacatgcagatcatgttctggaactaatgtgtcatagttctccatgttatccacattttgtgtctgttgctactcttattcatctctagcaccttgtggcagctcttttttttttattttttttttcattttttgaaactttctctgtggcaatgtaattgtaacatagctttgaagtggcatcctccctttactctaa

SEQ ID NO: 130228 - DNA, 1823 bp, Zea Mays
gaattcggaatatgggaaagttgctccgggttgggggactactccttttatgggggtcgcaatggctttattcgcgatattcctatctataattttagaaatttataattcttctgttttactggacggaattttaacgaattaggtttctactaactaaaactatgacttcatagtttttccatccaaaaaaagcctttctactttaagctccacatttctagacattctggtagttcgaccgtggatttttttgttttggtatctctggaatatgagtgtgtgacttgttagaattgatcctattgataatacatagaaggggcctgttatctctatcaagatgattctaattcgtcagatattatttattctagtatctggaacacgaaatacatagagtggatcaaaaaaaaaaggaactatgattcatactcactatttagacctcgcaaccagacttaaaaaaaaaatgaagtagttcttaataaaaaaagaaattttcttccttccaattttgtttgcccaaaagagaactcttttctctttcaataaatgatcatcaagcggttcttattcgaagaacccttgccttttgtttatcttgagactgaatcatcgtggctctagtatgaatctaaggttttaattgaactgattcataggatcgcaacaagataatttctatcagaaaaccactagaaattttgattttattttttgactagtcaaaaaataaaatcaataaaaaatagggaagagaaaagtcaagaggcctctaatgatcaacataagggaaagaaagacagatgagccaacttgagattttttggcattattatcacaaagaagaaattctggatttttcttatttcatatcttcaaggcaaatcgatccaataccgtggctgatggagttttgaaccctttttttctaatatccgttgaaaatttgtgtatttctgcttgagccgtacgagatgaaattttcatatacggttctcggagggggagtcgggctagttacctatctcaataaagtatatgattggtttgaagaacgtcttgagattcaggcaattgcagatgatataactagtaaatatgttcctcctcatgtcaacatattttattgtttagggggaattacacttacttgttttctagtacaagtcgctaccggttttgctatgactttttactaccgaccgaccgttacagaggctttttcctccgttcaatatataatgacggaggccaactttggttggttaatccgatcggttcatcgatggtcagcaagtatgatggttctaatgatgatcctgcacgtatttcgtgtgtatctcacaggtggatttaaaaaaccccgtgaattaacttgggtcacaggcgtggttttggctgtattgactgcatcatttggtgtaactggttattctttgccttgggatcaaattggttattgggcagtcaaaattgttacaggtgtacccgaagctattccggtaatagggtcccctttagtggaattattacgtggaagtgctagtgtgggccaatccactttgactcgtttttatagtttacatacctttgtactacctctgcttactgccgtatttatgttaatgcactttccaatgatacgtaagcaaggtatttcgggtccgttatagggaaggcatagcatagagaattctaattctcatatatcatatcgggtaggttgtggtatttcattgctacaaacatgggttattgtaaaataagacatgtcatttggatacttctcttcaacttcgaagtatttttatacaaat

SEQ ID NO: 130229 - DNA, 429 bp, Zea Mays
cgtaaagctgctagctgcctgtctcgctgttcctgatacccagcaagccgttgtgctcggcatactttctccatgtggttctctcgcttcgtcggctttccgcgtgttagagcaggtatggttcggatatatacgtaaatgcgggagaaatttctagaaaaatgggcatctaatgtgttcgtgtaaaataaagttgcttagcatgttttggatggttagatgagttctaaggataagtagctccctggtagttatggcttgtggtgatagctggtaattgtaattttgtaatgcttcataataccttccttgctagtagcatatacaccgacattcataatcatggcatttcatgtagagtacccagaagaagtgatttgtgaaggagcatgttccagttctactgatccagtggtggattccatctaa

SEQ ID NO: 130230 - DNA, 112 bp, Zea Mays
tttttttacattttaaacaacatatggaacatgaagacaagaaaggccttgtcatatactaccgaggccttgttttaccaactctaacctggagtagccacaatgagccaga

SEQ ID NO: 130231 - DNA, 2084 bp, Zea Mays
cgcgaacgcgacgtccgtccacctcggcccccgctggtttgcgttcgcgcagtgactgaccacgcggccgtgcgggcgcgagacgggaccagtgagtcagtgaccaccacgcgctcgtggctaccggcttcgctcccagatcccgccgcgcgcgcgagccccgaggactgaccatggaggagcccacggagtccaggccagctggcgcggaggatctcgcgaacggcgcgaaagacccggaggggcctccgccggaggttgaggaggaggaagtggaggagccgccacgatcggcgacggcgaagcaggaggaggcgaaggaggtactagggtcggaggggtctcgcccgttcaccatgcgggagctgctcggcgaactcagggaggacggcgagacggcggtcggcggcagcaccgcgagatctgcgttcggcgacgggaacggggtcggatccgctgatgccgagggctcgtcctacagccaagatagcgcacagttttcatcacaccatgatgtagcgatggacttgataaatagtgtaactggagttgacgaggaaggacgttctcgccaaaggattctttcttttgctgctaaaagatacgtaaatgcaattgaaagtaatcctgacgaccctgatgcatattataattgggctctagtcctccaggagagcgcagacaatgtggatcccaattcgagttcctctaaagatgcattgctggaggaggcttgcaaaaagtatgctgaagctactcgacttagtccaactctttatgatgcatattataactgggctattgctattgctgatcgggctaaaatgcgaggtcggacaaaagaagccgaagaactctggaagcaggcaatactgaattatgagaaggctgtccagcttaattggaatagcccacaggctctcaataactggggtcttgggctacaggagctgagtgcaattgttcctgcccgggataaacagaccatcataaaaacagctatcagtaagttccgtgctgcaattcagctgcaatttgatttccatcgggcaatatacaacctcggaactgtcttgtatggtttagctgaggataccatgagatctgggaagccagatgtctccccaaatgagctttacagtcagtctgctatctatgttgcagctgctcatgctctgaagccaaattactcggtctatcgtagtgccttgcgactagtccgctcaatgttgcctctgccatatctcaaagtggggtatttgactgctcctccagctaacaattccatcgcaccacacggggattgggaggtatcacagttcattttgaatcatgagggcctccagcaggctgatgcttctgaccagcctccatcgcaatcccctgggcatttggacaggggcagaaagcctgtcagaataaacgttgcagatattgtttcagtgtcagcatgtgccgatttaactttaccaagtggtgctggcctctgtatagaaactattcatggtcctacgttcttggttgcccatagttgggaggctcttgacggctggctagatgccatacgccttgtctacactatttttgcgagagggaagagcgatgtgcttgccggtattattactggttaaatggcttgctgcaggagggaagagcgatgaactagccgggtgttgttactgccactggagaggcgcgaagttttggtgattcagcgtcagccttatcagttaaatgcccccttcgatttgttagtatgcctcccatctgtgatgtcagtcttcctagatatagggtatatcaatcatatattcggttgtaactcgtactttccagtgattggcgataggtccgttttttctttgtaaaagtggccgtgttactgtattatgcattcacagcatatgtatcggacattctttaagtttgattatatttctctgtaacaatgaatcgaggcaagatgggctctggccctgctgggctccacctccaatatgtagagccgaggaacaggagggaaagaacaatgatatactccctcattccaaattataatgtgtttttgtttgcttttctagaca

SEQ ID NO: 130232 - DNA, 1340 bp, Zea Mays
cgcgaacgcgacgtccgtccacctcggcccccgctggtttgcgttcgcgcagtgactgaccacgcggccgtgcgggcgcgagacgggaccagtgagtcagtgaccaccacgcgctcgtggctaccggcttcgctcccagatcccgccgcgcgcgcgagccccgaggactgaccatggaggagcccacggagtccaggccagctggcgcggaggatctcgcgaacggcgcgaaagacccggaggggcctccgccggaggttgaggaggaggaagtggaggagccgccacgatcggcgacggcgaagcaggaggaggcgaaggaggtactagggtcggaggggtctcgcccgttcaccatgcgggagctgctcggcgaactcagggaggacggcgagacggcggtcggcggcagcaccgcgagatctgcgttcggcgacgggaacggggtcggatccgctgatgccgagggctcgtcctacagccaagatagcgcacagttttcatcacaccatgatgtagcgatggacttgataaatagtgtaactggagttgacgaggaaggacgttctcgccaaaggattctttcttttgctgctaaaagatacgtaaatgcaattgaaagtaatcctgacgaccctgatgcatattataattgggctctagtcctccaggagagcgcagacaatgtggatcccaattcgagttcctctaaagatgcattgctggaggaggcttgcaaaaagtatgctgaagctactcgacttagtccaactctttatgatgcatattataactgggctattgctattgctgatcgggctaaaatgcgaggtcggacaaaagaagccgaagaactctggaagcaggcaatactgaattatgagaaggctgtccagcttaattggaatagcccacaggctctcaataactggggtcttgggctacaggagctgagtgcaattgttcctgcccgggataaacagaccatcataaaaacagctatcagtaagttccgtgctgcaattcagctgcaatttgatttccatcgggcaatatacaacctcggaactgtcttgtatggtttagctgaggataccatgagatctgggaagccagatgtctccccaaatgagctttacagtcagtctgctatctatgttgcagctgctcatgctctgaagccaaattactcggtctatcgtagtgccttgcgactagtccgctcaatggtataattcattttttaatgaactgtgttagtttattctgtttgatattgttacctaatagtattagaccaaaggctttatcgttgaaagctacctagcaatgattaaaag

SEQ ID NO: 130233 - DNA, 194 bp, Zea Mays
cttccttgaagttcggttaactatttgtttgagttccacctgcctatgatagtatgaatctgcaatgcaggagctgagtgcaattgttcctgcccgggataaacagaccatcataaaaacagctatcagtaaggtagatacacttttttattgttgtgcctatgaattatttttatggtattgcttagtaaaaa

SEQ ID NO: 130234 - DNA, 141 bp, Zea Mays
gaatttttattagccagtgttgctgctttcttaatttccttccttttcgattgcaggctctcaataactggggtcttgggctacaggagctgagtgcaattgttcctgcccgggataaacagaccatcataaaaacagcta

SEQ ID NO: 130235 - DNA, 649 bp, Zea Mays
gtgcggttcatggcgcgggagatccacatcctccggcggctggaccaccccaacgtgatcaggctggagggcatcgtcacctcgcacctctcgcacagcctctacctcgtcttcgagtacatggagcacgacctcgccggcctcgctgcgctgtccggccagcgcttcacggagccgcatgtcaagtgtctcatgcgccagatcctcgagggcctgagccactgccacgcgcggggcgtcctgcaccgggacatcaagggctccaacctcctcatcgacgacaacggcctgctccagatcgccgacttcgggctcgccaccttcttcgaccctggcaagcggtagcccatgaccagccgcgtcgtcacgctctggtaccgcccgccggagctcctgctcggcgcaaccgagtacggcgtcgccgtagacctgtggagcaccggctgcatccttgccgagctgctcgcgggcaagcccatcatgcccggccagaccgaggttcgtctaatcgtcgtgggcgtgcgcttcgccttcttctgatttccttctcaacctgcctgagcctgacatgacatgcccacatgcataacgaccgcaccattaaccacgacggagcggaacggagcgagggcaagtgcctaacggagcg

SEQ ID NO: 130236 - DNA, 2341 bp, Zea Mays
cacgtagccacgcaccacttcctcgaaatctctgtgatgcgtcacctgacagcaaaaaggaagagtaacagggaggccggaatctttcgatcgagggcaccaccggcggcgggggtagtagcacaggaggggagccgtggagcgatccgtcgggcatctgcgcccgatgtgggcgtggggctgcgtcgagcgcgtggccgcgggcttcctcggcggccccctcgccgccggcggccgctggaacaccgccgtcgccgtcggggtcacggccgccgcgggcctcgtgctcgtcgccatcgtcgtctcttcccgcagaggcgggctcaaatctccgtggtggcggcggcggaggaaggcgccacttacggcgcaagagtggtgcgacctgttcacaccgcaggggaagcttcaggacggcggagtgaagcttctgaagaaagttcggagcggagggattgaaccgagtatcagagcgcaagtctggccgttccttctgggagtttatagccttgacagttctgaagcacaaagagatgtggtcaaggcccagaacaggaagggatatttgttattgaggaaacattgcctgcgtaaattagcatacatcatggaagagagcaagcagtcaactaaaacagttaaagtcaaccatgaagggagcaatagttctgaaaaaggtgatgaatctggttgtgttagtccttttgaatctgaagatgttcttgaaaattctggcatgggagaggctacaactgaggaaggaattccatgcctcagtacagagcaagaagtgcaggatgacacttctgaaacaaagccagagcagatgaatggaaaccagtcttcatctagctcctctgatgaggaagggagtgaaagaagtgttgtgactcaagtagaagcatctcataagaacttggcctcagtttgtgagtcctcatttgaggatggacaagaaagcatcccaagatattcgaacacaggaggaaatatggatgatgttgtgttatctaaggctgcccgccctgtgaagtctgcacgggcaactgaggattttgagacatggcaacggattatccgtttggacgcagtccgtgctaacgacgaatggatttcctactctccatcccaagctgcagtttccaaggagagggcaattgaatctgctaaagctgtttttctcaaagactatgaccacttagaaccatatcggatccatcatgcgtcacgccttgttgctattcttgaggcctacgcaatatatgaccaagaaattggatattgtcaaggaatgagtgacctgcttgcgcctctccttgctgttctagaggacgatgacgaggccttctggtgctttgctggttttatgaggaaagcccgccacaactttaggcttgatgaagtgggtatacgccggcaactcaatatggttgccaggataatcaaatacaaggacttccatctctacagacatttggagatgctccaagctgaagactgctttttcgtttacagaatggtggttgtgatgttccggagggaactcaccttcgagcagaccctatgtctctgggaggtgatgtgggctgatcaggcagcaaaccgcgccgagatcgcaaactcatcctggcgtaaattgcagttgggagcgcctccaacagatgatctgttactgtatgcgattgctgctagtgtgttgcagaagcggaaactgataatagaaagctacaacagcatggatgagatcataagggagtgtaacagcatggctgggcagctggacatttggaagctcctggacgatgcgcacgatcttgtggtgacccttcacgataggatcgagtagctgtggtgttcattgcttgcgctatttgtcacgttaccatacttccattatacccaaacactttgtatgaagtacgtaccaacagtgaatagaagcacgttgtggagttagctaggcagcaatggcagcatttgtttttaactgagcatgcatactggagaggtgggcaaagaccaaaggagcatgcatactggagaggtgggcaaaagatcaaagagccatttgaatctatcgttgtgacattgtctaccattctgatgcattgcaaccttctctttctgttgtatcctagttacatactgcactattatgtggatgttgtgttgggggctcggtgcaaattggtggatttcaggatctgttcttgttagactgcactgttttataaagtagcgtttgaaataaatgatgagatgagtaacactattgtagatagccttagagaacgttttcgctatctggattacgtacacacacgcacaaaaaaaaaaacaa

SEQ ID NO: 130237 - DNA, 2110 bp, Zea Mays
cacgtagccacgcaccacttcctcgaaatctctgtgatgcgtcacctgacagcaaaaaggaagagtaacagggaggccggaatctttcgatcgagggcaccaccggcggcgggggtagtagcacaggaggggagccgtggagcgatccgtcgggcatctgcgcccgatgtgggcgtggggctgcgtcgagcgcgtggccgcgggcttcctcggcggccccctcgccgccggcggccgctggaacaccgccgtcgccgtcggggtcacggccgccgcgggcctcgtgctcgtcgccatcgtcgtctcttcccgcagaggcgggctcaaatctccgtggtggcggcggcggaggaaggcgccacttacggcgcaagagtggtgcgacctgttcacaccgcaggggaagcttcaggacggcggagtgaagcttctgaagaaagttcggagcggagggattgaaccgagtatcagagcgcaagtctggccgttccttctgggagtttctgaagcacaaagagatgtggtcaaggcccagaacaggaagggatatttgttattgaggaaacattgcctgcgtaaattagcatacatcatggaagagagcaagcagtcaactaaaacagttaaagtcaaccatgaagggagcaatagttctgaaaaaggtgatgaatctggttgtgttagtccttttgaatctgaagatgttcttgaaaattctggcatgggagaggctacaactgaggaaggaattccatgcctcagtacagagcaagaagtgcaggatgacacttctgaaacaaagccagagcagatgaatggaaaccagtcttcatctagctcctctgatgaggaagggagtgaaagaagtgttgtgactcaagtagaagcatctcataagaacttggcctcagtttgtgagtcctcatttgaggatggacaagaaagcatcccaagatattcgaacacaggaggaaatatggatgatgttgtgttatctaaggctgcccgccctgtgaagtctgcacgggcaactgaggattttgagacatggcaacggattatccgtttggacgcagtccgtgctaacgacgaatggatttcctactctccatcccaagctgcagtttccaaggagagggcaattgaatctgctaaagctgtttttctcaaagactatgaccacttagaaccatatcggatccatcatgcgtcacgccttgttgctattcttgaggcctacgcaatatatgaccaagaaattggatattgtcaaggaatgagtgacctgcttgcgcctctccttgctgttctagaggacgatgacgaggccttctggtgctttgctggttttatgaggaaagcccgccacaactttaggcttgatgaagtgggtatacgccggcaactcaatatggttgccaggataatcaaatacaaggacttccatctctacagacatttggagatgctccaagctgaagactgctttttcgtttacagaatggtggttgtgatgttccggagggaactcaccttcgagcagaccctatgtctctgggaggtgatgtgggctgatcaggcagcaaaccgcgccgagatcgcaaactcatcctggcgtaaattgcagttgggagcgcctccaacagatgatctgttactgtatgcgattgctgctagtgtgttgcagaagcggaaactgataatagaaagctacaacagcatggatgagatcataagggagtgtaacagcatggctgggcagctggacatttggaagctcctggacgatgcgcacgatcttgtggtgacccttcacgataggatcgagtagctgtggtgttcattgcttgcgctatttgtcacgttaccatacttccattatacccaaacactttgtatgaagtacgtaccaacagtgaatagaagcacgttgtggagttagctaggcagcaatggcagcatttgtttttaactgagcatgcatactggagaggtgggcaaagaccaaaggagcatgcatactggagaggtgggcaaaagatcaaagagccatttgaatctatcgttgtgacattgtctaccattctgatgcattgcaaccttctctttc

SEQ ID NO: 130238 - DNA, 580 bp, Zea Mays
cacgtagccacgcaccacttcctcgaaatctctgtgatgcgtcacctgacagcaaaaaggaagagtaacagggaggccggaatctttcgatcgagggcaccaccggcggcgggggtagtagcacaggaggggagccgtggagcgatccgtcgggcatctgcgcccgatgtgggcgtggggctgcgtcgagcgcgtggccgcgggcttcctcggcggccccctcgccgccggcggccgctggaacaccgccgtcgccgtcggggtcacggccgccgcgggcctcgtgctcgtcgccatcgtcgtctcttcccgcagaggcgggctcaaatctccgtggtggcggcggcggaggaaggcgccacttacggcgcaagagtggtgcgacctgttcacaccgcaggggaagcttcaggacggcggagtgaagcttctgaagaaagttcggagcggagggattgaaccgagtatcagagcgcaagtctggccgttccttctgggagtgtaagtaatctggagtgttgatcacgaaaccgttgttttcatgcttggagatgtacaattagatccacacgatactttg

SEQ ID NO: 130239 - DNA, 226 bp, Zea Mays
cgcggtgcctccatcccgccatcaccggccaactatgtgcgccgcctacatcccaccatcactggccttccccaagcgccgaccttccaccaagatgtctacccttccccaccagctcggctaaacatttgccccaaatcaatcagccaacattctcgcgcagccacaaatcctgcatcccacaataggcccgcaatcccacgcgtcatggaactcccattagcat

SEQ ID NO: 130240 - DNA, 398 bp, Zea Mays
tttctaaaccacaacatggtcactatttcagttattagtagttgtacgcaaaggtttattttagttcaaacatacttgtggacactacattatttcatccaatcagtgaactttataggtcttagttttatttttgttatattttgttgtgttgatatatgttgcttctcactttgatgcatgtggctgatgtgcttggtaaggtttaatactcatatctattatcgtttgaaacttgaaagcatggcattcatctacttgtgagcttttatgataacagtgaaagttggttttattgcaattggaatgaacatgacaaaagagaggtgtaacagaagaaacaaaattgtatgtaggtaaatacccgtgcgttgcaatagggaaaaaatagtgtaaat

SEQ ID NO: 130241 - DNA, 1398 bp, Zea Mays
atggtgctgtgggtcttcggctacggctccctcatctggaaccccggcttcgacttcgacgacaaaatcctcggcttcatcaagggctacaaccgcacctttaatctcgcttgcattgaccacagaggcacaccggagcatccggcgaggacctgcacgcttgaaaccgacgacgaggccatatgccatctttgcatgcccccctttatttacacggtgacacagtgttacatgggcaagttaactttttttgcagtggggaattgcatattgtgtcaagggtggtccagaaaaagagctaaaagcaattacttggagagaagagagtgtgagtacgaccagaagatatccattgatttctacaaggaaggagatcccttgaaaccagctgtgacgggcgtcttagtgttcatttccactccagatccaattggcaacaagtactatcttggccctgctcctttgcaggatatggcaaggcaaattgctacagccaatggccctactggctataatagggattacctgttctcaatggagaaggcattagccatcattagccacgaagatgattcgatcctagagcttgcaaacgaggtgaggaaggtgctcaacagaacaaaggagaccaagatcactgaaagattatgttcccctgaatataaatcactgagagtttattgttcctggcgatgcagggtgcgtgaactcttctactacctcaagggtgagcaggtggactatggcgaggagcacagcaaggcttgtggccacaacaggtttgggagaatatatcacacagggcactatcctgtttgttacgagcacaacccagtgcattttgtggggcactctgttggcacacaggttgtgagggtgctgcatcagatgcttgccgacaagctaattgcacttgatatgggtgcattaattgctggtgccaaatatcatggagagtttgaggacagacccaaggctgttctcaaagaagttacatattctgatgggcagaccattcttttcattgatgagattcacaaattgcaaatgccatggctgcaaaaagcaaagttgctattgcgggagctgaaaactgtgaaggcagatttatcttttgcaaaggaacgctatgctcagcttgaagaagagaataaaatgttgcgtgagagttatgacatgggtgataatccagaagctaatgatcaggttatgttcctcaagtttgagcctcgacaatgcatgcttattctggcatcccgatttcttactgctacatttcgccctcttgcagtcaggttacgagcgcctttgctgcctaaggtgcatacaaacgtgaccaaaggaatcaccttgtgtgctctcagtgggcttgagagtagcatcatccttcaaacatga

SEQ ID NO: 130242 - DNA, 1483 bp, Zea Mays
gcggctgaaccagtgccagtcccacccgttcccagaccagcctcacgcgctcaccgtgctgcctccaccaccgatggctctccctcccggcgcaggggcggtggcgccggcgacgcccttcgccgcgaatccgtgccgtctccggcgggcgtctggtcctcctgccgccgcccttcggctcgggccgctcttctggccatgggaaaaggtgaaaatcggtcccctttctgtttcccccatgggttttggaacatgggcatggggaaaccagctactttggggctatcaagaaagcatggacaacgaacttcaggattgcttcaatctggctctaaggaatggcataaacctttttgacactgctgactcttacggaactggaaggctgaacggacagagcgaacggctactcggtaaattcatccttgagtttgaagggaggattaaatctccagatgatgtggtcatagcaactaagtttgctgcatatccttggcgacttacatcggggcagtttgtcagcgcctgtcttctttggaaagattacaacttgataggctcgggatagggcagctgcattggtctactgctaactatgcacccttgcaggagcgtgccctctgggatggactagttgaaatgtatgaaaagggccttgtaagtgctgtcggtgtcagcaattacgggccgaagcagcttctgaagatccacagctatctagcttctagaggagttcccttgagctcagctcaggtgcctgcagggaaacagttggctctgcatgtttatataactcccagttcagtatcgcatcatctgtattctgaaagctcttagtcgtacaggttcagttctcgttactgagcatgggtgacgatcagatggagctgaaaagtgtgtgtgattcattgggcattcgcatcatcgcatatagcccgcttggattaggaatgctcactgggaagtatggtgcttctaacctcccaaaaggaccaaggtcagtgctgttccgacaaatccttcctgggctggagcctctgctgtcttgcctgagaaggattgccgaaaagaaggggaagaccatgcctcaggtggccatcaactggtgcatgtgcaagggcacagttcctatcccaggcgtcaaaacggtgaggcatgtccaggagaacctgggcgcgctcggctggaggctgagttctgccgagatctcggagctcgagtccgcagcgatggcggctccgaggaagatgatccagaatgtcttccagactgcctgaccgtgctgaatacatgtgtgtgtatgcatgtttctgcaatcgtctttactgaaaaatctgaaaccgggcagccgtgaaccttttcttctcgtaagattcataatatagatagtcactgccatgttctattagttgtcgtttttgacaaagtttaaataaaacttataaaattttgactataaataaatgttttattatttagtttg

SEQ ID NO: 130243 - DNA, 1395 bp, Zea Mays
gcggctgaaccagtgccagtcccacccgttcccagaccagcctcacgcgctcaccgtgctgcctccaccaccgatggctctccctcccggcgcaggggcggtggcgccggcgacgcccttcgccgcgaatccgtgccgtctccggcgggcgtctggtcctcctgccgccgcccttcggctcgggccgctcttctggccatgggaaaaggtgaaaatcggtcccctttctgtttcccccatgggttttggaacatgggcatggggaaaccagctactttggggctatcaagaaagcatggacaacgaacttcaggattgcttcaatctggctctaaggaatggcataaacctttttgacactgctgactcttacggaactggaaggctgaacggacagagcgaacggctactcggtaaattcatccttgagtttgaagggaggattaaatctccagatgatgtggtcatagcaactaagtttgctgcatatccttggcgacttacatcggggcagtttgtcagcgcctgcaagtcttctttggaaagattacaacttgataggctcgggatagggcagctgcattggtctactgctaactatgcacccttgcaggagcgtgccctctgggatggactagttgaaatgtatgaaaagggccttgtaagtgctgtcggtgtcagcaattacgggccgaagcagcttctgaagatccacagctatctagcttctagaggagttcccttgagctcagctcaggttcagttctcgttactgagcatgggtgacgatcagatggagctgaaaagtgtgtgtgattcattgggcattcgcatcatcgcatatagcccgcttggattaggaatgctcactgggaagtatggtgcttctaacctcccaaaaggaccaaggtcagtgctgttccgacaaatccttcctgggctggagcctctgctgtcttgcctgagaaggattgccgaaaagaaggggaagaccatgcctcaggtggccatcaactggtgcatgtgcaagggcacagttcctatcccaggcgtcaaaacggtgaggcatgtccaggagaacctgggcgcgctcggctggaggctgagttctgccgagatctcggagctcgagtccgcagcgatggcggctccgaggaagatgatccagaatgtcttccagactgcctgaccgtgctgaatacatgtgtgtgtatgcatgtttctgcaatcgtctttactgaaaaatctgaaaccgggcagccgtgaaccttttcttctcgtaagattcataatatagatagtcactgccatgttctattagttgtcgtttttgacaaagtttaaataaaacttataaaattttgactataaataaatgttttattatttagtttg

SEQ ID NO: 130244 - DNA, 1509 bp, Zea Mays
gcggctgaaccagtgccagtcccacccgttcccagaccagcctcacgcgctcaccgtgctgcctccaccaccgatggctctccctcccggcgcaggggcggtggcgccggcgacgcccttcgccgcgaatccgtgccgtctccggcgggcgtctggtcctcctgccgccgcccttcggctcgggccgctcttctggccatgggaaaaggtgaaaatcggtcccctttctgtttcccccatgggttttggaacatgggcatggggaaaccagctactttggggctatcaagaaagcatggacaacgaacttcaggattgcttcaatctggctctaaggaatggcataaacctttttgacactgctgactcttacggaactggaaggctgaacggacagagcgaacggctactcggtaaattcatccttgagtttgaagggaggattaaatctccagatgatgtggtcatagcaactaagtttgctgcatatccttggcgacttacatcggggcagtttgtcagcgcctgcaagtcttctttggaaagattacaacttgataggctcgggatagggcagctgcattggtctactgctaactatgcacccttgcaggagcgtgccctctgggatggactagttgaaatgtatgaaaagggccttgtaagtgctgtcggtgtcagcaattacgggccgaagcagcttctgaagatccacagctatctagcttctagaggagttcccttgagctcagctcaggttcagttctcgttactgagcatgggtgacgatcagatggagctgaaaagtgtgtgtgattcattgggcattcgcatcatcgcatatagcccgcttggattaggaatgctcactgggaagtatggtgcttctaacctcccaaaaggaccaaggtcagtgctgttccgacaaatccttcctgggctggagcctctgctgtcttgcctgagaaggattgccgaaaagaaggggaagaccatgcctcaggtaagtgcttaccgagcgcagaacggcttgctgaaacgattctatgatcgcaccagcctaccagcacgtcgcaactacgatgcgcgatcgtcgaagtgttcctcgtgattcaaagatgatgccccgtactaccaacgcaggtggccatcaactggtgcatgtgcaagggcacagttcctatcccaggcgtcaaaacggtgaggcatgtccaggagaacctgggcgcgctcggctggaggctgagttctgccgagatctcggagctcgagtccgcagcgatggcggctccgaggaagatgatccagaatgtcttccagactgcctgaccgtgctgaatacatgtgtgtgtatgcatgtttctgcaatcgtctttactgaaaaatctgaaaccgggcagccgtgaaccttttcttctcgtaagattcataatatagatagtcactgccatgttctattagttgtcgtttttgacaaagtttaaataaaacttataaaattttgactat

SEQ ID NO: 130245 - DNA, 1071 bp, Zea Mays
gcaaagaaatagagatgagctagagggggccggggccgggagagccaagggcccgagggagatggagaaagatgtgaagctatttgcttctgagtggaatgttgtctggttcaaggtcttttgctttgtgatccatctgtgtagagcttctaagtattccttggatctgcaagatctcggaccaggcttcattcccctcagaaatagcttcaaaaatgatatcgcggagagttaggagagctactagctagtgtataaatttgttctagttttttttttgaaatatttgtttgagtgttcgtgagattcctggccgttcttagtagtatgcatggtgtggagcaccgtacttccgctcctggatctttactactactccactgtgcttttttgtttgtttgtttgcttgcttgcttgctgcgaaatcgaggagcagcgcaagattggtgtaatgatggcctgccttttgacccctcctttctctgtgcatctctgtgcatctggcaggcatgcagcaggtgatgaaagttcccatcattacctcttgattgggagaatcttcgctttctctctctcggcttcttcttcttcgtgttcattttttttcctcctctccgttgtctctctttgtttgcagcatatggctttgctggtacggtgctcagattgtttccaagaacatggcattcacaaagctggtgcaaagctttacatctgcatcgatctgatgactatatatatattcttgttttcagatatctgttgcttatttctaagttcgaggatagtttttgcgtggtgcgctggacctgctgcttcaaagtttttggagagcttgggacgagatccactatttataggcgtgtattttcttcatattatgttgacacccatggaggttgatgtaaacaacgggagctcatgcatgcatgtattcctagagccaacaataataacatgatatataacatcgatgtataataaatataatgctccacatcaggtgtgtgtttgttcttctcatcaggcgtttctgatacatgaggtatacctgttgcctattgatgcaaa

SEQ ID NO: 130246 - DNA, 107 bp, Zea Mays
gtgggtccatctgggtctataaaatataggtctgataattttacaaacatgtttcttgctgatggcaaatatcagaatctctcgggaaaaaatatagataagtttac

SEQ ID NO: 130247 - DNA, 471 bp, Zea Mays
atgcttgggatacgcgtgtggatggatcgatcactggaccatgcccaagaaagatccggctgttgttgtcggggccgcagccgtgctgggcgcggtggtgccgggcgggttgccaccaccggcgccggcgttcgacctgacaacgttcggatgctgatggtggtgctggaactggatctcgtactgcattttgttgccggcgtcatcttcgtcgttatcgttctcatcgtagtcgtcttcatcgtcgtcgtcgtcgtcgtccatattgttgctgcccgcgccgtccattctgttgtagccgcctaccaccgcctgcggctgctgcggctgcctctgctctatcatctccttcatgatttcctctggcttcttcgctgccgaggccgcgccgccgccgaggccgacgaacatgctggctgcagcgctgccgttgctcgcctgcgtttgcatgcccctggagccgtgctctga

SEQ ID NO: 130248 - DNA, 567 bp, Zea Mays
agggcaggaattgtggagggaccaacagtgggcaaaggaaaaaggataccacgtcgagccaatgacgggtcccgacccggcctggacaagaacaaccttggaggtttgctgcagctagcagctgggatggtcctcccaggcacacagcgcagagccagggcagtgctgtctctttcctcccaagaaagaagcttccagatttatctgtgattaacttcgctcttgggtgaaagaggaggatgatgggacagggaggctctgagttgctgggaagctattcatcagttccttcagcggcaagctctaattattcggcgggcttaggacttaggagtcacgtctcggcatgtgattcggtatcggaggtacgcgcgcgagccttctggcttaaccctggcgtgtggtccagcggcacaagccacaagcttctgctagatttgctgttccatctcgcaatcttgaatggctctgcttcatatgttactcgcaagcttgaagagaacaaagccacgaaagaaagaattttttatttgtcgtggtttagtttaaaaaataaactagtggacg

SEQ ID NO: 130249 - DNA, 589 bp, Zea Mays
gccggcggcaaggccgacgctgcttacccgccctcatccggctacccacccgcggcaggtctgcaatgttgccgatgtcgaacccttcagctaatcccacacagcttacaattttctatggtggatcagtatgtgtatgactcggtgccaccagaaaaggctcaggcaatcatgcttatagctgcagctgcggcagctgcggcagccaccaaaggcagtgctgccactgcttttaatcctccaatggtacatacagccactgtcgccccagcagcagtcttctctcctgtgcttacacggtctccatcactgcagagcacttctgtagcagctggacaagctcaggttgttgctgaccctagctcaataagcaagcttcacgctgatctccccattgccaggaggcactctctccagcgcttccttgagaaacgtcgtgacagggtcgtgcgcaaagctccgtatagccccgccaagtcgttcgatggcatggagtcagcgggaatggagatgactgcggacggcaagcagggcgcaaggcccagtatcttgaaaggttggggagccgcgaagtctgaagtctgaacgg

SEQ ID NO: 130250 - DNA, 2103 bp, Zea Mays
aattctcttcaacacgcgcacatgtgacatgccccatggtcgtcgccgctccaggcatcctcccgtggcctcacctccctctcccttcctcctcccacccgtctgacgcctctgacgccgccgcagcagcaacagacgccaacacctccgcgtatgacatccagatcttcgagcccacctccatcgaggagcgtcgtcgcctcctgatccagcggcgtcgcctccgactcgccgcctcccatgcctcgcggctcaccgttgcctcgcgcgtctcctccaaactcatcagcaccactgcctcctgctccagcggcgtcgcatccgatctgccgcctcccctcctcatggctcgtcgttgcctcccgcctcttccccaacctcgcccttgccgcccttggaggatcccaaatccgacgacgagctcagtaggcccacgcagacgcggatgtgctatgaacttcagacaacatattcctaccgagaagtatgaaaagtacacttcagagcatgtcaaggtcctcacgaaagcttcctatcaagtggttgtttgcaagattgacgagttgtaggcaccaaatatatcgagtccttgctatcaacatatgagcatattattgtcaaagtaggcaacatctcatttaacagacaactctccgctctatcattctctcaaggctgatgtgcatttctgatatattgagctcaagcgtcagattctgtatcgatggcaatgggttccagaacagtacacaaggcaatttcaagacggttattcaattgctcaaatagttcagtaagtgagaacaaagaaacttcctaaatgtattaatatggtatgatgaatagtgtctcacacattgtgttgttgagctctggtctccatttccgtgctgctagaatgtgatgtgaagtattcaccttttgacatggataaacatcttctctctgttacatttgcaggcgaaagaaggtctgttgaagcagcctaaactattttcattgtgatttccaacgctacattttccaatatgcctttgtttcatacatttttccttttttcaaataaggctcatgtgctgcttcgaaaatcagttctaagaaggcaaccagggacaacaaacctgataagggaagaaacatgttctggataaatattggcctttgtttcaagactccaagcccgccaccatccagggatcaatcctcaccacgaggaccaggggtgatgccaacaaggtgtacgtgaacctttcctggggtgttgataatttagctctcgcaaacctgttcactgagcaaggaccatctatgacagtgagaacaagtcaagagggtttgattttttgtcatgtatggttccacagaagagcctgagaatgcattatcgaatctcaatggagctatgagttctgaaacccttttttcttccccttgctgctcgcggcatagcatttggaaattgaagtacaatttgtctttcaggatatactgaattgatttatcattgtcctgcaggacttggatgatagatccgtgttacgataccagcatcaaagccgcctagaagcaatactgaactttcacttgagatgtgagtagttgttgttgggggccttcgtcctccgaaggtcctcaaaaacatgatttgacaatgttttccaagtggattatgtgaacaggtaccttcggactcagaattacgaacatgaagtgcggtcaggacgaagcctgaaccagacgaaggacgggctgattaccaagctccacgaaggatggtgcacagccgaagctgtgcgcagggaagcttcgtcgtgatagcagagaggggaaccgacctaaagataaaaagactacgtgggccttgtcagatttccataagtcattgacaaatgtaatggacataaatgtaattttacgtgggctgcgtcccgcgtctataaatagatgaacagtactctcgtactgttcacgcggacttggcatttgcttttgcgtcacgcttgtactttttatcttctctcaggaccgaaggtacatttgtaatttgaaatcatttctatttttccatgttaataaaatagaaatgattctatgatgatgctt

SEQ ID NO: 130251 - DNA, 1811 bp, Zea Mays
aattctcttcaacacgcgcacatgtgacatgccccatggtcgtcgccgctccaggcatcctcccgtggcctcacctccctctcccttcctcctcccacccgtctgacgcctctgacgccgccgcagcagcaacagacgccaacacctccgcgtatgacatccagatcttcgagcccacctccatcgaggagcgtcgtcgcctcctgatccagcggcgtcgcctccgactcgccgcctcccatgcctcgcggctcaccgttgcctcgcgcgtctcctccaaactcatcagcaccactgcctcctgctccagcggcgtcgcatccgatctgccgcctcccctcctcatggctcgtcgttgcctcccgcctcttccccaacctcgcccttgccgcccttggaggatcccaaatccgacgacgagctcagtaggcccacgcagacgcggatgtgctatgaacttcagacaacatattcctaccgagaagtatgaaaagtacacttcagagcatgtcaaggtcctcacgaaagcttcctatcaagtggttgtttgcaagattgacgagttgtaggcaccaaatatatcgagtccttgctatcaacatatgagcatattattgtcaaaattctgtatcgatggcaatgggttccagaacagtacacaaggcaatttcaagacggttattcaattgctcaaatagttcaaatgtgatgtgaagtattcaccttttgacatggataaacatcttctctctgttacatttgcaggcgaaagaaggctcatgtgctgcttcgaaaatcagttctaagaaggcaaccagggacaacaaacctgataagggaagaaacatgttctggataaatattggcctttgtttcaagactccaagcccgccaccatccagggatcaatcctcaccacgaggaccaggggtgatgccaacaaggtgtacgtgaacctttcctggggtgttgataatttagctctcgcaaacctgttcactgagcaaggaccatctatgacagtgagaacaagtcaagagggtttgattttttgtcatgtatggttccacagaagagcctgagaatgcattatcgaatctcaatggagctatgagttctgaaacccttttttcttccccttgctgctcgcggcatagcatttggaaattgaagtacaatttgtctttcaggatatactgaattgatttatcattgtcctgcaggacttggatgatagatccgtgttacgataccagcatcaaagccgcctagaagcaatactgaactttcacttgagatgtgagtagttgttgttgggggccttcgtcctccgaaggtcctcaaaaacatgatttgacaatgttttccaagtggattatgtgaacaggtaccttcggactcagaattacgaacatgaagtgcggtcaggacgaagcctgaaccagacgaaggacgggctgattaccaagctccacgaaggatggtgcacagccgaagctgtgcgcagggaagcttcgtcgtgatagcagagaggggaaccgacctaaagataaaaagactacgtgggccttgtcagatttccataagtcattgacaaatgtaatggacataaatgtaattttacgtgggctgcgtcccgcgtctataaatagatgaacagtactctcgtactgttcacgcggacttggcatttgcttttgcgtcacgcttgtactttttatcttctctcaggaccgaaggtacatttgtaatttgaaatcatttctatttttccatgttaataaaatagaaatgattctatgatgatgctt

SEQ ID NO: 130252 - DNA, 651 bp, Zea Mays
atggcggtgcgcgcggacggccgcgggcgcacggcggccgagaaccccgtccgcgccgacccgaagtcgcacagcttggcggacatggccgcgtccaggagcacgttggaggccttcacgtcgccgtgcaccacctgcggctcgcagcggtcgtgcaggtactcgagcgcccgcgccacctgcagcgccgccgacacccgccgcgcccacggcatcgtccccgccgccttgcccccgccgtggagccgctcgtgcaggttcccgttcgccgcgaactccagcaccagcacgccttcctcttgctggtcgcagaaggcaaggaggcggacgatgtgcgggtggcggacgcgtcggagcgcgtcgagctcctggcggaacacgcggtggaggcgctcgctgctgcggtggaccttgacggcggccagcgcgccgccggagaggcgcgcgaggtacacggtgctgaacccgccctcgccgacgacggccgaggtgaacctgcccgtcatcgcctccacctgcgcccacgacagcccccgcggcccggcttcggcggcccccttgtcgtcgaacgcctcgaaacccccgtcctcgtcgccttcccggtcgccggccgccgcattggcgccgcacccgcagcagaataacctgtag

SEQ ID NO: 130253 - DNA, 402 bp, Zea Mays
tttgtggattaagtttcaagtttcacaggatcacctattcaccccccctctaggtgctctcagatgtcactttctttccccaagaataaatggattctatccaatatatttgctggaaaaccaagtttttcttcctttgcgaagatatcgatcacatccaggttgttccaccgaagatagcaacagtgacagtccatcattgatgatcatccttcacagggacagaggtcttgaagtaaagcatcctcaaaggagaatgaagttctatttcagacatttgtttcattcagtgatgcccacaggtatgaggtatcattcctttacccctctttttcattacatgctgatgtgaatattccagacatacaaaaccatattgtctacatgttgtgtgctcaggct

SEQ ID NO: 130254 - DNA, 84 bp, Zea Mays
gcgctcatctgacaaattctgcattctgtatgctcttcaacattcctctaaaaaattccccacgtactatttcacctgccacct

SEQ ID NO: 130255 - DNA, 4793 bp, Zea Mays
ggttggcacatatgcagcagctgcgaaaaggcagtacagtacatgtgttatacttgtacgtactctgtctgcaaaggatgcatcaaacaaggcaaattctttggcgttagagggaacaagggcttctgtgacacatgttatggtactatattattgatagaatccaaagaagatggtgcaaaggttggtgttgattttgatgatatatatagctgggagtaccttttcaagttatattggttggatctgaaagggaagcatttactaacgattgaagagctaaaaagtgccaagagccattggattgttcctactactgctggtagaagagagaaagaggagtcatctgatgaattatatgatgcaagcaatggccaagatgctacttttgacatttcgtcaaagaaacgaatacagaataactcttcaggaaaaagaggacaaaaacgcaaaaaagacggcaacattacttcaaggaaatgtggaatctcaattaacagtgctggaggcttaccaaatggatcaacaggtgaagggatggccttggctggtgacaaaaactgggcatcatctgagttattggaattcattggacacatgagaaatggtgataattcttatatttcccagtttgatgtccaggttcttttgcttgaatatataaagcaaaataacctccatgatcctcgcagaaaaagtcagattatatgtgatgcaaggcttagcaatttgtttaaaaaaccacgtgtcgatcattttgagatgttaaagcttttggagatgcattatcttgtgaaacaggcttcaacaccgaatgcagacagtcaaagagcaatttattcagattcagctcaagtaaataatggaggacataatgagttggccgatacattaggttttgataggaggaaggctcataagaagattgaaagagaattgacaattaatccagaagattatgcagccattgacatgcacaatatcaatctaatttacttgcggcgcagtgtgatggaggatcttattgatcaggttgctgcattttctaacaaaattgctggtgcttttgtgaggataagaatttctggtcttggcaacaaggaagatatgtaccgactggtgaaagttcttggtacgcataaagttgcagagcgatacactgtcagtaagaagacaacagattatgctcttgagatatctaatttagaaaagaaagagattatcacaatggatacgatttcaaatcaggatttcacagaggaggaatgcaaacgattacgtcagagtatgaagtttggtctaactgcccggttaaaagtggtagatgtctatgagaaagctaaaatcttccaatctctgcgatttaaagattggttggaaaatgagaaacagaaaatgagccatcttcgtgatcgtgctagtgaatctggacatcaaaaggaatatcttttttctcagtgtgttgaaaagttgcagcttctgaacacccctgaagaaaaggaacgcatgattaatgaagttccagaagtacatgttgattcccggatggatccaagttatgaatccgctgaagaaccagagtataagaaagctgttgattggaccatgcatcggaatgggccagatctattatttccaggaagaaaagggacagaattgaattctgtggagaatcatacacaaaagagtctggatacaagcagtctacctacagaggacgtggaccatagatcaggtgcaggaagtaacattaatttaaacaacatggcacctgagcctgcatcacttggaattttatcaaatgacactgagccagaaaaggtttggcactacaaggaccctaatggaaatgttcagggcccgtttactcttttgcagttatccaagtgggcaagttttttcccacgcgacctgagagtatggcttacatttgagagtgaggagaactcactactgttgactgaagtgctcccaaagcagcagaaagattttattcagctttcaacagttactaccagtgataaatcaatgtgggcaggctctggtcaagatagagttaactcaaatgcaaataactcttcctcccctatgggttataacatggtctatccttctgcattatctagcccgtctgctgagtgttatgatccaacaaaagatctaaagcctctgggtggaacttcgccatcacgatctctgaaagatgctcatgctttgcatgaggttcagaatcaggttaactattcattcacaattctatcttcaactggttcatatgcaccacccggttctcatgatggaagggtttcaagagacagggttgatgaatggaacagtagtcaggacaatggtggtatttggaggccaaccatgaattctagtcagaagactaatgcacagcagcatcctgatggttgtactgggaaggacctaatgcaaactgaatctaaatgtagttcacatttggtctcagttcttacttcacaacactctgagagagaccctgccacttcccttagtactacaagttggccggtgttcagaaccaggtgccagcaggaaggttcttcatggacttcagctacaaatgctggagctcatgaccttcagttatctattgctttagcaaagccggagacctgttctccaacaaatcctgtggaagacagagattcaagttctgcttctgctttgtcttgtcagtctggggctcctgtctgcgttccccaaccagatccaacatctacatctaattcaaggaagattgatgcaaccatggatcagcatagaacatgccagcctgacacatcaagtgtatcatttgatcttcttcatgagcctaaaagtggctcactcttttccttgaaaactcaagatcttgagtttgagtaccctagtcctatcccaaaacaggaggggaaggggatttctgtgaaccagtcaggctcaacatcagtagcacatgagaatttagctacaaagacatgtgtccgcgcacctactagcaaaattgatagcttacaaccacttaaggaaagatcacattcgacagatagggactcaatcactcaattagagcatctgtttgaagagaatgtgataaagagaaataacaaagtggtcaatcctgtatctgatgctgaagggattgctgtatcagatgtgttggaatccttaacagaacaagattgtgaaaaatgtagtatacatggggtagcgccttcacaaaaaatggtgccagcttcagctgaggaagatcaaccacaatgctccagtcctattgcattgtccccttggggtgaaccaagttactatcagggtgaagctgttgattctgctctatggggcgtccaagatgaccctggtaatgacatgtggtcaatgccttctccaaaacctggtttccagccctcatcaggtcttggagctgatggcaaagacgcttcatgcatcatagaggaggcgagagcggacccaggagatggtgcttttgtcaaaacattaccaacacaaggggagaaaaagatggaacatggaaattcaagtgcctcaggttctggagtgtcagaacgggtaaaaccaaaaggaagcgctgcatcaggtccatctctagatgggagcacaaaagttatgggttggcaactgccgggctcatctctagagggcagtgcaaaagtttcaggttggaaaccaccagtcttatcacttgaagggattgctaatggttcaggttcacaagcatcgtgtccttctacgcaaaggggcacaaaatcttcaggttggcagcgatcaagttcatccccggatgggagcagaaaagcctcaggttggcaacagtcaagtacatcaccagaggggagtggaaaagcgcatggctggcaacgatcaggatcttttacccaggggggtacaaaggctgcaggtcggcaaccctctcgttcctgtacagatcggattgcaaaagttgatggctggcaacgaacaagttcatctccggagggaagcagaaaagcttcaggctggcattcgtcgggtcgtgacagctcaaagatcgcatccagtgccagcgaaaaccgtaaattgtcttctagtcaccaagcgacgacaccaacagggaggcactcgttggcaaagagacagggaagcagcgacaagggtgctgctggttgggacgaggctctggggaactcttcggaagcatcgaagagacaacagggaaacagcgacaagaatgcaggctcgggagtggctctcggaagcaacaggagctggcatccatcgtctggtaaccctagtcggggcggccaggggaatcaccaacatgacagggactctcacagcggtgattcgcggcggggtagctcgaactacccccggaggtccgacaatcgtcatgaccatggcagtggtggttcgtcacgaccctcgtcaagagggcagtcccagagggggctatgtaaacactacgagagtggccactgcgggaagggttcgaaatgccagtacctgcaccggtgatcgccgtggccgtgtggaagcgggacccctgtttgcctggccgtcctcacatttttgtatagcaggatgtggtttcgtcgtagtcagtatagtagaacgcttattaaccgtgtcggcaccactaagttggtagtagtacatatctttcagggcaggagcatgactaaagtaggatttgtaagttttattagagccactgatggccttggataaagattctccgctttttggttcgggaatgcacgctttttgttcagctaaacggagttgtgggc

SEQ ID NO: 130256 - DNA, 655 bp, Zea Mays
atcatattcgggtccgtgagcccgtgggagaccgcgcggcggcgacgacgaggcctcgacctcgagcgagggttggtggacgtcgacgagctagggttaggcgggcttttgagcttaagcttgggttgggggggcctgctgatccatggacggggggaccggcccgggcgccgaggtgctctctcccggcgaggccgagtggcccccagagctccgcctcccgccgctgccctccgtgccggagcccccagggccgcccccgcccgcccccgcctccgcttcgctgcgactgcgaagcgtcggggtcgcgccccatctgcacggggaggtctttgatgatgacccgcagttcctcggatcgatcatgggggccgcggccccgcccccgccccagcagcagcagcagcagcccgccgccgcggcaccggtgaagaggaagagaggcaggccgccgaagaacagggacggtgcggcgccggtgcctgcgccggtgaagccggggaacaagaaggacgaggaggaggtctgcttcatctgcttcgatgggggcagcctcgtggtttgcgaccggagggcaagtgggattgtggtgagcttttctcttgtggactgcgccttcttctcagtgtttaacgtcgactcgtttcttcaatag

SEQ ID NO: 130257 - DNA, 2052 bp, Zea Mays
acaacagccactggagtaggattatactactgctggactggactggaacggaacgggagaattttcagccggagtggcggacaccgatgatggggtctcgcgttcgcatcgtcttcctcctcctcgccttcctcttcgcgcgcgccgccgagccgatcgccgccgccgcacccgccggcagcaggcaccttacgaaggacgagcggtggatgaaccagcgcctcgaccacttctcccccaccgaccaccggcaattcaagcagcgctacttcgagttcctcgactaccatcgggcccccggcggcccggtcttcctgcgcatctgcggcgagtccgcctgcgacggcatccccaacgattacctggccgtgctcgccaagaagttcggcgccgcggtggtgacgccggagcaccggtactacgggaagagttctccattcaagcagctgaccaccgagaacctgaggttcctgtcgtcgaagcaggccctgttcgacctggccgtcttccggcagtactatcaggaatcgctgaatgcccggtacaaccgatcaggtttcgacaacccctggttcgtcatcggggtctcctactccggcgctctcagcgcctggttcaggctcaagttcccccatttgacatgtgggagcctcgcgagctcaggggtggttcttgcagtgtacaactacaccgactttgacaagcaggttggagagtcagctggccctgagtgcaaagctgtccttcaggaaataactgaactcgttgacgaacagctccggctggagagtcactcggtgaaggctctatttggagcacagacgctgaaaaatgatggcgacttcctcttcttcctggcggatgcggcagcgacaaccttccaatacgggaacccagatgccttgtgccctccactaataaaggcgaagaagaacaggaaaaacttggtggaagcatatgctcaatttgtgaaagattattacattaaaaaaatggagacaccaccatcctcgtatgatcgagaatatctgaaggaaacaactccacatgattctagttctaggctctggtggttccaagtttgcagtgaggttgcctactttcaagtggcacccaaaaatgacagcgttcgttctgcaaggatcaatacgaggtaccatttggacctatgcagacatgtctttggggaaggcgtttatcccgatgtgttcatgacgaacttgtattatggaggcacaagaatcgctgcttctaaaatcgtgtttacaaatggctcccaagacccatggcgccatgcctccaagcagaaatcatcgaaagacatgccgtcgtacataatgaaatgcagaaactgcggacatgggactgatctgaggggctgtccgcagtggcctttcaggatcgaaggggacgcttcgaactgctcgtctctcgctgtagtcaataccgcaagggagaggatcgccaagcacatcgacctgtggctgtcgcaatgcagcaaaccatcagtaggagcctggtaaccgcggactagtggttcatccactcgggaagagtggaaagaggtttggattggatgtcctggagcaaacttgtgtcgggacttggattacgtgtttgtgcactttgaaaagcagataaagctgatggtgtaaagcagcagtgcccggtaccccaccagggtacgtgatgcaggcaggggtggtgctgtctgtgtcgatgccgtcgtccttttctggcgtggcgctgcagacgaccgacgtgtcacggcgcgtttgggtgcgcggcgcgcgcgcgtcaaaacgtaacaagtactagtacctactactacgtgccatgccaggtgttgcgtcaaaacgtaacaagtttctcccttccgttctttgtccgagcgagtttacaagtactatactaccaaaaaggccaaagcgaacccgcaattttcttatgtatactagtagtagtgaactgctgcaccaacatccggtccacgtaaacatgtgccttttccgacgtgtatgttttatttaatggcatgtgttcacttgtgca

SEQ ID NO: 130258 - DNA, 1905 bp, Zea Mays
ccggctccctgtcgcgcacgccacggcgcacccgtactgggaggagggaggattcttgtttgagagccgtcgctcacgccgatcgcggcttttcaggaccaccggcaattcaagcagcgctacttcgagttcctcgactaccatcgggcccccggcggcccggtcttcctgcgcatctgcggcgagtccgcctgcgacggcatccccaacgattacctggccgtgctcgccaagaagttcggcgccgcggtggtgacgccggagcaccggtactacgggaagagttctccattcaagcagctgaccaccgagaacctgaggttcctgtcgtcgaagcaggccctgttcgacctggccgtcttccggcagtactatcaggaatcgctgaatgcccggtacaaccgatcaggtttcgacaacccctggttcgtcatcggggtctcctactccggcgctctcagcgcctggttcaggctcaagttcccccatttgacatgtgggagcctcgcgagctcaggggtggttcttgcagtgtacaactacaccgactttgacaagcaggttggagagtcagctggccctgagtgcaaagctgtccttcaggaaataactgaactcgttgacgaacagctccggctggagagtcactcggtgaaggctctatttggagcacagacgctgaaaaatgatggcgacttcctcttcttcctggcggatgcggcagcgacaaccttccaatacgggaacccagatgccttgtgccctccactaataaaggcgaagaagaacaggaaaaacttggtggaagcatatgctcaatttgtgaaagattattacattaaaaaaatggagacaccaccatcctcgtatgatcgagaatatctgaaggaaacaactccacatgattctagttctaggctctggtggttccaagtttgcagtgaggttgcctactttcaagtggcacccaaaaatgacagcgttcgttctgcaaggatcaatacgaggtaccatttggacctatgcagacatgtctttggggaaggcgtttatcccgatgtgttcatgacgaacttgtattatggaggcacaagaatcgctgcttctaaaatcgtgtttacaaatggctcccaagacccatggcgccatgcctccaagcagaaatcatcgaaagacatgccgtcgtacataatgaaatgcagaaactgcggacatgggactgatctgaggggctgtccgcagtggcctttcaggatcgaaggggacgcttcgaactgctcgtctctcgctgtagtcaataccgcaagggagaggatcgccaagcacatcgacctgtggctgtcgcaatgcagcaaaccatcagtaggagcctggtaaccgcggactagtggttcatccactcgggaagagtggaaagaggtttggattggatgtcctggagcaaacttgtgtcgggacttggattacgtgtttgtgcactttgaaaagcagataaagctgatggtgtaaagcagcagtgcccggtaccccaccagggtacgtgatgcaggcaggggtggtgctgtctgtgtcgatgccgtcgtccttttctggcgtggcgctgcagacgaccgacgtgtcacggcgcgtttgggtgcgcggcgcgcgcgcgtcaaaacgtaacaagtactagtacctactactacgtgccatgccaggtgttgcgtcaaaacgtaacaagtttctcccttccgttctttgtccgagcgagtttacaagtactatactaccaaaaaggccaaagcgaacccgcaattttcttatgtatactagtagtagtgaactgctgcaccaacatccggtccacgtaaacatgtgccttttccgacgtgtatgttttatttaatggcatgtgttcacttgtgc

SEQ ID NO: 130259 - DNA, 529 bp, Zea Mays
ccttggcatgttaactgctcaccaatttcaaatggtacaagtctggatgggaaagcgagtctcggctggctggctggctgggctagcagctcatcgaatcggatgcattagcgacttagcgtcaacgcgtttgggatatccatagtttacacttgaaatgaacaattaatgtttgctacgtgtcttgaaggaaaaaaagaacgtaaattagtaaattacaggaacagaactactagtaccttctgtagagcatggtattagcaaagtgtatattggcgtacgtatagtacaagcaaaggaaaaaaagaaaagctaaggttaattaaatgatgatgaacatcatcctctctagatctttacacttgagatcgaccatcatcacaaattttccgtcatcgtcaacacctggatgtcccatcccatgtctctcgccaccaaaccaagctagcttcaaaccaatacgtattcgtatcgatcaaccctcacaaataaagcatgcaacggcgggagagagaagggggaaaaggac

SEQ ID NO: 130260 - DNA, 559 bp, Zea Mays
ctgcgtcccggtcccccttttgcatcagttcaatctcgtctcgaaggagagaacatcaacgattcaggcagcccctttgtccgattccaatggcaatggaggtgttgcgttgctcgcagaacaaaccttgtgctcttcagatcggctgagtggggagatctcccctcgttgaggccagtctagtaactctcaagaacatctgtttcttcgtctctgaatccttcttgtgctcttcaattaaaccccccttttgcaaccctctttcccgatgagtctcttattacgtcaaattatttttgagatcaagacaatttggaaaatccagtgcggttattcgtatgaatctcattggtagtatttcccccggagtacaaaaaaaactaatttcttgtaacaccaaatgcatcaagaatgctgaaactatgaatgcagtacacggaagctacattgctcgtcgaatactgaaattttgagtgccatcatcgaatccgatagcagcaatcagtgttgacacggtggtggtgccggatatggcagtggccgacgaagaccatcatgc

SEQ ID NO: 130261 - DNA, 633 bp, Zea Mays
atggcgctcgcagccccttcttccctccgcctcctcccgaccacgccatcgcaggcgccatctccgccctgtgcctcccgaccacgccatctgcgggagctccgtctctgccagagactcgccaccgccgccgccgccgccgccgccgccgcggccgcggccacggctccactcgcttcctcgcccaccacctccgtggccgtggaggagcgtggtgcggggaagggaacgccgatagatctcgcggcgctcgatggcacctggaggctgtgttacacatcggcatcagacgtgcttgtgctgttcgaggcggccgagaggcttccactcctgcaggtgggccaaatataccagaaatttgagtgcaaagatcgatcagatggtggaactgtgaggaatgttgtaaggtggagcatcgagaacttgctggaggagcaagaaggtgcaacactgatggtctctgcgaagtttgttgtcctgtctaaacggaatatctttcttcaatttgaggaggtcgctgttgaaaatatcaagatcagcgagcaactgcagacactaatagctcctgctatacttcctcggtcatttttgagccttcaggtatatgccagcccgccaggttatatcaaataa

SEQ ID NO: 130262 - DNA, 1537 bp, Zea Mays
tccacatgtagcagtgtcggaacatgattacctattacatctttgcactaggctcacctgagtgttatttatacaacctcttcctcttgtatgcattgagcattttgcatattaactgaaaataaaaagagcatgttgcattcgagacgattgacaatcatcgatgacattttcagttccatgtcagtatgtcgggaagttagagtgtgtttggtttgaggaatgaagtgattcatcttcttctcactcctcacttttttatttggtttgtggaatagaatgagttgatccatcaccaccacattcttcataagctaataattagtatatacatgagggttgagttgattccaccaaaattgatggaatgaacttataatgcatcacctcatgaagcataaagtgactccacaaaccaaacacaccattagtttcttttgctgtcatgccacaacctctgttactgaaaataaataagccataaatcaaagcagtccctttgctcatgtaaaacagatgttcttgctctatagactgagtgagtagtagtagtagttctttttctcattctgttctagtatgccaacattaagatttttgcaccttgagattttccgcaacagtctagtttagggttcttacatacaacatgatatgtacatttcttatccacttaagggcgtcgtggcggtgatccaatagctagctcagctgcaattctaagaaaggtcctcgctcagctcggcactctgggcgttgttttttattgtttcctgagatcacctcgcctggcgatatccttctcccgttgaagacgggtgatgttcaggtcccctgcttgacaattatatttgttgtgtatgtcgcgcagaacataaattggtggaagagaagtttgatgctaccactttgcgagaaggaccgaaccaacacaataacatcaaacttagatactgcagtttaccaactttttcaatattgaagattgaagagcagcaagatcagcctcttccatatgcagtttgaagaaatcctttttaaggtctattagactagaatccttccggcaatcttgccttcaccccaagcatgctgcataccttgtaatgagtgtggtacttgacgactgttaccaaagtttttttgagggtaagactgttaccaaagtagtggatgcttttctttggcacgaagtttctttcatatccacctagtttgtctgtaaaaaaaagtgaaacaccgagaaagacgatcagactaacctaccgtttggttcacatattggtaacgtaataggtaactgataacgttaaatcatgtttgtttaagtctaactgtaatcgataccacactataaatggatatcgccttttttaatttgttactgtcggtatttgagtgtgaatcgttaccattactatttacgttacatttcgcgaaccaaacgatacctaaggtgaatgaggcaatttaaattttcttctgattttggtcgctgttcaaatctaactccaaagcaccaaaaaagcacaaaaaa

SEQ ID NO: 130263 - DNA, 2122 bp, Zea Mays
ctccacggtcgcgtttcacgggcgtagagagagagagagagagagagagcgcgagcgagcgaagagggcgtgagagaggagggaggccaagccgtacgcgtcgtctcctgctgtttctccccatccctttcctgcctcggcttgcaccttcaaccttacttaaagctctgacctcaaactgaaagggacctgcgaagagttttttttgcggcagtacaatggaggtatttggcaaatctgtgattgctgagcccagcaatgtgattttcttgtccgcgatccttaacacagaagggtcaaaccctagtcacaagtgtgacaagaggtgccagagcgagcgcattttggggaacatgtaccgttgcaaactgactgaaaccactcacatctgtgacaaaaactgtaaccagaggattctatatgacaaccataactcgctctgccgagtgagtgggcagctttttccgctctctccactggagcagcaagcagtgaggggcatccgcaggaagcatgaagtggacagcagtgaaggttgctgctttaagcgcaggcgcggcgcacagctgcatccttcccccttcgagaggtcctactctgctgtgtatccaatcccgagccaggttggagatggcatggacatgagctagagctaatgagacttccttttcttcggccagccacctaatttcgttctgtctaccctttttccctacgattacaagatggaactataagagcttccttctttttagacttatatgagactccttagatgcaccgaataaatgttcatgtagtatctattctgtttcatgggaccttgttgtaactcgtgaactttgattgaacgcctattttgatttagtggtactttcagataatcattagattcttctcttttttttgtcacacttccaatttagttattttatgtgctttactttttgttcaactaatttgccttctaattttaatcctttgatgcaatttaatataattgagaggtttacatttgtccgccaatgtaagtaagtgaaggattctttggtcctgtaatccaggcacagggaactgacatgcctttgctgactgaagtttttgtacagctgttactagtgttttgcttgacaagttcctaatcaagcttgaatcatttacggtttgttcccatatagctcaattctatctgttgcttaactcttttttttacaggttatgtttctaacgcttaatgttttcctatgttcttttttgtcttaacatttgttgtatgcaggaccatccaggttctaatcgttttttgggaaatgttttgttcttttttatataactatattgctaacttaatttaatttgttgattaatttgcctttctttgtttttgcaggtgaacatctctgattccattttcatctgttgggtggcaagaaactaatcaaggagtctctctcttctcattctctgcgtggaggactgtttagctgtagctgagtggcatgctttccagaacataaattggtggaagagaagtttgatgctaccactttgcgagaaggaccgaaccaacacaataacatcaaacttagatactgcagtttaccaactttttcaatattgaagattgaagagcagcaagatcagcctcttccatatgcagtttgaagaaatcctttttaaggtctattagactagaatccttccggcaatcttgccttcaccccaagcatgctgcataccttgtaatgagtgtggtacttgacgactgttaccaaagtttttttgagggtaagactgttaccaaagtagtggatgcttttctttggcacgaagtttctttcatatccacctagtttgtctgtaaaaaaaagtgaaacaccgagaaagacgatcagactaacctaccgtttggttcacatattggtaacgtaataggtaactgataacgttaaatcatgtttgtttaagtctaactgtaatcgataccacactataaatggatatcgccttttttaatttgttactgtcggtatttgagtgtgaatcgttaccattactatttacgttacatttcgcgaaccaaacgatacctaaggtgaatgaggcaatttaaattttcttc

SEQ ID NO: 130264 - DNA, 714 bp, Zea Mays
ctccacggtcgcgtttcacgggcgtagagagagagagagagagagagagcgcgagcgagcgaagagggcgtgagagaggagggaggccaagccgtacgcgtcgtctcctgctgtttctccccatccctttcctgcctcggcttgcaccttcaaccttacttaaagctctgacctcaaactgaaagggacctgcgaagagttttttttgcggcagtacaatggaggtgaacatctctgattccattttcatctgttgggtggcaagaaactaatcaaggagtctctctcttctcattctctgcgtggaggactgtttagctgtagctgagtggcatgctttccagaacataaattggtggaagagaagtttgatgctaccactttgcgagaaggaccgaaccaacacaataacatcaaacttagatactgcagtttaccaactttttcaatattgaagattgaagagcagcaagatcagcctcttccatatgcagtttgaagaaatcctttttaaggtctattagactagaatccttccggcaatcttgccttcaccccaagcatgctgcataccttgtaatgagtgtggtacttgacgactgttaccaaagtttttttgagggtaagactgttaccaaagtagtggatgcttttctttggcacgaagtttctttcatatccacctagtttgtctgtaaaaaaaagtgaaacacc

SEQ ID NO: 130265 - DNA, 845 bp, Zea Mays
ctccacggtcgcgtttcacgggcgtagagagagagagagagagagagagcgcgagcgagcgaagagggcgtgagagaggagggaggccaagccgtacgcgtcgtctcctgctgtttctccccatccctttcctgcctcggcttgcaccttcaaccttacttgtaagttccatcgttttaactctagagaggctttttgctcgcgaatattttggaacgaagatgctccgccttgattttggtttagctgttgttaatctgaatcgtttggttgcgtttatcgtggatttggacgtcgagacgccgctatatgaggaattaatttgattttattgcttatgataggggttgttgtcggttggcgggttaccgttcagatctagtgtagtaaaattgcagtggtgatgggaggagaggagtgggcaagttaggttattaggtttctaggtccatgtttgtttatttttttggtgaggatggtttctggttcacctaacggttgaaagggatgcgtgctgacttggcaaaggtcgttgtgtttttgtttgtacgtacgagattttttttatatctacttggctaattttaaaacggttcaaggttcaatgccactatgccggcggtactatctgcatctcagattcgggtttggtaccatgatttttttacagatttggccaaactgcatgaagttcagtggattatgtcaattatagagtcaggcgcctgagtgaacctttacagattttatgacgtcgagagttgggtaaagttggcgcgaaatcgttgcgctatgatttatttatttatctgtagttacgctagattacacactgtcggttaatc

SEQ ID NO: 130266 - DNA, 2906 bp, Zea Mays
cagcggacaacttcgcacctttttcacccatcactcgcgaacgcaggtcgcactgtcgcagcatgcttcgcctctccatcgccgtcctcacctcacctctcctccccacgtccgtccccgccgtccgaccccatccgcgccgcctactccgcctccgtctgcgctccctcgccgcctcctcctcgctctcgccgtccgcccgcagcctccgcctcctcgagtggggcaaggtctgcgacgccgtcgcctccttcgccggcactgcccacggccgcgacgccacaacgaaacaactgtgggaggtggaggatgtgagctatgagcagagccagatgctgctccaggagacggaggcggccgtgttgctgcttgacaacgctggtggggcaatggatttctcggggttggatacaatagagtcagcaatacatagtgtctctgggggcgctgtgataaaaggcctggaagcaatggcagtcactagcctgatgatgtttgttgaatccttgcaagtaaacattaaagctgccatgaaactggatgaaggctcatgtagtcgattaacaacacttacagaaacaattttagatgctgtcattaacaagtcattagtgaaatccatacaagatattgttgatgatgatggctctgttaaagacactgcaagccctgagctgagacggtatcgagagcaagtacagcgtctagaaaacaggttatatcagcttatggacaagttgatgcgcaatgctgatgatgaagcttcattgtcggaagtatgcattgtaaatggaagatgctgcattagaacaaccatggataattcttcattttttgatggattattgctctccagcaggtcagatgctggaagcatgatagaaccaattgttgctgttccgttaaacgatgagttgcaggaatcaagagcattagtggctaaagctgaactggatgtcttatcaaaacttactgataagattcgtcttgatcttgatagcattcagaatttgcttcaggaaacaattaaactcgataagatcgcagctcgtgcaaaatacagtattgcatatgatggaacatttcctgacctgtatttgccgaactttgagaatgaaactgtcactagtgctacaggtggatctatcaaacaaatttcctcagctcaacttcctaagaaggcatggaaactgtatatgccaaatgcataccatccactactacttcagcggcatcaggaaaatatccatcgtgccaaaagggatgttgcaagtgccacagcggagatccggaggaggaggatatatgggcaagatattgcagaagaagatcaattggcatcagaccttgattccatgaaacttagggtttcccaactggagaaagaccagccagtaccagtagattttatgattgctgaagaaactactgtcttggtgataactggcccaaatacagggggtaaaacaatcagcttgaagacggttggcctggcatcattgatggctaagataggtctatacattctagcttctgaaccagtaaaaattccatggttcaatgctgtttatgctgacattggagatgagcaatctctgacccaatcactctctacattttctggacatctgaagcagattggtgccattcgtgcagagtcaacttcagagtccttggtccttttggatgaggtaggcgctgggacaaacccacttgaaggagccgctctggggatgtctcttttggagtcttttgctgaagctggctcctttctgactctagcaacaactcatcatggagaactcaaaacactaaaatacagcaataactcatttgagaatgcatgcatggaatttgatgaagagaacctaaagcctacattcaagattctgtggggaataccaggtcgctcgaatgcaatcaatattactgaaaggctgggtttgcctttggatatagtagaaagttccaggcgtttacttggaacagctggtgcagagataaatgctgtatgcttttttgggcacttttctgtacttagaacttgcacgtggttttgttgtccaaaatatcttgttatgatcctaagctctcgaagttcatcttctgcagttgataatggacatggaaagactcaaacaagaatatcaacaacatcttcaggaggcacaatatcttcttattccaaggagcttcataacaacttggaactggcacaaaagagcattgtagaccacacttctgctcagagaaaacgaaaggcgagagtaatttcagagtatgctgttatggcccgttctatcattcgtaagaagtttcagcagttccaagaatctgctatagctgaaagagtgaaagaagaagagaatgctgtgaatgatgccaaatctgacagagtgaaggatcctatgccggcaaatacatctgccattggaaacatacagaacatagataccagcttgggcatgacagccaacgatgatgaagatgaggttccagaagttggagattcagtgtacgttcctaagctcaagaatgaagctaccgtggtgaaaatagattcgtccaaaaatgaagtgcaagtccaagccggtatgatgaagctcaaactaaagctgaaagatgttaaggttcagaagcggaaagtatccagatagaacatctacactgtcctgcactagcagatattcagataaatatgcatatgctgtttcgtccaattcgtaccatttcattggcctcattttcagcaataataataatgtggtctttcaagtgaaaatatggatttattatctgcatgtacttctcattcttcactacttgcggtactcaaaaccttcagcagagttccagaacatcttcagattatcacttctttatagaaaatgagcttgtgatttatc

SEQ ID NO: 130267 - DNA, 2521 bp, Zea Mays
cagcggacaacttcgcacctttttcacccatcactcgcgaacgcaggtcgcactgtcgcagcatgcttcgcctctccatcgccgtcctcacctcacctctcctccccacgtccgtccccgccgtccgaccccatccgcgccgcctactccgcctccgtctgcgctccctcgccgcctcctcctcgctctcgccgtccgcccgcagcctccgcctcctcgagtggggcaaggtctgcgacgccgtcgcctccttcgccggcactgcccacggccgcgacgccacaacgaaacaactgtgggaggtggaggatgtgagctatgagcagagccagatgctgctccaggagacggaggcggccgtgttgctgcttgacaacgctggtggggcaatggatttctcggggttggatacaatagagtcagcaatacatagtgtctctgggggcgctgtgataaaaggcctggaagcaatggcagtcactagcctgatgatgtttgttgaatccttgcaagtaaacattaaagctgccatgaaactggatgaaggctcatgtagtcgattaacaacacttacagaaacaattttagatgctgtcattaacaagtcattagtgaaatccatacaagatattgttgatgatgatggctctgttaaagacactgcaagccctgagctgagacggtatcgagagcaagtacagcgtctagaaaacaggttatatcagcttatggacaagttgatgcgcaatgctgatgatgaagcttcattgtcggaagtatgcattgtaaatggaagatgctgcattagaacaaccatggataattcttcattttttgatggattattgctctccagcaggtcagatgctggaagcatgatagaaccaattgttgctgttccgttaaacgatgagttgcaggaatcaagagcattagtggctaaagctgaactggatgtcttatcaaaacttactgataagattcgtcttgatcttgatagcattcagaatttgcttcaggaaacaattaaactcgataagatcgcagctcgtgcaaaatacagtattgcatatgatggaacatttcctgacctgtatttgccgaactttgagaatgaaactgtcactagtgctacaggtggatctatcaaacaaatttcctcagctcaacttcctaagaaggcatggaaactgtatatgccaaatgcataccatccactactacttcagcggcatcaggaaaatatccatcgtgccaaaagggatgttgcaagtgccacagcggagatccggaggaggaggatatatgggcaagatattgcagaagaagatcaattggcatcagaccttgattccatgaaacttagggtttcccaactggagaaagaccagccagtaccagtagattttatgattgctgaagaaactactgtcttggtgataactggcccaaatacagggggtaaaacaatcagcttgaagacggttggcctggcatcattgatggctaagataggtctatacattctagcttctgaaccagtaaaaattccatggttcaatgctgtttatgctgacattggagatgagcaatctctgacccaatcactctctacattttctggacatctgaagcagattggtgccattcgtgcagagtcaacttcagagtccttggtccttttggatgaggtaggcgctgggacaaacccacttgaaggagccgctctggggatgtctcttttggagtcttttgctgaagctggctcctttctgactctagcaacaactcatcatggagaactcaaaacactaaaatacagttgataatggacatggaaagactcaaacaagaatatcaacaacatcttcaggaggcacaatatcttcttatgcagtccaaggagcttcataacaacttggaactggcacaaaagagcattgtagaccacacttctgctcagagaaaacgaaaggcgagagtaatttcagagtatgctgttatggcccgttctatcattcgtaagaagtttcagcagttccaagaatctgctatagctgaaagagtgaaagaagaagagaatgctgtgaatgatgccaaatctgacagagtgaaggatcctatgccggcaaatacatctgccattggaaacatacagaacatagataccagcttgggcatgacagccaacgatgatgaagatgaggttccagaagttggagattcagtgtacgttcctaagctcaagaatgaagctaccgtggtgaaaatagattcgtccaaaaatgaagtgcaagtccaagccggtatgatgaagctcaaactaaagctgaaagatgttaaggttcagaagcggaaagtatccagatagaacatctacactgtcctgcactagcagatattcagataaatatgcatatgctgtttcgtccaattcgtaccatttcattggcctcattttcagcaataataataatgtggtctttcaagtgaaaatatggatttattatctgcatgtact

SEQ ID NO: 130268 - DNA, 2698 bp, Zea Mays
ctgcaactgcaagtctgcaaggcggagaagccggtcgttcgttcatccggtgcgctatcccaaatacagcggacaacttcgcacctttttcacccatcactcgcgaacgcaggtcgcactgtcgcagcatgcttcgcctctccatcgccgtcctcacctcacctctcctccccacgtccgtccccgccgtccgaccccatccgcgccgcctactccgcctccgtctgcgctccctcgccgcctcctcctcgctctcgccgtccgcccgcagcctccgcctcctcgagtggggcaaggtctgcgacgccgtcgcctccttcgccggcactgcccacggccgcgacgccacaacgaaacaactgtgggaggtggaggatgtgagctatgagcagagccagatgctgctccaggagacggaggcggccgtgttgctgcttgacaacgctggtggggcaatggatttctcggggttggatacagttgcgatagagtcagcaatacatagtgtctctgggggcgctgtgataaaaggcctggaagcaatggcagtcactagcctgatgatgtttgttgaatccttgcaagtaaacattaaagctgccatgaaactggatgaaggctcatgtagtcgattaacaacacttacagaaacaattttagatgctgtcattaacaagtcattagtgaaatccatacaagatattgttgatgatgatggctctgttaaagacactgcaagccctgagctgagacggtatcgagagcaagtacagcgtctagaaaacaggttatatcagcttatggacaagttgatgcgcaatgctgatgatgaagcttcattgaagtatgcattgtaaatggaagatgctgcattagaacaaccatggataattcttcattttttgatggattattgctctccaggtcagatgctggaagcatgatagaaccaattgttgctgttccgttaaacgatgagttgcaggaatcaagagcattagtggctaaagctgaactggatgtcttatcaaaacttactgataagattcgtcttgatcttgatagcattcagaatttgcttcaggaaacaattaaactcgataagatcgcagctcgtgcaaaatacagtattgcatatgatggaacatttcctgacctgtatttgccgaactttgagaatgaaactgtcactagtgctacaggtggatctatcaaacaaatttcctcagctcaacttcctaagaaggcatggaaactgtatatgccaaatgcataccatccactactacttcagcggcatcaggaaaatatccatcgtgccaaaagggatgttgcaagtgccacagcggagatccggaggaggaggatatatgggcaagatattgcagaagaagatcaattggcatcagaccttgattccatgaaacttagggtttcccaactggagaaagaccagccagtaccagtagattttatgattgctgaagaaactactgtcttggtgataactggcccaaatacagggggtaaaacaatcagcttgaagacggttggcctggcatcattgatggctaagatagtggccaagcttgccgcagttgtgacagtcgtcgtctcgtgccggcttcttgttgccgacggcgccaccttgggtctatacattctagcttctgaaccagtaaaaattccatggttcaatgctgtttatgctgacattggagatgagcaatctctgacccaatcactctctacattttctggacatctgaagcagattggtgccattcgtgcagagtcaacttcagagtccttggtccttttggatgaggtaggcgctgggacaaacccacttgaaggagccgctctggggatgtctcttttggagtcttttgctgaagctggctcctttctgactctagcaacaactcatcatggagaactcaaaacactaaaatacagactacatttttttttgcacaataactcatttgagaatgcatgcatggaatttgatgaagagaacctaaagcctacattcaagattctgtggggaataccaggtcgctcgaatgcaatcaatattactgaaaggctgggtttgcctttggatatagtagaaagttccaggcgtttacttggaacagctggtgcagagataaatgctttgataatggacatggaaagactcaaacaagaatatcaacaacatcttcaggaggcacaatatcttcttatgcagtccaaggagcttcataacaacttggaactggcacaaaagagcattgtagaccacacttctgctcagagaaaacgaaaggcgagagtaatttcagagtatgctgttatggcccgttctatcattcgtaagaagtttcagcagttccaagaatctgctatagctgaaagagtgaaagaagaagagaatgctgtgaatgatgccaaatctgacagagtgaaggatcctatgccggcaaatacatctgccattggaaacatacagaacatagataccagcttgggcatgacagccaacgatgatgaagatgaggttccagaagttggagattcagtgtacgttcctaagctcaagaatgaagctaccgtggtgaaaatagattcgtccaaaaatgaagtgcaagtccaagccggtatgatgaagctcaaactaaagctgaaagatgttaaggttcagaagcgg

SEQ ID NO: 130269 - DNA, 752 bp, Zea Mays
attgtatgtttgtatccatgcccttgtgattatcttttcttcaggtgaaatcctattgtggccatggcataggggaactgtttcactgtgccccaaacattcctcattattcaagtatatataagtttcttgcaactatttcttatttacagttcttgtattagtgcagtaaataagactactgtacaagctatgtcatatgggtacacagtgtaactcagttggagatatgctggcattattaatgcaggaaacaaggctgttggtatcatgaaagctgggcagacatttacaattgaaccaatgataaatgcaggggtttggaatgatcggctctggcctgatgattggactgcagtcaccacagatggtaaacggagtgctcaatttgaacatacacttttggtgacagacacaggatgcgaagttttgacggcacggttaccctcatcaccagacgtttttccatggttgaaaccgtgatcgggcaccccaacagcaacaagaaagtgatactgacaaaccggggctgcaaaatttttgttctactctttatcagtcagtcaagctgaatattttgaaaattttcagaccaaacagtgataagcatgctactgctggacagtcgccctaattgtctgtcctgcggaattgtttctgggagtgtattgttaagtcggttttctccgagttatacgagacatatggcttgagttgtgtcaccaatatgattatgccataggactatcaga

SEQ ID NO: 130270 - DNA, 1584 bp, Zea Mays
cgcccccgcgcgcacgacttcgcttcccctccccggctacccgtccccgcggctgactcgtccacctcctgtccatattttcccctcgtgtccgccgcacgcaccgccggaaccctagcctcagccgccacaggcagccgggatggagaaaggagcctcggaggcgtcggccccctgcgctcgctgcggcaagcccgcgcagctccaatgccccaaatgtgctgaacttaagctaccgcgtgagaacgcagctttctgcacacaggactgttttagggcagcatggagctctcacaaatctgttcacccaaagcctggtgcactggcatcccagcagtctccggaaggttggaaatattgtttgagaaaagggcggggacgtgcattgcaacttcctcgttttgaatggacaggtccattgagaccatatccgatatcaaagatgcgtgtggtgccagatgaaattgagaagcctgattgggcgcttgatggaattcccaagatagaaccagatagtgacttgcagaaaagagtagagattaagacccctgaactaatagaaaggatgagagaaacatgtcgaattgcaagagaggttttagatgcagctgctcgtgtaattaaaccaggaattacaacagatgaaattgatagagttgtccatgaagagacaattgctagaggtggatacccatctccattgaattaccatttcttccccaagtcatgttgcacgtctgtcaatgaagtcatttgccatggaattccagatgccaggaaacttgaggatggtgacattgtaaatgttgatgtaactgtatactataaaggtgttcatggtgatttaaatgagacatattttgttggaaatgtcgatgaagcttccaaacagcttgtacgttgtacctatgagtgcttggagaaagctattgcaatagttaaacctggagttcggttccgagaggtcggggaaatcataaatagacatgcttcgatgtcaggtttatctgtggtgaaatcctattgtggccatggcataggggaactgtttcactgtgccccaaacattcctcattattcaagaaacaaggctgttggtatcatgaaagctgggcagacatttacaattgaaccaatgataaatgcaggggtttggaatgatcggctctggcctgatgattggactgcagtcaccacagatggtaaacggagtgctcaatttgaacatacacttttggtgacagacacaggatgcgaagttttgacggcacggttaccctcatcaccagacgtttttccatggttgaaaccgtgatcgggcaccccaacagcaacaagaaagtgatactgacaaaccggggctgcaaaatttttgttctactctttatcagtcagtcaagctgaatattttgaaaattttcagaccaaacagtgataagcatgctactgctggacagtcgccctaattgtctgtcctgcggaattgtttctgggagtgtattgttaagtcggttttctccgagttatacgagacatatggcttgagttgtgtcaccaatatgattatgccataggactatcaga

SEQ ID NO: 130271 - DNA, 100 bp, Zea Mays
ctttgggaatttttttacacagtcttgattgtagctcttcttgtatcgactgacattgcaaactgggcatcttgctgcgttctcaaaatcgccacgatac

SEQ ID NO: 130272 - DNA, 1986 bp, Zea Mays
ccctccacttacttccattccatcccacttctgcgctcccacaattggcgtctccgacaccccgcgccggctagaaaatagagatcaaaagagcgcgacgagcgcgcggcggcgggcgtagccatgctccacaagttcgcgctcgcggtcaagaccaagaccatcgagttcttcgccgaggaggacgaggacgaggacgaggacgccgaccggttcgcgcgctctctgttgccgggggcggacggggtacttgccgggcagcgggttgtcgtgctgaagcccgacccgccgaaccctaaccctagcgcggatggggacgggaaggcggcgtccgggcaggaggccgccgtcgccgcggcgctcgcgacggcctcgtcgttccaggcggcgtacctgcacctgcaggccgcccacacgccgttcctgccggacgcggcggcggccgcggacgccgccgcggtgtcgcacctccggcggctgtcggagttgaagcggatcgcgagggacgggccggtggacccgcacggcggcgggaccgggaccaccctcacggcgcacctcgaggcccaggtgcgcgagaaccaggcgctgctgcggtccttggacgccgtggtgaaccgcctgcaggccgcgctggacgccaaggacgccgcggccgccgcgctgcggctggacctcgaggcgctggacggcggcaacgcgcggctcgcgggccgcctcgaccgcgcgctggcggccccgcccccgccgcagccgggcggcggcgacgccgtcggcgcgatgctgtccgcgggcgtcttcgactcggtgctccgcgacgccctccgcgtggcgcaccggttcgcccgcgcgctcgccgaggtcctccggcgcgccggctgggacctggccgcggctgccgaggccgcctaccccggtgtttcctactccaaggccggccactgccgctacgcgctcctctcccgcgtctgcctctccatgttcgacgggttcgactcgcaccaattcggcgccacagctggcacggcagagctcggaggaaccgagccggcaacaacccgtaggaacgagtcgttgcggcaattcatcgagcactcggacgcagaccccatggagctggtgaactcgaggccggactgcgagttcgcccggttctgcgaccgcaagtacaagcagctgatccatcctggcatggagtcctcgctgttcgggaacgcaggctgcgggacgctgccggtgatgagcgtggccggcccactctacgagctgttcgtcgcaatggcaagctcggtctggacgctccacaggctagcctgggcgtatgacccagcggtcggcgtattccaggttggccggggcgcagagttctcgatggtgtacatggagaacattgtccggtcgtccaagggtctcgcggggagcagggagcccgggaagccggcgcgacgaccgaaggtcgggttcaccgtggtgccgggcttccggctcggagggacggtgatccagtgtagggtgtatctagatcacgggaagaggggagaggaaactattatagactcgatttgagatgaagcgaaactttatatatatgtatgtatagtcaaagaaagaaactgtacattcgaaaacgaaaggaggttattatatgtgtaaaggcggtcaagaacagcgcgtggaaataatctgcaggatcgaagtcgctggtcaatgatgagtataaagaaagctactaagtatcttttgttttagggtttttttagctgaaaggaggggaaggggtagtattgtgttgggctgtgtacaaaaaggtcatcaggttcagagagagagaggaagagagctttgtgttctaacagaatcgaagagttattattatttatctaatcttcggtaacttatttgtctgtagctcggttccacctgtaaatgtgtacttatgagcacgtgcttgcggatctctaatatttagaaacccagctcatgcac

SEQ ID NO: 130273 - DNA, 1716 bp, Zea Mays
atggacgctccggccatgttcacgcgcaagcacgtccccgaggacatcggcctccggaacatcggcgtcggcgaagcggaggacgatggagccgggggccaggcccagctgcaccgcgacgagaagcagcacaagccggtgctgaagaaggttaaggagaaggtgaagaagatcaagagcaccctcgctggccacggccacggccacgacggtgagcacggcggagacgagcgcatgggagaggaagacgcatatgccggcagcgacagcagcgaggagggggaggaggacgcggtggagagggaggccgcgctggagaaggatggctacatggaggacatcgaggataagcccgtcgtcatggagtccgaccccgaccccgaccccgatgtgcacggcgcgccaatgtacgagtcggcgagggctccggccgtgcaggacctcgtcgccgagtacgatcagccggcgtggacgccggccgtgcgagaggtggagggcgacggcgtctcacctagggtgcggctcggtgacgtcggcggccccgtcgtcgaggatccggccgcgccgcgctccaagacgcccgccgcacgagagggtgaggacataggcacgacgcccgtggtgcagcagtttgagaccatgagcttgtccgacggtccggcgcacgtgggcgcggccaaggagggcgccaaagcagaggagtgggaaggcaatgccgcggatatggtgggcggtgtggccggtggcgctagctacacggacaggctcaagaacgcggctgccggcaccacggagtacggcaggaagctagcgagcacggtgtatgagaaggtcgccggcgccggcaccggcaccggcaccgctgtgggcgtggggaagcgcgacgacgaacgcacagaggcggtgccggcgtcgaacacccgcacggacgcggcgagaggcgcggggtacacggacaacatcaagtcggcggccgcgggcaccactgggtacggcaagcagctggcgtccaccgtgtacgacaaggtcgccggcgtcggcaccgccgttgcgcccagccgccgtcagcaggagggctcggcgaaggcggaaggcgcacacagcgaggcaatgccggtgtcggacaccggcgccgaggagtggaaggacgccccagccactgtggaggaggccaacaccgagtcgaggccgggctatacggacaagatcaggtccgcggctgccggcacaacggagtacggcaagcagctggcgagcaccgtgtacgagaaggtcgccagcgtcggcacagccgtggcgggcaaggttcagcaggccacgcagtcggccggcacggcgacgcccggggtcggcgcgcagcgggacacgggtgccgccgccacggccacccccggcgccggcgagcaggacaagggggtgaccgtcacggggtacatcgccgagaagctccggccgggcgacgaggaccgcgcgctgagcgaggcgatctccggcgccgtgcagcggcgcaaggacgacgccggggacacggtagtgcagcgcgtgccggcgcccggccaggccgtcgcgtcgctcaccggcgggaaccgggtctccgagaccgtacagccaaccacagccacaggggaagacgtgaaggaagggtatgcggcggaggcgcccgtgatccgcggggaggagatcggcggcgcgaagctgaacacgaatgccatctga

SEQ ID NO: 130274 - DNA, 3390 bp, Zea Mays
catcgcaccgcgatgccaaccctggtggcgtcacgcggcccggcggcttcttccgcgcgccgcattgcaatgccgccaccgccgctggacggacccgtgaaggagtactagctagctagctagcccagcggcagcgggcgaggcgaagggagcggaggtcgttcttgcagacatgttcaagtcgcggtggcgcggcggcagggccaaggccgtgttcaagctgcagttccacgccacgcaggtgcccgagctgggatgggaggcgatggtggtggtggtgacgccgcaggacgctggccggccgacggcgcggtcggagcccgcggaggtcaccgatggcgcgtgccggtgggcggcccctgtcatggaggccaccaagctccccaccggcaaggacaagatctaccagttcctcgtctatgagaccgggtcgagcaaggcggcgctgctgggggaggccacggtgaacctggcggagtacgccgacgcgttgaagccgtcggtggtgacgctcccgctcaagggcagccccggtgcgctgctgcacgtgaccatccagcgggtggtgggtggcgccggtgggtgcggagacgacgcgagcggcgagaacggcgacgctctgccagcggtggcgaagacgccaaagaggaggacgacgctgcagagccagctgagcaagtttgaggacgaggacagcgagaaggcaagagcagccgcggatgcgatgagtcctgtgcaagatggattgttgataagaaaaccgccagacatgaggtttccatcaagaagaaatgtgcctatgtctgctgatccagtgggccatctccacaatggcagcagtttcgatgccgtctcagtgtcgggttcagatggaagttctgggcgatatacccccaaaattagcgcaagcacacacaactcatttcttcaggatagtagcaatgctctctcgccatttgccaacaatcgcaccgtgaggaacccattgaccagttctggtgactggtcaggaagctcagctcctgatgctagtacggatgggtcaacaagcaattctggtgaggcagggttaagaggggaagaggatgatgtagataagctaagaagtgagatagccactttaaccaggaaagtggatgtttcagatatggagttgcagactctccgaaagcaaattgtgaaggagagtcggcgtgggcaagatctcttcaaggagatgagtagcctgagggaggagagggatgcactcagaagagaatgtgaaagactcagaggggcaaagaatatgatccatgattcaaatggctcagagaaacggctctcagatggggatgacccatggtcacagattgaagaactgaagcaagatctgagtcatgagaagaatctaaattcagatcttcgtctgcaacttcaaaagatgaaggaatccaactctgagctgcttctggctgtgaaagatcttgatgagtcgttggataaaaaaaacagagagatttccattttgcaagaggatacacaggaggatcagcaggaggcagaatatgagcatgcgctgtcaaatgtgcacaactctggacagaaattagccttatctgaaacgagttcataccaagagaaggaagatgagcttatgctggatgcactggcaaagaagcgtgatgacatctctacctctgagcttgaaaagaaagtccttgagttgagcaatgaaatcgagttgtacaagaaagaccgtgaggatatcgagatgcaaatggagcaacttgcacttgattatgagattctaaagcaagagaaccatgacgtgtcttcgaggctggagcaagcacaactgagggagcagctaaggatgcaatatgagtgttcggctcatttagctattataagtgatcttgaggccaatgttgagagcttggataatgagctccagacacaggctaaaaagtttgaagctgacatagcagaaataacgagcgcaaaggtggaacaagagcagcgggccattaaggctgaggattctctgaggaagataagatggaacaatgcagctactgcagaacgacttcaggaggaattcaaggtgttgtcttcacaggtatcttccgctttcagtgcgaatgaacgacaccttgtgcaagcaaggaaagaggtcgcggagctgcagttgcagaagagccagttagaagagttgctgcagaaggcccaaggagatcttggatcagttcaggatcagcaccgggcgaaggtccaacagttaataaccctagtggatttcaagtcaaaggagatagacaggctactgacggagctcaaaagcaagagtgacgagttccatgaccaaaaaagatgcgatgaagcaaggctgaatgctctgtcagaagaaatggacctactcaatgccaagatcgacgagctatccagcgagagaaacgacctctctgaaaagaacgcgcagaaagacaaggaactggccggaatcagtgaaaaggacatgcagttgcaagacaagactgctgagatcacttcactaaataaggagcttgtatctctcaaagaccaagtgaagacgcatctggacgaactgcacgatttaaaatgtctgaaggacaggaaggaggagacaattggaaaactgcaaatagatattgggtcactgaaactccagtgcgacaacttgaagacttcgctgtccaagaaggagtccgagaaagataaccttgcctctcaggtgctggagctgagaagatcccttgagacccgggaagaaggggcaaaggcaaatggccaaaattcagacgcgaagaacaatccgcatactaataataagcgcatgaagcacaataccggctccaccgggagcattgctgcactgccaggcaccaacggacagggtgaagacgatggtgactgcaatgggcatgacatgaggaacgccgcagcggacggggcagcgaaggagctggcctcgctgaaggagagcagcaaggcggtggaggaggagctgaaggagctgcacgagcggtactcggcgattagcctgaggctcgcggaagtggagggcgagcggcagcagctcgtgatgaccgttcggtcgctgaagaactcctccttgcggtgactgatgcatctccacccaaattgctgtagctaaaaggatttagacgataggtttgtccgtgacgtggttttgtccgtcagagttacagtacacagcatgtagatctcgtcacagtaaaatgtgcagtaatatagccataagttgtaatagttgtcttaccctctctacagtgtcagtgtgtcgtgctgtataatttccgtggcgtcattgtgttgtgaagtaaggaaaatgagaaggaaaagagtggtctttcagtttaatctcagaaa

SEQ ID NO: 130275 - DNA, 619 bp, Zea Mays
ccacacttccagacttggcaaccccaacggctacaagagcagagcagagccggcagcacgcgagagacagagagagacaactcgggcgcgatggacgtgtacatcgcggaggagtacgtggcccagcggcgcgccgagaggagggccgcgcgcgtcgccgcggccgcacgctgcggagaggagaaggcgcgggcggacagcgagcagaagcggcggtggacggaggacggcaagcggcctgccgacggcggcgatgccggcggtggcgccgccgccgcctggctgcaggcaggggaggacgccgttctcagctacttgtcggcttaggacacgtgcgtgcggtacgggcggacgtgtctccctgcgtgcgtacgtccagctaggcaatgcaaatagacacacatacacacacacatgcgccaatgccatgcacaatttgcgtggattgcgtttggtggagccaagtcagtcgcgtgcatgtggttgctgggcgataccagttcagctcatccaccctttttttttttttgccatggccaattggccgccaccgcgccacgtctcgcggatatagaagttcatgtctggcagtaaaaataaactggcctcgcttgatcta

SEQ ID NO: 130276 - DNA, 313 bp, Zea Mays
acatatcattggcagtatatggacaggtcaatctgtgggggtattgtcttaatttccgttccaagttcttgctcaatcctatatctgcaaaacaaggtgggggtcaggaatctggatgcgagacaagagaaacaggccactttattaacgcaggcttacaagttgaaacggtcttcataagtgatcaagttcactgccaaaccaaggtgtccatatctcccagaacggccaacctaggaatttgacaacacacataaatatttaattcaggaaggttataaaacaaacagcttctagacaagattaaaaaaaa

SEQ ID NO: 130277 - DNA, 2612 bp, Zea Mays
agccgcgtccccgcccgcgtccggtcctccgccgccaccactcacctcccttctgacccaaccggcgccctccccctcggccctcgcgttccacgaccacgagccgtgctctcgcgtgcgcgtcgcgtcgcactcgcatcacgaattcacgattcagccagcaacgcatcaccccttcccacccccacagggaccaggcctccaccacccaccttacccaggccataccccccgccccgaccgggggtctcctatcctcctgccctcaccgcgggtgcccgcaccgcgcggcgacgcctccccttcaaatctcccaggagctaggggcctcggccaccaccaccgcaccgcaccgtctcggacgcggctgcagctccgagcattggattccgaccaactgaccgagcggcgtgtcagatgatctcgccggcgatgtgtcgttcggcgccgcggcgggccgcgcaggtccggcgcctcctgtcgtcggccgcgcccccggcgcacgccggcgctgccgtgcctgggccctgcatcgtgcacaagcgcggcaacgacatcctccacgatccgtggtacaacaaggatacggcgttccccatgacggagcgcgaccgcctcggtctccgcggcttgctcccgccgcgggtcatgtccttcgagcagcagtacgagcgatttataaactctttccggtcgctggagcacaatacccgcggcgagcctgactccatcgtcgcgctggccaaatggaggatcctcaacaggttgcacgaccggaacgagacattgtactacagggtgctaattgacaatatcaaggattttgccccgataatatacactcccactgttggcttggtctgtgaaaattacagcggtctgttcagacgaccccgtgggatgtatttcagtgcaaaggataagggggagatgatgtcaatgatttacaactggccagcagagaaggttgacatgatagttgtgactgatgggagtcgcattctaggcttaggtgaccttggtgttcagggcataggtatacctattggtaaactggatgtttatgttgcagctgctggtattaacccacagaaggttcttccaataatgcttgatgtgggaacaaataatgaaaagcttctggaggacaagctatatttaggactgaggcaacctcggctggaaggagaagaatacttggctgttgtagatgaattcatggaggctgtccatgcacgttggcctaaagcagttgtgcagtttgaagacttccaaatgaaatgggcctttgagactcttcagaggtatcggaaccgattttgcatgttcaatgatgacgtacaggggacagctggagttgctctagcaggcctacttggtgctgttagagcacagggccgtcctctccaggattttacgaatcaaaagatagtcgttgtgggagctggaagtgctgggataggtgtgcttagcatggctaaacaggcaatgttaaggatgcctgggatccacagaaccggggaagggcataatcaattctgggttctggacaaagatggccttattacgaaagctaggaaggacctggattctgcagtggcgcgttttgccagaggctttggtcctgatgaggtcccagatctctatgagggggctagtcttgttgaagtggtcaagaaagttaagccccatgtgcttttaggactatctggagttgggggcatatttaatgaggaggttctcaaagctatgaaagaatccgattcccctcggcctgcagtttttgcaatgtccaaccctactactaaagctgaatgcactcccgatgatgtattcaagcatgttggagataaagcgatatttgctagtggaagcccttttagtaatgtttctttaggaaatggtaaatctggttatgctaatcaagcaaacaacatgtatctatttcctgggattggtttaggtgcccttctttcaggtgcccggcatgtttcagatggcatgcttcaagcagcagctgagtgcctggcatcatacatcacagacgacgaaattcgaaaaggaatcctcttcccttcggtctccagtattaggcacatcaccgcacgtgtcggcgcagcagtcgtccgtgccgctgttgctgaagacctggctgaggggtgctgtgatgtgggtcctagggagcttgggagtatgtcagagtcggaagcagtggactacgtcgctcggaagatgtggtaccctatttacagccctcttgtgagcgacaaataataaatccgaagatctcgatgcctgcgcagaagcagatgttccattgaaggaatgtatcggatttgatatttttcttaaccatctctaaattagctgctcatctagaaagcatttcggcagagattggtgcccacgcatatggctaatgtatggctacattcatttgctctagacatgatttcgtcaccaggggacactcagttttgaaccgttgagcttcatactgccacgggaaccgtatttttcatcattattgtaatataaggcgccggagtttctgtcctgaaaataagcatgagatcagaagcgatatgatatcctttttataccaccaagaa

SEQ ID NO: 130278 - DNA, 2614 bp, Zea Mays
agccgcgtccccgcccgcgtccggtcctccgccgccaccactcacctcccttctgacccaaccggcgccctccccctcggccctcgcgttccacgaccacgagccgtgctctcgcgtgcgcgtcgcgtcgcactcgcatcacgaattcacgattcagccagcaacgcatcaccccttcccacccccacagggaccaggcctccaccacccaccttacccaggccataccccccgccccgaccgggggtctcctatcctcctgccctcaccgcgggtgcccgcaccgcgcggcgacgcctccccttcaaatctcccaggagctaggggcctcggccaccaccaccgcaccgcaccgtctcggacgcggctgcagctccgagcattggattccgaccaactgaccgagcggcgtgtcagatgatctcgccggcgatgtgtcgttcggcgccgcggcgggccgcgcaggtccggcgcctcctgtcgtcggccgcgcccccggcgcacgccggcgctgccgtgcctgggccctgcatcgtgcacaagcgcggcaacgacatcctccacgatccgtggtacaacaaggatacggcgttccccatgacggagcgcgaccgcctcggtctccgcggcttgctcccgccgcgggtcatgtccttcgagcagcagtacgagcgatttataaactctttccggtcgctggagcacaatacccgcggcgagcctgactccatcgtcgcgctggccaaatggaggatcctcaacaggttgcacgaccggaacgagacattgtactacagggtgctaattgacaatatcaaggattttgccccgataatatacactcccactgttggcttggtctgtgaaaattacagcggtctgttcagacgaccccgtgggatgtatttcagtgcaaaggataagggggagatgatgtcaatgatttacaactggccagcagagaaggttgacatgatagttgtgactgatgggagtcgcattctaggcttaggtgaccttggtgttcagggcataggtatacctattggtaaactggatgtttatgttgcagctgctggtattaacccacagaaggttcttccaataatgcttgatgtgggaacaaataatgaaaagcttctggaggacaagctatatttaggactgaggcaacctcggctggaaggagaagaatacttggctgttgtagatgaattcatggaggctgtccatgcacgttggcctaaagcagttgtgcagtttgaagacttccaaatgaaatgggcctttgagactcttcagaggtatcggaaccgattttgcatgttcaatgatgacgtacaggggacagctggagttgctctagcaggcctacttggtgctgttagagcacagggccgtcctctccaggattttacgaatcaaaagatagtcgttgtgggagctggaagaatccagtgctgggataggtgtgcttagcatggctaaacaggcaatgttaaggatgcctgggatccacagaaccggggaagggcataatcaattctgggttctggacaaagatggccttattacgaaagctaggaaggacctggattctgcagtggcgcgttttgccagaggctttggtcctgatgaggtcccagatctctatgagggggctagtcttgttgaagtggtcaagaaagttaagccccatgtgcttttaggactatctggagttgggggcatatttaatgaggaggttctcaaagctatgaaagaatccgattcccctcggcctgcagtttttgcaatgtccaaccctactactaaagctgaatgcactcccgatgatgtattcaagcatgttggagataaagcgatatttgctagtggaagcccttttagtaatgtttctttaggaaatggtaaatctggttatgctaatcaagcaaacaacatgtatctatttcctgggattggtttaggtgcccttctttcaggtgcccggcatgtttcagatggcatgcttcaagcagcagctgagtgcctggcatcatacatcacagacgacgaaattcgaaaaggaatcctcttcccttcggtctccagtattaggcacatcaccgcacgtgtcggcgcagcagtcgtccgtgccgctgttgctgaagacctggctgaggggtgctgtgatgtgggtcctagggagcttgggagtatgtcagagtcggaagcagtggactacgtcgctcggaagatgtggtaccctatttacagccctcttgtgagcgacaaataataaatccgaagatctcgatgcctgcgcagaagcagatgttccattgaaggaatgtatcggatttgatatttttcttaaccatctctaaattagctgctcatctagaaagcatttcggcagagattggtgcccacgcatatggctaatgtatggctacattcatttgctctagacatgatttcgtcaccaggggacactcagttttgaaccgttgagcttcatactgccacgggaaccgtatttttcatcattattgtaatataaggcgccggagtttctgtcctgaaaataagcatgagatcagaagcgatatgatatcctttttataccacc

SEQ ID NO: 130279 - DNA, 2863 bp, Zea Mays
agccgcgtccccgcccgcgtccggtcctccgccgccaccactcacctcccttctgacccaaccggcgccctccccctcggccctcgcgttccacgaccacgagccgtgctctcgcgtgcgcgtcgcgtcgcactcgcatcacgaattcacgattcagccagcaacgcatcaccccttcccacccccacagggaccaggcctccaccacccaccttacccaggccataccccccgccccgaccgggggtctcctatcctcctgccctcaccgcgggtgcccgcaccgcgcggcgacgcctccccttcaaatctcccaggagctaggggcctcggccaccaccaccgcaccgcaccgtctcggacgcggctgcagctccgagcattggattccgaccaactgaccgagcggcgtgtcagatgatctcgccggcgatgtgtcgttcggcgccgcggcgggccgcgcaggtccggcgcctcctgtcgtcggccgcgcccccggcgcacgccggcgctgccgtgcctgggccctgcatcgtgcacaagcgcggcaacgacatcctccacgatccgtggtacaacaaggatacggcgttccccatgacggagcgcgaccgcctcggtctccgcggcttgctcccgccgcgggtcatgtccttcgagcagcagtacgagcgatttataaactctttccggtcgctggagcacaatacccgcggcgagcctgactccatcgtcgcgctggccaaatggaggatcctcaacaggttgcacgaccggaacgagacattgtactacagggtgctaattgacaatatcaaggattttgccccgataatatacactcccactgttggcttggtctgtgaaaattacagcggtctgttcagacgaccccgtgggatgtatttcagtgcaaaggataagggggagatgatgtcaatgatttacaactggccagcagagaaggttgacatgatagttgtgactgatgggagtcgcattctaggcttaggtgaccttggtgttcagggcataggtatacctattggtaaactggatgtttatgttgcagctgctggtattaacccacagaaggttcttccaataatgcttgatgtgggaacaaataatgaaaagcttctggaggacaagctatatttaggactgaggcaacctcggctggaaggagaagaatacttggctgttgtagatgaattcatggaggctgtccatgcacgttggcctaaagcagttgtgcagtttgaagacttccaaatgaaatgggcctttgagactcttcagaggtatcggaaccgattttgcatgttcaatgatgacgtacaggtatcctgattcttaaactattattacgtaatttattctggaaagctttttctgaccagttttatatattattgtttgacgggcttatcctatttaaaataggggacagctggagttgctctagcaggcctacttggtgctgttagagcacagggccgtcctctccaggattttacgaatcaaaagatagtcgttgtgggagctggaagtgctgggataggtgtgcttagcatggctaaacaggcaatgttaaggatgcctgggatccacagaaccggggaagggcataatcaattctgggttctggacaaagatggccttattacgaaagctaggaaggacctggattctgcagtggcgcgttttgccagaggctttggtcctgatgaggtcccagatctctatgagggggctagtcttgttgaagtggtcaagaaagttaagccccatgtgcttttaggactatctggagttgggggcatatttaatgaggaggttctcaaagctatgaaagaatccgattcccctcggcctgcagtttttgcaatgtccaaccctactactaaagctgaatgcactcccgatgatgtattcaagcatgttggagataaagcgatatttgctagtggaagcccttttagtaatgtttctttaggtaattccttccttgctatctttaacattgtttgctagcaatactttctagtagacagctaatgctggggtcttgatttcttaggaaatggtaaatctggttatgctaatcaagcaaacaacatgtatctatttcctgggtatgacaacctttcaccttcaagtatttggcttttgtgttttactgatagaagtttttccgaaaatcaggattggtttaggtgcccttctttcaggtgcccggcatgtttcagatggcatgcttcaagcagcagctgagtgcctggcatcatacatcacagacgacgaaattcgaaaaggaatcctcttcccttcggtctccagtattaggcacatcaccgcacgtgtcggcgcagcagtcgtccgtgccgctgttgctgaagacctggctgaggggtgctgtgatgtgggtcctagggagcttgggagtatgtcagagtcggaagcagtggactacgtcgctcggaagatgtggtaccctatttacagccctcttgtgagcgacaaataataaatccgaagatctcgatgcctgcgcagaagcagatgttccattgaaggaatgtatcggatttgatatttttcttaaccatctctaaattagctgctcatctagaaagcatttcggcagagattggtgcccacgcatatggctaatgtatggctacattcatttgctctagacatgatttcgtcaccaggggacactcagttttgaaccgttgagcttcatactgccacgggaaccgtatttttcatcattattgtaatataaggcgccggagtttctgtcctgaaaataagcatgagatcagaagcgatatgatatcctttttataccacc

SEQ ID NO: 130280 - DNA, 465 bp, Zea Mays
acagctggctggcattgacgcgccatacctaaaagtgaaaacacgtgttctggcatctcaccgggacatagttcgtcctgctctcagaaatgttgatgacataagaaattggatcagaaacattgaacaacatgcttcggataatgtgaacaaaattctggtggggaataaagctgatatggatgaaagcaaacggcttttcaagtggtggtgaagatggatatgtaaggctgcatcattttgattctgactactttagcatcaaaatgtagataaagaacagacgaatcagaggctgtttgattaccaatcggttcagtttcttggtttagacttcagatgttagatgttgctggttggccatggagcatgtagagcaggctcagatcctaggtttttggtctgcttgtttgatgatgttgctgctctggataggcagctttttggtctgcttgaggaatttgt

SEQ ID NO: 130281 - DNA, 1392 bp, Zea Mays
atggaaggtttgcccagacgcgctctgattccttgctccacactctctcctgctcttgcgctctacatggaaggcgaggccaacgcccaaatcgacggaatccctgctcccgcgctctacatggaaggcgaggccagcgcccaaatcgacgggatcactgctcggacgggattgcagcctcgatccgtgctctccaggatggcaacaccctttataatgagcttgaagttgtggagggtatgaaacttgacagaggttacatctctccgtacttcattaccaactcaaaaacacatgaatatcttagttgtactttttgtatcacaggaaccagaagatccattgatcttaattcatgacaagaaagtgacaaatatgcatgccgtggttaaggttttagaaatggctctaaagaaacaaaggcctctactaattgttgcaaaagatgtggaaagtgaggtattaggtactctgattattaacaagcttcgtgcaggcatcaaggtctgtgctgtcaaagctcctggttttggggaaaacaggaaggcaaacttacaggacctcgctatccttaccggatgagaggtaatagctgaagagctaggaatgaaccttgagaatgttgagcctcacatgctgggttcatgcaaaaagcaggccagaaaccagtgtactaatgtgtttgaacttcattacaggccttcagtaaaaataccagtctctgttatgatgccagtggctcatgttgtagaatggacttaccagaaatttgccaagtatggaatggaagttcctcagctgaccccttcaaggatcaggctgctttcatgtaacaggacattcagttgctcaagagcaaaggagcagcttggttatgaacctctcgtgtcccttaaggtctgtcttctaaaggagaaaatgactcttccaaggtccttgcttcaattcatcaaaatgtcattccttcaatgtcaaacccttccatcttatgggaccgtaggtgacctcatcacgagtggagcattcaggcaggtctacctcgacatggacctcgagtccaatgagatcctcgctgtcaaacaggctgtgttgtttgatcaaaggtatattgggatggcatgggaggaaaacacgctaaatattctactagaatttgttcctggaggctccatccgatcgctacttgggaggcttggatcattcccagaggttgtaaaacttgttagggtaaacaaaagaattcaagaagcatactgtgctgaactttatttaacaaaggtcaatgatcctacagacaacatcaccttcgatcttcagccttcagatgccataaacattgttgttcgttgcaaggtttgccttatggataaggattatattgttatgacatga

SEQ ID NO: 130282 - DNA, 740 bp, Zea Mays
ttaaactctttggaaatgttaacgcattaaaaggtatacggtatcagtaaaccttacaagtgtgatgccaaagggaaaacggcatcagctgacacattgctatattcctgtttatttcgtccgaataaagtatataacttaagaatggggctcttgctccacagcagctcgagcaaaaatgtacaaagaaaagcagctcgagtagagagaatttgccactctctcgacagattgagctgctgccatggcgctaattcacgacacgtttgatgtctcggcaagacggggaggagctcagtaagtgagaggataaaaaaaatggaatcaggttggagggtgaagtatacacgggtagaaaaattgactccaggcctcaattttgggtcttctccaccttggccttgatcttctgctcgatgatcgccttctccgtgtcgaggctgaacatccggttgagagcatgcatgttctcgagcgtctcatcaagggtgcggctgttactaccgtcgcacctcaggtgctgcagcgggccgtggaggagcttgttcacgatgccggtgcttagctcctcgatggctctcctcatcttcttggtgagaacgtcatccccgatcttctgtaggcacttctcgagctctgaggctcggatcctgtcggcatatgacctcagcttcttgatggttggaacggtctccagcgagtcccgccatgcctcaaaccgtttcagctcttcggtgatg

SEQ ID NO: 130283 - DNA, 1649 bp, Zea Mays
gccttcggttggaagctccgttcctaaccaacacaacacaacacccttctgtttgagagagtctcttgcgttgcgttggcggtcggtcggtgggtcgcgaggatgacgccggcgagcgtggtcgccatgcccaggagcgtcccgttggccttggcgttggcgccgttcccggcgcccgctagggccgaggagaggaggaacgcccggtccttcaggccctcggcgtgcggcgccggggacgaccagaagccgccgtccatggccgcgatgccggcgtcgctgcgcaccatccagaccaggaggaagcaggcggcggcgcagcgaggggtgccgcgggcgacggccacgagcgcggccgggtgcgccgtggcggctcttgtcaaggccatggaggccgtccagggcgcggcggctgggggcgccaccgaggccgcgcgcggcgccggggacgccgtggcgtgggtcttcagcaaggttcacctccagtcgccggacctcgccgtcgggctgccgctgctcgggatggtcgcctgctgcctcggcacgatcgtggaggcggcggaaatgggccgcgtggaggcgaagaagcccgaggcgtcgtcgggcgacgcagaggccgaccaccccgacggcaacggggacgcggccgccgaggaacccgaggacgacgacgacgacatgccggagctggtggaagcggacatcgagaaggagctgtggggccagatcggcatcttgcatggcggcggcctattcggggacagctcctacgtccatgaggaactcgacgaggaagagatcaaggagatcgacagcgcccgcgcgcggcgccggaaggcggcgtacgagagggccatcgcctcaggcggcgccaactcgctcatcatgtccaactacgcgcagctcctctacgagttcgacaaggacatcgacagggcggagatgtacttcaagcaggcggtggccgccgagccagcggacggggaagcgatgcggaggtacggcatgttcctctggcacgcccgcggcgacattggcggcgcggaggacatgtttaccggcgccattgacgaggagcccgagagcagccaccaccggagcagctacgcgtggttcctatggatgaccggcggcgtcgagacctgcctcatcgacaccaccggaaagcagaacaatggcaacgacgtcgaatgaaccgcagcccttcgatcggaattcggaaaaaaaaacaatcaaagaagacaggaaaatacctactaccttgccaccggcaagtgcccggcggcgggccggccatttagatggtgcgtctaggtatcgccgtgccgcgcatgctcgccaatggctatacttccatgagcagcatcggcccttgtagtggccagttttccagtatactagtagatggatgcgcatcaaggagccaacccaggaccacgaccaggaggcaaacaataatgtttggcaaagaaaagttagggcatgatgcgatactagcactagtattatgtggaataaagcactagtagatagtaatgtttttatatataactgcggcgatgtgaacagtaataataatatatgcgtgtgggaaccatatatagtgcttctatgtatatggttacattgctgctgatattcttgagaca

SEQ ID NO: 130284 - DNA, 3242 bp, Zea Mays
tgaccctccgcacggatcctctccgtcctcaccctcttctccctctccctccctctccatatctctgcaggtctgcgaggtagtaccgtcgacgaggcctccctcccctccggcgagccccccttccgaagtcgtgaggcagtgcttttgatattagtttttgcatttttgtggatcagtcctcccagggtttatgcatgacagcccctgtgtctcttccaaatgagctagaagcggtctcccattctgcaagggttgagttattccgagacgctagttgcaacatagaaaatgaggtgttggccagtttgggaaatggccaagattcaactgctgttggagcaactcctggtttcagagttggagagatcaggtttgctaatggagatatttattctggcacattgttggggaacacaccagagggttcaggccagtatcgctggtcagatggttgcacctatgatggtgagtggaataaagggatgaggcatgggcaaggaaagacggaatggccatctggagccacctatgagggtgagtattctggtggctatgtatatggtgaaggtacctataagggtccagataaaatcatttacaagggacgatggaagttgaatcacaagcatggacttggacatcagacatatccaaatggagacatgtttgaaggttcgtggattcagggagaaatagtaggtcatgggaagtacacgtgggcaaacggggacacttacgttggcaacatgaaaagtggcaagatgtcagggaaaggaactcttacatggaaaaatggggactcgtatgagggtaactggatagatggcatgatgcatgggtatggaatctatacatggaatgaatgtgggtattatattggaacatggacaaggggactgaaggatgggaaaggtaaattctttccgaaaggttgtagagtacctgttaacgacgagatgtatatcaataatctaagaaatcgtggtgtactgcctgatattagaaggcagaatcatggttcacgcatacttcactcttcctcggttgacatggggaacatgaaggttggtatggctaggcaatcttcagatgttttgttcaaaaggaattcagctgagcaatcttctttgaagaatgtgtctttggaaagacggtggagtcttgaggtggctattgaaaaatttattggccatgaatccagcgaaagttctggtctagaaagcttggaaaacttgagtgattctcgtttgcccatactggaaagagaatacatgcaaggtgttctaatcagtgaggtggttcttgacaggagtttttcagactcctcaaagaagacaaaacgccgccagaagaaaacggtgagggacacaaaaaagcctggagagacaataattaagggacacagaagctatgatttaatgctcagcctgcagcttggaatcaggtacacagttggaaagatcacaccaattcaaaaacgtgaagttcgtgcttcagattttggaccaagagcaagtttctggatgaacttcccaaaagaaggatctcggcttactccttcacattcagcggaagattttaaatggaaagactactgtcccatggttttcaggaatttgagagagatgttcaagattgatgctgcagactatatgatctccatatgtggaaattctgctcttaggcaactatcttcccctggaaagagtggaagtgtctttttcctgtcacaagatgatagattcatgattaagactctccgaaaatctgaagtgcaggttcttttacgaatgcttccaaactattatgatcatgtccgtacctatgagaacaccctcataactaagttttttggcctccacagggtgaaaccttctagtggtcaaaagtttcggtttgttgtaatgggaaacatgttttgcactgaattgagaatccaccggaggtttgatttgaaaggatcatctttaggccgttctactgataaaattgaaattgacgagaacacaactctgaaggatttggatcttaactattccttttatcttgaaccttcctggcgtgaggctcttcttaaacagattgaaacagacagtgattttttgagaacacagcggataatggattacagcctactgcttggtgtccattatagagctccacagcacttgcggacacgtgcatcttatcaccggagcatggcagcagatagattgactgttgtttcagaagaagatgctcaggaagatgatgcccttagccatccagaaggactagtcttggttcaaagcagtggtgagaacagtgttattgttggccctcacataagaggcagccgcttgcgtgcatcggctgctggatttggcgaagtagacctactgctgcctggaacagccaggcttcagatccagctaggagttaacatgcctgcaagggcagagcagacccctaaggaagatgaaagcaaaccgttccgtgaggtgtacgatgtggtcctctacctgggcatcattgacatactgcaagagtacaacatgacaaagaaaatcgagcacgctgtcaagtccatgcagtatgactcggtctcgatctcggctgtggacccccagttctactcggagcgtttcttgaacttcatccagaccgtcttccctgagaattcgtagctccatccaccaatacttttcttggaagatgcccgcccactaccacttgctgagaacttcatccagacgacagtccatgtcttcgaatttggagcttgcgagcatcataagaacattgcactctcttcagtgcgtgcctgttccttcctggatgaactggcaggaagagtggccaacaaaatgagattcgttagtgaaattgtgcagaagcaaatcgatcttctctaggctattttgccccgatccctggggtcaccggatcagccgtctggcttcctggagtaggcttggcgtattgggactcgagcaggaagtagatgtgagttgcgaggattctagtgacagcggcgccatagagctctgggattcactgttatgtctcggcagttgcagaaagctgaagcgcctgttgcctctggctcgtgtttcatctgttaaggtgctatggaggatatgtttaataagtccctgaaaacacgcatcaagctccgatacatttttttgtaggacaaacaaaagagtactatgtattttatcgcaaaaacgaaaagaaatggaagcaacagatgaaaa

SEQ ID NO: 130285 - DNA, 132 bp, Zea Mays
atggcgctccgggcggcctttggggcggcggcggcagtggtggctggcggggtcggcggtgttttgatgccttatctacctccactagacagtgttgcagccttatgcaccaacttcagccttatgccttag

SEQ ID NO: 130286 - DNA, 2428 bp, Zea Mays
atgttcagtcgccgtcgcggcgccgcgcgggagcccccagaaaagccgaggaggaggcagcgtacaccttctgcctcgctgcgccggcctcccaatcgatcgaggcggcgcagagcagaggaaaaccccgagccgcaaccctcctcaccgcacagcaactcgagtactcgttctcttccgcatcctcctcctcgtcaactccagtcgtcttcagcccttcaccacaatcaggcccacctcccaccaccacatttcttctcatccaaccgccccgtaggatcacagagaagggggatggcgagcggcggggcggtgagggatgtgggctcgcctgcggagctggaggcggcggtggccggggcgcgggcggtggccgtgcacttctgggcgtcctggtgcgaggcgtccaagcagatggacgaggtcttcgcgcacctcgccgtcgacttcccccacgcagccttcctgcgggttgaagctgaagaacaacctgaaatatcagaggcatatggagttacagcggttccatattttgttttctgcaaggaaggaaaaattgttgatactttggagggagtaaacccagccagcctggccaataaggttgcaaaagtagctgggcctgctagtgttgctgagtctgctgtacctgctagccttggagtcgctgctgggcctgctgtacttgaaaacatccaaaagatggcacagcaaaatggatcctctgctgctgaaagcacaaactctggcagtactcaagatgcattgaataagcgattggagcagcttgtcaattcccatcctgtgtttttatttatgaagggaaccccagaacaaccaaggtgtggtttcagccgtaaagtggtcaacattttgaagcaagaaggggtcgaatttgggagctttgacatccttacagataatgatgttcgtgaaggtatgaagaagttctccaactggcccacttttcctcaactgtactgcaaaggcgagctgcttggtggatgtgatattgttattgctatgcatgacagtggtgaattgaaggatgtttttgaggagcacaatattcccctcaaaccacagggtagcaaaaatgaagaagcaggtcagcccgagtctgcaactgagaagggtgctgcagttgctgaaccaatggggcttactgatgctcagaaatctcgtttggaaagccttattaattccagcccagtgatggtattcatcaaaggtacaccagaggaaccaaagtgtgggttcagtgggaagttggtccacatacttaagcaagagaatattcctttctcaagttttgacatcctttcagatgatgaggttagacaggggctgaaggtgctctcaaactggcccagttaccctcaactgtacataaaaggtgagctggttggcggctcagacatagtgatggagatgcacaagagtggtgagctgaagaaggttctgtctgagaaaggggttattccaaaggaaagcctggaggacagattgaagtccctggtttcctctgcaccggtgatgcttttcatgaagggcactcccgatgctcctcgctgcggcttcagttcgaaggttgtgaacgccttgaagaaggaaggggtcagctttgggtccttcgacatcttatctgacgaggaagttaggcaaggtttgaagacgtactccaactggcctaccttcccccagctctactacaaatcggagctgattgggggatgtgatatcgttcttgagatggagaagagcggagagctgaagtcgaccctgtcagagtagacacctagcattcttgcttcgctggcgtttttaccatattgcctgcattggatcactctactctggtattcatgccattgtattcatagatccacgttggtacttgtctgcagtgccacattgctagaattgtgacacatctgcagaaggaataacttacgcttgttcggtactgattgcattgttcttatatcaccagttctatttagcgggtggaagcttttttgttcgggtattgtcacgatttatagacggataaagtaaaatatttatagagtatatgtgtacgtgtaattgtgtatttaagtcatgccattgttcttgggaagtcacatgtggaaaattgactttcacaatgaacaagcttataaatctaattagaagtggttcgtacaacatttattcacaggaacggagataaggctggctcaaggctccagcaagggcagctaatagaactatgtgaagaaatttaattaaaaaaactaaatttaatagttatagcaaataattttataattgtgccaaaatggtacgtgtaggtctatatagtgtagcaacatatcataaaagtttggttaggaaaagaaaaaataaaaaaagtttggttgagaaaagaaaaaaaataaaaata

SEQ ID NO: 130287 - DNA, 1586 bp, Zea Mays
caaattttttcgcctcccaccccccaacgcgccgcggttgaaacaaaaacccccctccctccccctcgtcttcctcacaaatcccaccccaaaaaaaaaacgcctcccggttgctcgcctctatccgcattgaaaatctttgaaagaggtttcgatcccgaaaccgccaagggcccgccccgcaagtgcatggcagtgaacttcctggccaatgagttgtcggacctgtgcatcggcaagccggccgtgaggtcgctcccgctctccgccgccaccggcgaccttgccgccgccctccggagggtgtcccgctctggcgccgcagcctgcgtcgcggtgaccggaccagcgcgcgccgtcgtcggccgggtcggccccgcggacgtgctctgcctcctctgcaccgaccctgaggcgctcgcgcgccccgccgcggtcttctccaagccggtctccgcgctcctgcctaaggacggcgccggagaggtccgccgcgtcgatccccgctccagtatcttggaggcccttgatgcgattctgagcggggcgcaggtgctggccgtccccctccgcgctggcgggcgcaagaagcagctcgttggcgccgccgacggcgacttctgctggctcacgcaggaggacctcgtgcgctacttcctcaactacatctgcctcgtctacaatgtggcggcgcgctccgtgtcctccctcgggctcgtgcgcgccgacttcctctcggtgcgccccggcgaggcggccctgtccgccgtgcccctcatccgccgcgccgtcgccacggagacggcggttgccgtggtcgccgaagacgggcacctcgtcggcgagatctcccctgcccttctcgcggcctgcgacgagacggcggcggcagccatcgccacgctctcggccgccgacctcatggcctacatcgaccactacgtgtcgccgcctgagcacatcctgcgcgccgtcaaggccggactgaaggacaagggcctggacgccttgcttgcgctggttgaggacgagacgctgtcatcgttctcgtccctctcctccgcgtcctcctcgtccgacgaggaggcaggccgggcgcagctgaggcgtccgtcgtcggggagctacgggcggcgggcggctgacgagccggtggtgtgcagccccgcgagctcactggtggccgtcttggtgcaggccctcgcgcacagggtgagctacgtctgggtcctcgacgaggacaacgactgccgcctcgccggcatcgtcacgttcgcggacgtgctgagggttttccgggagcagctgctgtgaggcctgacgagtgcttactgtttcctggctcccatcttgtggtgtcatggaattgagaagaatatgagctcttgtttctgaaacatttttatttgaagagtatgtgtttgcttgcttggtagccagttcagaattcagatgaacagctttgacattggtgcgttttcattaaatttcttcctattaataaggcagcactgtggcttgatgcggtaggttgtttgtgcttaaaactgtatcttgataaccgaaaaaattaatcattcttgaac

SEQ ID NO: 130288 - DNA, 832 bp, Zea Mays
caaattttttcgcctcccaccccccaacgcgccgcggttgaaacaaaaacccccctccctccccctcgtcttcctcacaaatcccaccccaaaaaaaaaacgcctcccggttgctcgcctctatccgcattgaaaatctttgaaagaggtttcgatcccgaaaccgccaagggcccgccccgcaagtgcatggcagtgaacttcctggccaatgagttgtcggacctgtgcatcggcaagccggccgtgaggtcgctcccgctctccgccgccaccggcgaccttgccgccgccctccggagggtgtcccgctctggcgccgcagcctgcgtcgcggtgaccggaccagcgcgcgccgtcgtcggccgggtcggccccgcggacgtgctctgcctcctctgcaccgaccctgaggcgctcgcgcgccccgccgcggtcttctccaagccggtctccgcgctcctgcctaaggacggcgccggagaggtccgccgcgtcgatccccgctccaggcaaggctcaactgtcaactcctatccttcctccgctcttctcggtctgtgcaaacgacgcgtgggattcgttcgagattggaagaacgctaaggccgttcatcacgaggaaacacggttttttggtaaaaaaagaaattccttaataaaagctgcgatagaaatcgattttatgaggcaactttcatccctcatcatgattacttggcgtgctgactaggctagtgtcatttttcttttattttgggtcccaattccaagacagacgacagacgagcgttcatcctcatcatgattacttggagggtttgatctctgct

SEQ ID NO: 130289 - DNA, 1481 bp, Zea Mays
gatcgatggattctacggttcctgcctgtcaagtgtttgtcctcgtctcgtcttcggaaaacaacaaacgacaagtccaaggcagagtagattttagaccgaaatataccaaaaactggatcgaaaattgcatatcggactggactgagtacgaaaaaaaaaataccgagggaaagttcaagtgttcaaccttgaatggccatggccttcttttcgttttcgttttttttttgaagaacagacagacttgaaagttgagatatctcactaatccccaaaatgtccctataaaactgatgatctgctgatgagacatcccactcgccggccgtccttgaagagcgagcagcaatggcgcaggagatcgagcacacccacctccccatccgcggcctcaacctccacgtcgcacaagtaggcacaggtgaactgggcacggtggtgttcctgcacggcttcccggagatatggtactcgtggcgccaccagatgcgggccgtggccgcggcggggtaccgcgccatcgcgccggactgccgcgggtacggcctgtcggagcagccgccggagcacgaggaggtctctcctgacgacctcatcgccgacgtgctgggcatcctcgacgccctcagcgtcccgaaggcgttcttggtgggcaaggacttcggcgccatgccggcgtacgagttcgcgctgcagcacccgggccgcaccctcggcgtggtgtgcctgggcatccccttcaacccggctcccatgtccttcgacgccatcatgcccgaaggattctacatcctgcgctggcgcgagccgggcagggcggaggccgacttcggccggttcgacgtgaggcgcgtggtgcgcaccatctacgtgctcttcgccggcgccgagatcccgattgccaaggaagggcaggagatcatggacctggccgacctgtccacgcccctcccggagtggttcaccgaggaggacctggacgcctacgccaagctctacgagaagtccggcttcgggtacccgctcaagatgccgtacagatctatgcacaagctcccgaaccggctggacgccaagttccaggtgccggtgttcatggtgatgggggagaaggactacgcgttcaagttcccggggttcgagaccgccatgcgcggcggcgtcatggacaacttcatgccggacctcaagatcacctacatccctgaggggagccacttcgtgcaggagcagctcccagagcaggtcaacgacctgctactcggcttcctcagggaccatccctccgccgcataagcagcgggtgagaccgtcagaataatggaatgcttcctgagcaacggtttctctactctattgccgttgcctggatccatgaccgtgttaattaattaattagtacatatacctcctactcaaatcagatgtacggtttttttaatctgcaataaaaatcatcgttgctgcattactcgatc

SEQ ID NO: 130290 - DNA, 1586 bp, Zea Mays
gatcgatggattctacggttcctgcctgtcaagtgtttgtcctcgtctcgtcttcggaaaacaacaaacgacaagtccaaggcagagtagattttagaccgaaatataccaaaaactggatcgaaaattgcatatcggactggactgagtacgaaaaaaaaaataccgagggaaagttcaagtgttcaaccttgaatggccatggccttcttttcgttttcgttttttttttgaagaacagacagacttgaaagttgagatatctcactaatccccaaaatgtccctataaaactgatgatctgctgatgagacatcccactcgccggccgtccttgaagagcgagcagcaatggcgcaggagatcgagcacacccacctccccatccgcggcctcaacctccacgtcgcacaagtaggcacaggtgaactgggcacggtggtgttcctgcacggcttcccggagatatggtactcgtggcgccaccagatgcgggccgtggccgcggcggggtaccgcgccatcgcgccggactgccgcgggtacggcctgtcggagcagccgccggagcacgaggaggtctctcctgacgacctcatcgccgacgtgctgggcatcctcgacgccctcagcgtcccgaaggcgttcttggtgggcaaggacttcggcgccatgccggcgtacgagttcgcgctgcagcacccgggccgcaccctcggcgtggtgtgcctgggcatccccttcaacccggctcccatgtccttcgacgccatcatgcccgaaggattctacatcctgcgctggcgcgtgcgtagccgcccgccactgactgcatacatacagctcttgctattctagtattcttcttcttcttgagctggtgttctccttttgctttctcttcttgttcaggagccgggcagggcggaggccgacttcggccggttcgacgtgaggcgcgtggtgcgcaccatctacgtgctcttcgccggcgccgagatcccgattgccaaggaagggcaggagatcatggacctggccgacctgtccacgcccctcccggagtggttcaccgaggaggacctggacgcctacgccaagctctacgagaagtccggcttcgggtacccgctcaagatgccgtacagatctatgcacaagctcccgaaccggctggacgccaagttccaggtgccggtgttcatggtgatgggggagaaggactacgcgttcaagttcccggggttcgagaccgccatgcgcggcggcgtcatggacaacttcatgccggacctcaagatcacctacatccctgaggggagccacttcgtgcaggagcagctcccagagcaggtcaacgacctgctactcggcttcctcagggaccatccctccgccgcataagcagcgggtgagaccgtcagaataatggaatgcttcctgagcaacggtttctctactctattgccgttgcctggatccatgaccgtgttaattaattaattagtacatatacctcctactcaaatcagatgtacggtttttttaatctgcaataaaaatcatcgttgctgcattactcgatc

SEQ ID NO: 130291 - DNA, 1416 bp, Zea Mays
gatcgatggattctacggttcctgcctgtcaagtgtttgtcctcgtctcgtcttcggaaaacaacaaacgacaagtccaaggcagagtaggcacgtgggagactgatcaccgtgtctgaatcagggattacattttcggtttggaatttgggaaaaccccgttttatttgacttttgaatttcagattttagaccgaaatataccaaaaactggatcgaaaattgcatatcggactggactgagtacgaaaaaaaaaataccgagggaaagttcaagtgttcaaccttgaatggccatggccttcttttcgttttcgttttttttttgaagaacagacagacttgaaagttgagatatctcactaatccccaaaatgtccctataaaactgatgatctgctgatgagacatcccactcgccggccgtccttgaagagcgagcagcaatggcgcaggagatcgagcacacccacctccccatccgcggcctcaacctccacgtcgcacaagtaggcacaggtgagtcctcatcgttgctttgagccgatggatcccagcggagcaggcagagtatcgatcattcatgggctacggcctgcgggccgcacggctggccggctggtgccgttggttcgtgtgccgcaggtgaactgggcacggtggtgttcctgcacggcttcccggagatatggtactcgtggcgccaccagatgcgggccgtggccgcggcggggtaccgcgccatcgcgccggactgccgcgggtacggcctgtcggagcagccgccggagcacgaggaggtctctcctgacgacctcatcgccgacgtgctgggcatcctcgacgccctcagcgtcccgaaggcgttcttggtgggcaaggacttcggcgccatgccggcgtacgagttcgcgctgcagcacccgggccgcaccctcggcgtggtgtgcctgggcatccccttcaacccggctcccatgtccttcgacgccatcatgcccgaaggattctacatcctgcgctggcgcgtgcgtagccgcccgccactgactgcatacatacagctcttgctattctagtattcttcttcttcttgagctggtgttctccttttgctttctcttcttgttcaggagccgggcagggcggaggccgacttcggccggttcgacgtgaggcgcgtggtgcgcaccatctacgtgctcttcgccggcgccgagatcccgattgccaaggaagggcaggagatcatggacctggccgacctgtccacgcccctcccggagtggttcaccgaggaggacctggacgcctacgccaagctctacgagaagtccggcttcgggtacccgctcaagatgccgtacaggtagccactcctttcgccggccaaacggcagatctctctgatgttca

SEQ ID NO: 130292 - DNA, 1546 bp, Zea Mays
cccaccgtcaccgaccgccgcgccacgattttatccattcctcactcgtctctcaaactcaagcgaaagccatcaccccgaccccaatcccacgttcgccacgtgcgcgccacctcccccaccgcgtccgcgtcgccggccatactccatcgcgaacgagatcacgggctggtttcgcgggccgaccatggggacgctcatccggccggggcccgccgcgtcgcctctccccatcgcttccccctcctcctcatccgcccacgtggctgtcgttggcggtggcgcgaggagcttgcggcatcgggtgtcggtgtcggtggcggtgttccggtccccgagtacgcaggttctggcgacgagatggcgccgccggagaggtatggttgtgcggtcggatgtcgtcgccggtggcgcagccgccgcggcagctggggattcgacgcgggcgctcccaggtcagcaattggcttcaagagtcagaggggtttgcttctatttggtgactgcagttgcagcaatctttttgtttgtagctatggttgtggttcatccacttgtgttgctatttgaccggtaccgtaggagagcacagcactacatcgcaaagatttgggctacggtgacaatctccatgttctacaatcttgaggtcgaaggaatggagaatctgcctccaaatagctgtcctggtgtctatgttgctaaccatcagagcttcttggatatttatacccttctaactctagggaggtgcttcaaatttataagcaagaccagcatctttatgttccctattatagggtgggcaatgtatctcttgggtgtgattcctctgcggcgtatggacagcaggagccagttggattgtctcaaacggtgtgtggacttggtaggaaaaggagcttctgtatttttctttccggagggtactcgaagtagagatggcaagttaggtgtatttaagcgtggcgcattcagtgtcgccgcaaagacaggagctcctgtgatagctattactcttatcggaactgggaaattgatgccttctggaatggaaggaattctcaattcaggttcggtaaaggtgattattcaccgacctattcaaggcaatgatgcagaaacattatgttccgaagcaaggaatgtgatagcagacactcttcttctgcatggttatggagcccattaaagcaagtggggtgctttggtctgttttttcttctgaacgagtgctttggtctattctttagtggacttttcagagcacaagacttgagagttgagacaaagctcgttgcagatgtaatcctgtaaaggcaagagggaggaaaatggcgtgaattggcggttgtaacatgtggtcttcaatttgttgtaaaccctacttatttttgttggtttgatagtacaaagaaatgtaaaaggcagaggccatcttcattggatggaaaatgaagctcacgtgatattttgccattttggcctagtttgtgaaccctattttctcaggaaaaaaaactaaattttcatagaaaaatggaaa

SEQ ID NO: 130293 - DNA, 1468 bp, Zea Mays
cccaccgtcaccgaccgccgcgccacgattttatccattcctcactcgtctctcaaactcaagcgaaagccatcaccccgaccccaatcccacgttcgccacgtgcgcgccacctcccccaccgcgtccgcgtcgccggccatactccatcgcgaacgagatcacgggctggtttcgcgggccgaccatggggacgctcatccggccggggcccgccgcgtcgcctctccccatcgcttccccctcctcctcatccgcccacgtggctgtcgttggcggtggcgcgaggagcttgcggcatcgggtgtcggtgtcggtggcggtgttccggtccccgagtacgcaggttctggcgacgagatggcgccgccggagaggtatggttgtgcggtcggatgtcgtcgccggtggcgcagccgccgcggcagctggggattcgacgcgggcgctcccagctatggttgtggttcatccacttgtgttgctatttgaccggtaccgtaggagagcacagcactacatcgcaaagatttgggctacggtgacaatctccatgttctacaatcttgaggtcgaaggaatggagaatctgcctccaaatagctgtcctggtgtctatgttgctaaccatcagagcttcttggatatttatacccttctaactctagggaggtgcttcaaatttataagcaagaccagcatctttatgttccctattatagggtgggcaatgtatctcttgggtgtgattcctctgcggcgtatggacagcaggagccagttggattgtctcaaacggtgtgtggacttggtaggaaaaggagcttctgtatttttctttccggagggtactcgaagtagagatggcaagttaggtgtatttaagcgtggcgcattcagtgtcgccgcaaagacaggagctcctgtgatagctattactcttatcggaactgggaaattgatgccttctggaatggaaggaattctcaattcaggttcggtaaaggtgattattcaccgacctattcaaggcaatgatgcagaaacattatgttccgaagcaaggaatgtgatagcagacactcttcttctgcatggttatggagcccattaaagcaagtggggtgctttggtctgttttttcttctgaacgagtgctttggtctattctttagtggacttttcagagcacaagacttgagagttgagacaaagctcgttgcagatgtaatcctgtaaaggcaagagggaggaaaatggcgtgaattggcggttgtaacatgtggtcttcaatttgttgtaaaccctacttatttttgttggtttgatagtacaaagaaatgtaaaaggcagaggccatcttcattggatggaaaatgaagctcacgtgatattttgccattttggcctagtttgtgaaccctattttctcaggaaaaaaaactaaattttcatagaaaaatggaaa

SEQ ID NO: 130294 - DNA, 2163 bp, Zea Mays
cccaccgtcaccgaccgccgcgccacgattttatccattcctcactcgtctctcaaactcaagcgaaagccatcaccccgaccccaatcccacgttcgccacgtgcgcgccacctcccccaccgcgtccgcgtcgccggccatactccatcgcgaacgagatcacgggctggtttcgcgggccgaccatggggacgctcatccggccggggcccgccgcgtcgcctctccccatcgcttccccctcctcctcatccgcccacgtggctgtcgttggcggtggcgcgaggagcttgcggcatcgggtgtcggtgtcggtggcggtgttccggtccccgagtacgcaggttctggcgacgagatggcgccgccggagaggtatggttgtgcggtcggatgtcgtcgccggtggcgcagccgccgcggcagctggggattcgacgcgggcgctcccaggtatccaccttgctgagtatgttaaaatgttttaaccgtttcatttgaagatggccgtgagatgtcaggtaaataatctgccactatgataaagtgaatgtgagagggatccctttcataatcgcaaaaggttaaatgccctaaattatggggtgctgaaatctggattatacaatctgtgcagattgtaatcgcaaacaaacacccccctaaatcactgttgctaatgctccgtggtttaaacgatcacggtagattcaaattgcaaacaaagagtcgtttggttcctatcattataatactatcaactatgatcacaaccggccctcctatctaactgaaattgggacacatctggcagtgtgtatccttttagacatcttatagcaaatagcatggtatagccgtgctgcaccattgtgtttcactgtttcaggcgcgtagaagaatcaatagatgcaggtgctagctgtgtctcatgtttattagaaagcatgtgcacatgtacaacaaggtgacaaatagcttgtgtggattgaatcgtctacaaagaacaccacaatgtatcaaactgtagaattggatctccttgtgctaacttgaaattgttttaacaggtcagcaattggcttcaagagtcagaggggtttgcttctatttggtgactgcagttgcagcaatctttttgtttgtagctatggttgtggttcatccacttgtgttgctatttgaccggtaccgtaggagagcacagcactacatcgcaaagatttgggctacggtgacaatctccatgttctacaatcttgaggtcgaaggaatggagaatctgcctccaaatagctgtcctggtgtctatgttgctaaccatcagagcttcttggatatttatacccttctaactctagggaggtgcttcaaatttataagcaagaccagcatctttatgttccctattatagggtgggcaatgtatctcttgggtgtgattcctctgcggcgtatggacagcaggagccagttggattgtctcaaacggtgtgtggacttggtaggaaaaggagcttctgtatttttctttccggagggtactcgaagtagagatggcaagttaggtgtatttaagcgtggcgcattcagtgtcgccgcaaagacaggagctcctgtgatagctattactcttatcggaactgggaaattgatgccttctggaatggaaggaattctcaattcaggttcggtaaaggtgattattcaccgacctattcaaggcaatgatgcagaaacattatgttccgaagcaaggaatgtgatagcagacactcttcttctgcatggttatggagcccattaaagcaagtggggtgctttggtctgttttttcttctgaacgagtgctttggtctattctttagtggacttttcagagcacaagacttgagagttgagacaaagctcgttgcagatgtaatcctgtaaaggcaagagggaggaaaatggcgtgaattggcggttgtaacatgtggtcttcaatttgttgtaaaccctacttatttttgttggtttgatagtacaaagaaatgtaaaaggcagaggccatcttcattggatggaaaatgaagctcacgtgatattttgccattttggcctagtttgtgaaccctattttctcaggaaaaaaaactaaattttcatagaaaaatggaaa

SEQ ID NO: 130295 - DNA, 1503 bp, Zea Mays
cccaccgtcaccgaccgccgcgccacgattttatccattcctcactcgtctctcaaactcaagcgaaagccatcaccccgaccccaatcccacgttcgccacgtgcgcgccacctcccccaccgcgtccgcgtcgccggccatactccatcgcgaacgagatcacgggctggtttcgcgggccgaccatggggacgctcatccggccggggcccgccgcgtcgcctctccccatcgcttccccctcctcctcatccgcccacgtggctgtcgttggcggtggcgcgaggagcttgcggcatcgggtgtcggtgtcggtggcggtgttccggtccccgagtacgcaggttctggcgacgagatggcgccgccggagaggtatggttgtgcggtcggatgtcgtcgccggtggcgcagccgccgcggcagctggggattcgacgcgggcgctcccaggtcagcaattggcttcaagagtcagaggggtttgcttctatttggtgactgcagttgcagcaatctttttgtttgtagctatggttgtggttcatccacttgtgttgctatttgaccggtaccgtaggagagcacagcactacatcgcaaagatttgggctacggtgacaatctccatgttctacaatcttgaggtcgaaggaatggagaatctgcctccaaatagctgtcctggtgtctatgttgctaaccatcagagcttcttggatatttatacccttctaactctagggaggtgcttcaaatttataagcaagaccagcatctttatgttccctattatagggtgggcaatgtatctcttgggtgtgattcctctgcggcgtatggacagcaggagccagttggattgtctcaaacggtgtgtggacttggtaggaaaaggagcttctgtatttttctttccggagggtactcgaagtagagatggcaagttaggtgtatttaagcgtggcgcattcagtgtcgccgcaaagacaggagctcctgtgatagctattactcttatcggaactgggaaattgatgccttctggaatggaaggaattctcaattcaggttcggtaaaggtgattattcaccgacctattcaaggcaatgatgcagaaacattatgttccgaagcaaggaatgtgatagcagacactcttcttctgcatggttatggagcccattaaagcaagtggggtgctttggtctgttttttcttctgaacgagtgctttggtctattctttagtggacttttcagagcacaagacttgagagttgagacaaagctcgttgcaggtattgatgctaactatctaccttgattttttgggaaggttgacaatttgtgatttcttggttgctctttgttgaatacgtgtgtctattttttttttctcgaaaaggtttgttttatgtactataattgcacgggacctgatatttgaggctgttatcaaatagagtagacccttcaaataatggaattattgattaac

SEQ ID NO: 130296 - DNA, 3335 bp, Zea Mays
ctcgcggccccactcgccagtggcacaacaacctgatcgagccgaagccgagttcctcgctcccccaaaatcccccaagcagctctgcagctgcccctcacaacttcattcccaaatccgccgcaacgcgaagcaaacgacgccccgaacacacccaagccacgcccaattcctatctctcgccgcgcatcgacgacggcgcggacgccatgatcctgcgaacgtacgggcgcagatcccgctccttctccgacggcgggggcggggtctcgtcctcgcaggacgcgttcgactgcgacgacgccgccgacttgctggtgtcgtcggcctcgcagccgctcccgctcccgccgtcgcaggagtcctcttcgatgtgggacttcgacgaggacccacctccgtccccgccgcggccccggccggaggggcggcggcgcggggcaagaagaggagggtgggagctcgcggaagcccccgcggtggcgccgacggcaacgctgatggaggcggaggagtacggagagatgatggagagcgtggacgaagtcacgttcgcgctcgacgggctccgacccgcagcgcagaagcggacgcggcgggccagcctgctcgcgctgctcgggatctgcgcctccgccgagcgccgccgcgtgctccggtcccaaggactggtacagcaaattatcgatgctattttggttctggacattgatgatcctccctgcgctattgctgcaggagctcttttatttgttttggcaagtgatgtccaagacaataattcgctggattcagaaacttgtgtccatttccttcttaaattattaaaccctccagtgaatgttgttgatgccaaagcgccatcaataggttccaaacttcttggaatcagtaaatttcagatgcttaacagttccaataaggatgcagattctagttcagaggacatacttttaaaagttgaagaaatcctcttaagctgcaaagagatcaagccactagacagtgatgataagaaaacaacaaggccagaactatgttcaaagtggcttgctttgttgacaatggaaaaggcgtgcttgtctgctgttgcattagaggatacatctgagatggtgttgaaacttggaggaaattttaaagaaacattaaggcagtcgggtggccttgataatatttttaatgtcatggtgaattgccattcagagctggagaaacttgtaaaggatgcctccactacggatgtggagggaaaggaaagagctcctctgcaaagcgctgcactcctcttgaaatgtttgaaaattttggagaatgccacatttctaagtgacaacaacaagacccatttgctcagcttgaatcgaaaattgagccctaaatgccccccacttccttttgttggtgtcattctcaatattattgaattactatcagccctctctcttcttcagaaaccttccactgtttcaagaaaagcagacccaaaaaatactaaagtttgcaatggggcttgctctgccgacagtagatgtttgaacttattgaatcatcatggcaagtgcaataactcaaagaaaaagagtcctttactgaatcatcatggcaagtgccaggattgctcatccaccaaattcaatggtgctagtttgaagctcaatgtaagaaaggaccgttctaaagctaattcaaccagaggttcaagtggttggatttctataaaagcacgtacttctgattggaactccagagaaatggcaaaaaagcgacgtctatcagaaaatgcacaaactgctttgagtaatggtggtgatgatccatttgcatttgatgataccgatcaagaaccttcaaattgggatccatttggtccaaaaaggaaatcaccacagaagcgagcgaaacgatctaatggtgaactagtgctggatgattgtgacactgcagtaacgggaagtcctgaattatgtcaacctgaaggtattaatcagtcaggtgcaacttctgattctaaggctgcagatgagtccaaccttttagaagattgccttttggcatcagttaaggttcttatgaacttggcaaatgacaacccttctggttgcgaacaaattgcgtcatgtggtggaattaatacaatggcctccttgatcattaaacattttccctcatttgatttctccatggacagtaacaatcaaatgaaagaaagagtatcctctggtgatctgtcgtcttcccagaacagcaagtcactccaaatcaaaactaagcaattgcgagcctatgaacttgattttctggtcgccatattgggattgcttgtcaaccttgtggagaaggataaccttaatagggtacgacttgcgaatgcccgtgtttctgtcaatctatctcaaagtccagatactgaagaggtacagagggatgtcataccccttctctgttcaatattcttagcgagtcaaagtactggggaaactgctgaagctatatcaccggatgacgaagaatctttgttgcaaggagaacgcgaagccgaaatgatgatcgtggaggcctacgcagcacttgtgctcgcctttctttcaacggaaagtatgaaggttcgaggagccatttccagctgccttccggacaacaacttaaaagttcttgtaccagtgctagagaagtttgtgtcatttcacctgcagctcaacatgatgacaagggaaacacattcagctgtcaccgaagtcattgaaagatgcaggcagtcatagaagttggaagagggcgccctgtacagattaaccgacctctctgcagtgcagccgaagccacacacaggtgttgctcctcacctggccagggcgcaacgaattgattgatgccagaggctggcttgggagctaacagtgtttctattctttcttttgcccctcctgctgttctgatcctgtcatgtgcatctcctttagtttcttctccacacactcccccccggaaatcatgtagtccatattatgagtggaacaataacagtgtaggctatagggaatgtagttgtggtgcttcagttcttcgtctctgttttacatgttgtattttcgtgtcacatggaatcagtgaccacacatgcctcaatctgacaaattaagagtgtatatcacataatagtagtgtaatttaactatgtctctttttccgtataaagaacctattagttggaagcatcttccggttgcagaaaatgaccatgttgtatgcaaacggtgtaacctggtgtacacaattctttcgttgctatgtactgttctgagggaattagaacccaggtcttctgttgcttg

SEQ ID NO: 130297 - DNA, 1782 bp, Zea Mays
cccaccccaccccaccctatcgcgttatcgccaccggctcaccgctcacggtcacggccgaataaactcccgcggtgccgtgcctcgctttcgcatccccccgcggagaggagaggaagaagaagaacccagccaaatcctcagtcttcaggctgctcacagctcgtgccgtccactctcccccgaggcagtctcttgcgttcgctgctcgacatggcgctccaggcggcgacgtcctttctcccctcggccctctccgcgcgcaaggaggggtcggtgaaggactcggcgtcgttcttgggtgttcgtctcgcggcggatggcctcaagctggacaccaccgctctgggcctacgcaccgtgagggtgagcaggtcggcggacatccgcgcgcagacggcagcggtgtcctccccgtcagtgacccccgcgtcgccgtctggcaagaagaccctccgcaagggcacggcggtcatcaccggcgcgtcgtccggcctcggcctcgccacggcgaaggccctcgcggagacaggcaagtggcacgtcatcatggcctgccgcgacttcctcaaggcgtcgcgcgcggccaaggcggccggcatggacaaggacagcttcaccgtcgtgcacctggacctcgcctccctggacagcgtccgccagttcgtcaggaacgtgcgccagctggagatgcccatcgacgtggtggtctgcaacgccgccgtgtaccagcccaccgccaaggagccgtcctacaccgccgacggcttcgagatgagcgtcggcgtcaaccacctcggccatttcctcctcgcccgcgagctcctcagcgacctccagtcctccgactacccctctaagcgcctcatcatcgtcggctccatcaccgggaacacgaacacgctggcggggaacgtgcccccgaaggcgaacctgggcgacctgcgcggcctcgccggcggcctcaacggcgttggcagctcggtgatgatcgacggcggggagttcgacggcgccaaggcatacaaggacagcaaggtgtgcaacatgctgacgatgcaggagttccaccgccggtaccacgaggagacgggcgtgaccttcgcgtcgctctacccgggctgcatcgccaccacgggcctgttccgcgagcacatcccgctgttccgcctgctcttcccgccgttccagaagtacatcaccaaggggtacgtctccgaggaggaggccgggaagcggctggcgcaggtggtgagcgaccccagcctgaccaagtccggcgtgtactggagctggaacaagaactccgcgtccttcgagaaccagctctctgaggaggccagcgacgccgacaaggccaagaagctctgggagatcagcgagaagctcgtcggcttggcgtgatgcccaccgtggccggcgccggcagccggcgacagtttttcctacctaggacatgctcattagttggtctcactctcagtcgagtagtcgacgtgtggtgcgcccgtgtcagagtgccaagccaagacagaaagtgagtacaaacgtgtaaaatatgtgctactgcgacgtgatggtttgggcagtggactgtatgtatctctactctctaggcttctgctttgctttgcatatttaattttctgctaataagaggacagcaaatgcctttcgagcttctttactttgtcggcatttagcagattcagatttttcttgaggacatggcacgtgaataatttcttctgtcagtagttcagtacaagttctccaatgttt

SEQ ID NO: 130298 - DNA, 1905 bp, Zea Mays
cccaccccaccccaccctatcgcgttatcgccaccggctcaccgctcacggtcacggccgaataaactcccgcggtgccgtgcctcgctttcgcatccccccgcggagaggagaggaagaagaagaacccagccaaatcctcagtcttcaggctgctcacagctcgtgccgtccactctcccccgaggcagtctcttgcgttcgctgctcgacatggcgctccaggcggcgacgtcctttctcccctcggccctctccgcgcgcaaggaggtgagcggcgcagttctgcgttttccagcgagcaccgtgctgttctttcgattcgcgctcagcttcagtgtccgagctgccaagtggcggctctggtaagttgcggttgcaatgttgatgctgtgtgcaggggtcggtgaaggactcggcgtcgttcttgggtgttcgtctcgcggcggatggcctcaagctggacaccaccgctctgggcctacgcaccgtgagggtgagcaggtcggcggacatccgcgcgcagacggcagcggtgtcctccccgtcagtgacccccgcgtcgccgtctggcaagaagaccctccgcaagggcacggcggtcatcaccggcgcgtcgtccggcctcggcctcgccacggcgaaggccctcgcggagacaggcaagtggcacgtcatcatggcctgccgcgacttcctcaaggcgtcgcgcgcggccaaggcggccggcatggacaaggacagcttcaccgtcgtgcacctggacctcgcctccctggacagcgtccgccagttcgtcaggaacgtgcgccagctggagatgcccatcgacgtggtggtctgcaacgccgccgtgtaccagcccaccgccaaggagccgtcctacaccgccgacggcttcgagatgagcgtcggcgtcaaccacctcggccatttcctcctcgcccgcgagctcctcagcgacctccagtcctccgactacccctctaagcgcctcatcatcgtcggctccatcaccgggaacacgaacacgctggcggggaacgtgcccccgaaggcgaacctgggcgacctgcgcggcctcgccggcggcctcaacggcgttggcagctcggtgatgatcgacggcggggagttcgacggcgccaaggcatacaaggacagcaaggtgtgcaacatgctgacgatgcaggagttccaccgccggtaccacgaggagacgggcgtgaccttcgcgtcgctctacccgggctgcatcgccaccacgggcctgttccgcgagcacatcccgctgttccgcctgctcttcccgccgttccagaagtacatcaccaaggggtacgtctccgaggaggaggccgggaagcggctggcgcaggtggtgagcgaccccagcctgaccaagtccggcgtgtactggagctggaacaagaactccgcgtccttcgagaaccagctctctgaggaggccagcgacgccgacaaggccaagaagctctgggagatcagcgagaagctcgtcggcttggcgtgatgcccaccgtggccggcgccggcagccggcgacagtttttcctacctaggacatgctcattagttggtctcactctcagtcgagtagtcgacgtgtggtgcgcccgtgtcagagtgccaagccaagacagaaagtgagtacaaacgtgtaaaatatgtgctactgcgacgtgatggtttgggcagtggactgtatgtatctctactctctaggcttctgctttgctttgcatatttaattttctgctaataagaggacagcaaatgcctttcgagcttctttactttgtcggcatttagcagattcagatttttcttgaggacatggcacgtgaataatttcttctgtcagtagttcagtacaagttctcc

SEQ ID NO: 130299 - DNA, 1632 bp, Zea Mays
cccaccccaccccaccctatcgcgttatcgccaccggctcaccgctcacggtcacggccgaataaactcccgcggtgccgtgcctcgctttcgcatccccccgcggagaggagaggaagaagaagaacccagccaaatcctcagtcttcaggctgctcacagctcgtgccgtccactctcccccgaggcagtctcttgcgttcgctgctcgacatggcgctccaggcggcgacgtcctttctcccctcggccctctccgcgcgcaaggagagggtgagcaggtcggcggacatccgcgcgcagacggcagcggtgtcctccccgtcagtgacccccgcgtcgccgtctggcaagaagaccctccgcaagggcacggcggtcatcaccggcgcgtcgtccggcctcggcctcgccacggcgaaggccctcgcggagacaggcaagtggcacgtcatcatggcctgccgcgacttcctcaaggcgtcgcgcgcggccaaggcggccggcatggacaaggacagcttcaccgtcgtgcacctggacctcgcctccctggacagcgtccgccagttcgtcaggaacgtgcgccagctggagatgcccatcgacgtggtggtctgcaacgccgccgtgtaccagcccaccgccaaggagccgtcctacaccgccgacggcttcgagatgagcgtcggcgtcaaccacctcggccatttcctcctcgcccgcgagctcctcagcgacctccagtcctccgactacccctctaagcgcctcatcatcgtcggctccatcaccgggaacacgaacacgctggcggggaacgtgcccccgaaggcgaacctgggcgacctgcgcggcctcgccggcggcctcaacggcgttggcagctcggtgatgatcgacggcggggagttcgacggcgccaaggcatacaaggacagcaaggtgtgcaacatgctgacgatgcaggagttccaccgccggtaccacgaggagacgggcgtgaccttcgcgtcgctctacccgggctgcatcgccaccacgggcctgttccgcgagcacatcccgctgttccgcctgctcttcccgccgttccagaagtacatcaccaaggggtacgtctccgaggaggaggccgggaagcggctggcgcaggtggtgagcgaccccagcctgaccaagtccggcgtgtactggagctggaacaagaactccgcgtccttcgagaaccagctctctgaggaggccagcgacgccgacaaggccaagaagctctgggagatcagcgagaagctcgtcggcttggcgtgatgcccaccgtggccggcgccggcagccggcgacagtttttcctacctaggacatgctcattagttggtctcactctcagtcgagtagtcgacgtgtggtgcgcccgtgtcagagtgccaagccaagacagaaagtgagtacaaacgtgtaaaatatgtgctactgcgacgtgatggtttgggcagtggactgtatgtatctctactctctaggcttctgctttgctttgcatatttaattttctgctaataagaggacagcaaatgcctttcgagcttctttactttgtcggcatttagcagattcagatttttcttgagg

SEQ ID NO: 130300 - DNA, 3111 bp, Zea Mays
ttttatttaataatttaaatgtcgttgcaattatggttatataaagggagaaatattaagaaaacagtgatggatgccctcacgctcgagatgtgtgccgaggtcgaggcaacagcgaccgatcccgtccgtgcgaggagacaaaaaaaatatcaaagcctgctaattaccgaaagtatcctatctaactatccatccccagggtgggaccggcctggggcagggaaatccaagccaccaagctcccattggccgggcttgtgccaggtcggcgccgcgtggcgaaccccaccccaccccaccctatcgcgttatcgccaccggctcaccgctcacggtcacggccgaataaactcccgcggtgccgtgcctcgctttcgcatccccccgcggagaggagaggaagaagaagaacccagccaaatcctcagtcttcaggctgctcacagctcgtgccgtccactctcccccgaggcagtctcttgcgttcgctgctcgacatggcgctccaggcggcgacgtcctttctcccctcggccctctccgcgcgcaaggaggtgagcggcgcagttctgcgttttccagcgagcaccgtgctgttctttcgattcgcgctcagcttcagtgtccgagctgccaagtggcggctctggtaagttgcggttgcaatgttgatgctgtgtgcaggggtcggtgaaggactcggcgtcgttcttgggtgttcgtctcgcggcggatggcctcaagctggacaccaccgctctgggcctacgcaccgtggtatttggactaaggctactgcttatatattaccttccgtcttcttacgaagctccttaaatcgtgctcctatgttgaaatggtgtggtatgaagctgaaaataataatttttcgcacattctccatgcacttgtcggtcctgtaggctgtagctagctgttttgctaaacagatctccaaaagagtttttttaaatctttcaagcaaggagctgaaatatataaaaaaaacagcttcattagtaaagctgagttgtgccaaacgtggatagggatagggagcggatagtagtctttgcctactgaaaccttggacatcatttggctggctagaattgtctgtcttcaagttcagtgtcttactgactttctctattccaagtacaaggctgaaagccatggaaagtcttgactggatagttagggttattttggaaactgaaatcctttttggaatttttagagatcgaggagaaaattagcttatttttctctcaatcccgggaatccagagcggatttaaaattttaaactaggcttaaagggacattttcttcccagcatcacatgtataactcgtaattgctactcctaatgccaaattaagcaatggagtactttgtacgcagtagatcatgttaatgaggcagctctgtggtcaactggacacttgagcctcaaagttggtgttttttaagggaaagataaaagttgaatttaggttgtgtcatgacatgacactgttcgtttggttttaatctgtattggcttctactgcttttacaaaggctgttgattaaagtctattcagacggttgtagttgcagctgcaactgactttaatccgaagccggcaatcaggcattctaggatcatcacttaattttaccacttcagatgtcgctagcctagccattgtaggttgtacattgtttgtcactggttccctgtctgatgcttgatgtcactgtaagtctgtaactaaaaaaaatacacatccaaaacctgcagagggtgagcaggtcggcggacatccgcgcgcagacggcagcggtgtcctccccgtcagtgacccccgcgtcgccgtctggcaagaagaccctccgcaagggcacggcggtcatcaccggcgcgtcgtccggcctcggcctcgccacggcgaaggccctcgcggagacaggcaagtggcacgtcatcatggcctgccgcgacttcctcaaggcgtcgcgcgcggccaaggcggccggcatggacaaggacagcttcaccgtcgtgcacctggacctcgcctccctggacagcgtccgccagttcgtcaggaacgtgcgccagctggagatgcccatcgacgtggtggtctgcaacgccgccgtgtaccagcccaccgccaaggagccgtcctacaccgccgacggcttcgagatgagcgtcggcgtcaaccacctcggccatttcctcctcgcccgcgagctcctcagcgacctccagtcctccgactacccctctaagcgcctcatcatcgtcggctccatcaccgggaacacgaacacgctggcggggaacgtgcccccgaaggcgaacctgggcgacctgcgcggcctcgccggcggcctcaacggcgttggcagctcggtgatgatcgacggcggggagttcgacggcgccaaggcatacaaggacagcaaggtgtgcaacatgctgacgatgcaggagttccaccgccggtaccacgaggagacgggcgtgaccttcgcgtcgctctacccgggctgcatcgccaccacgggcctgttccgcgagcacatcccgctgttccgcctgctcttcccgccgttccagaagtacatcaccaaggggtacgtctccgaggaggaggccgggaagcggctggcgcaggtggtgagcgaccccagcctgaccaagtccggcgtgtactggagctggaacaagaactccgcgtccttcgagaaccagctctctgaggaggccagcgacgccgacaaggccaagaagctctgggagatcagcgagaagctcgtcggcttggcgtgatgcccaccgtggccggcgccggcagccggcgacagtttttcctacctaggacatgctcattagttggtctcactctcagtcgagtagtcgacgtgtggtgcgcccgtgtcagagtgccaagccaagacagaaagtgagtacaaacgtgtaaaatatgtgctactgcgacgtgatggtttgggcagtggactgtatgtatctctactctctaggcttctgctttgctttgcatatttaattttctgctaataagaggacagcaaatgcctttcgagcttc

SEQ ID NO: 130301 - DNA, 904 bp, Zea Mays
aataaagttgcctttttggtggcttcaccctataaatgccccccatatggctcagactctgggcactagcaggcatccacttctcacaggctaagagaagtctcctagcatcaaagcagatttgcagatagaccttctccaagccatggagactttcacccaggagcatgtcattggaattccattgacttcgtttgcatatgccgatgaggaaagacaaggaaaatcttcctgttctgccatggttcataaaaaaaataagaagagttccttcattcatcggatgaacaaactgagccataaaacagatagctacatgcaaggattcaaagaacacttaaccatgggaccaaaaatttcagaaactataaaagggaaactaagcttcggtgcaaaggttctccaagctggcggtattgataaagtcttcagagaatactttgcagttgagaaagatgagaaactacggaaggctttccagtgctatctttcaaccacagctggtccaatagctggaatgcttttcatctcaactaagaagattgctttccatagtgataggcctttgagtttcacgtctcctaaaggaggcagtacaagggtgccttacaaggtgttaatccccacagagagaatgaaaagtgcttcagtgcgggaaaatttatacaatccagatgagaagtatattgatgtagtcactgttgatggctttgatttttggttcatgggctttgtcagctatgagaagtcattcaaatatctccaacaagtaattatggagctgagatgatgcacacagttttgtaacgtgaaacatcatagataccatgttgatatggtatatgtacattgaagagatagaattgatctatcacattgattgtgaagcaaagtttttcaacta

SEQ ID NO: 130302 - DNA, 847 bp, Zea Mays
agtaggtgaaggtcagatcagagtatcaccacttggcaatttctcccccggcacaagcgcatggctaccgtcgggggcaatcgtgctctctatgcagtcgtcgcgctgccacttctcgcgacccttcttcacggaccaatgcggctgtcgcatgccttcccataccgttccctactccagacctgccagcccagcggctccatccagggccgttccggcaactgcaacacggagaacggctccgagtgctgcaagaacgggcggcgctacaccacatacggctgctccccgcccgtcacgggtagcacccgcgccgtactgactctcaacagcttcgccgagggcggggacggcggcggcgcggccgcctgcacggggaagttctacgacgacagcaagaaggtggtggcgctgtcaactggctggtacaacggcggtagccggtgcagaaagcacatcatgatccacgcgggcaacgggaattccgtgagcgcgttggtcgtcgacgagtgtgactccaccgtgggctgcgacaaggaccacaactttgagccgccgtgccgcaacaacatcgtcgacgggtcgccggcggtgtgggacgctctggggctcaacaaggacgacggccaggcacagatcacctggtccgacgagtgagcgactgtaccaccgctgcaccggccgggtgcgctcgtgcaagtgcaccggccggcacgtctcatgttgccaatatataataagtagtagggtacagtggtacaccctctaaataatcatgcatgaagcagctgttcatctttagacgtgtttaaccatttgcaaaattaaataactgttggccccccaa

SEQ ID NO: 130303 - DNA, 133 bp, Zea Mays
gcttgtagttgtgtttaaagtttgtaaatttcagtttccgcctattcacccccctctaggtgactttcactatcacctgcgtgtaagttgttaaaaattacagggtgggtaaaaaatatacataccaaggtta

SEQ ID NO: 130304 - DNA, 672 bp, Zea Mays
atggcaagctgcatgaagctgctagtgttgcttgccctcgtgcaggtcctgttgtccctccacgtccaagtctccgaagccactaccaataagcaccaccaccaccaccacaagccggaggagccgggctcgggctcgggctcgggcacctgccgactcagcggccacctccacggcaaggccgggaactgcaagaagctgcacgggtcggactgctgccaagagggccacaagtacccgcagttccggtgctcgcccccggtgtccgccaggacgccggcgacactcacgctgaacagcttcgagaagggcaaggacgggggcggcccgtcggagtgcgacaaccgctaccacaaggacagcgagacggtggtcgcgctgtcctccgggtggctgcgcctcgacggcacgcgccggtgcggccagacggtcagggtcaccgccaccaacgggcgctccgtgctggccagggtcgtcgacgagtgcgactcggtgaacgggtgcgatgaggagcacaacttcgagccgccctgccccaacgacgtcgtcgacgggtcccccgcggtgtggaaggcgctggggatcaaggagagcctcggtgaggtcaaggtcacctggtctgatgtctgagccggcgcggccgtgtggaacgctgtctcaagtatacgtacg

SEQ ID NO: 130305 - DNA, 1674 bp, Zea Mays
cgggaggggatgcaagatgcatcgttcaatttctttggaaacttacttggttctgctgaggaaagaattttttttctttggacctctcggttttccatcaacatcagcatgacctttcttcgcttgacgagtcgttctcattaaacgtctggccatcagaagcatggtcatggataaagctcctagcccggatggctttaccggtcgtttttacaagtcttgttggtatatcattgggagtgacgtgatgctggccttggctattactcataggggtcatgtcttcaattttagattgcttaattcagcttttatctctttgctgccaaagaaagccgatgtgttgacactcaaagacttctagcctatcagtcttattcacagttttgcaaagataatcatgaaggtccttgttaaccggctggcaccccttcttctgggactagtggctgcgaatcaatgtgcattcatccaaggtcgtattattcacaatcattctctttgttcagcaactagccagatcgtttcacaggagcaaagaacctcacattctgctcaaactcgatatttcgaaggtgcttgactctgtctcttggtccttgttggaggttttacaacagttggggttaggtcagaaatggtgtgatctcatttgcttgctgctttccaccgcatccactcagattttggtgaatggggttcccggccagccaatttcccatcttcggggctgagaaagggtgatcctctatcccatgctttttgtccttgtcatggacgtgctcaactctgatagttaagaccagcgaggagaatatgttgcttccacttgttggcggccataaccaacactggatctccctttatgcagatgacgtggttcttttttgagaccctcaaggaatgaccttctcatggttaaggatctgctagagtattttgggcatgcctcttgtctgagagatatgcacagatcaagatttggccctcattttggatgttctttcctgtggagttgctgattttcctactacatatttgggactacctctttctatccgcaaaccttccaagaatgagtggttgtccctgatagataaagtggcgaataaactcccgggttggaaagctccactcttgaataaagcaggtcgccttgttttggtcaaagttgtgctaactgcaaccccaatttactcaatgatagctttgaccttcctcgttaggtgatcaaggctattgataagaagagaaggggtttcttatggaaaggacaggagcaagctcaaggtggtaattgtatggtgtcttggtcacgggttcagatgccaattatgtatggcggccttggagtgcataacctggaacgtcttggttgggtgctgcatgtcaagtggctttggttacacaaaactgacagtactcggccgtggactaatttgcctctgcaggttccaaaaatagttcgtgcaatctttgatgcagcggtaaattttcccattggcaatggggagaacaccttgggctgatcgctgagtgtaaggcaagaccatatctgaacttgtgcctaatctctttaaattaattccttccagagtggtgaaaaggcgtacagtgagccaggcacttaacaataggcactgggtttcagatattaagggcgctctgaaggtc

SEQ ID NO: 130306 - DNA, 1376 bp, Zea Mays
ttcgaatccttccctttagataatcagaagtcagaaccagatatgatactacacaagtcgtgccttatatacctggaattatttactacatacacatacacatacactacagtgaagcagcatgtacacatcacctgattcaccgtctccaacacacgctggggcgacagacaagtacgtacctatgccccccttattaaccacttacacgaccccacaatacaattttcaagctagtagtcctctggcgcgagcggctggtgcgcgtggggcacggcggcgtcggcggacgggataaccaggtactcgtacaccagccctgcaagcccggcgccgaggaaagggcccagccagtacacccagtggtgcctccaccgccacccgacgagcgccgggccgaagacccgcgccgggttcatccctgcgccgtcgaagggccctcccgccagcacgttggcgccgagcaggaagcccacggccagcggcgcgatggtgcccacgtgcccccgcttcgggtcgatcaccgtggcgtagtaggcgtacatgaggccgaacgtcatgacggcctccagcagcacggcgtgccagtccccgaccccggacgcgagcgcgaaccccggcggccgcatgccccccgtggcgagccgcaggagcagcgtggcggcgacggcgcccagcagctgcgcgacccagtacaagaccgcgcggacgagggagacgcggccgccgacgagcgcgccgaaggtgaccgccgggttcacgtgcccgcccgagatgttgacggccactgccacggccacggccagggccagcgcgtgcgccagcgccacagccaccaggccgcccgccgtgctcatgtcgtggtacatgtgcgtaccgagcgagaggacggatccctcggcggcgaagacgaagatggcggtggcgatgaactcggagatggcggcgcggatggtgtccgggtgcgtggcgtcctcgctccgccccaccgtgaaccgccgccccggtcgcacgcccgtgctcatgtcgtcgccaaataaaaacctacctctcctttagctacggagacggagtagcttgcagtagccgcgggcttcgtttcaaactgcggagacgagtgtgcagtagtcaggaggtgcggcgacggccagcgcgcgtggcttataacgtggccgagccgcgcgcagctccgcgccacgtgtgggcgcagcgggccagctgggcggcacgtctcaggggccgcccgtccatgcgttcgcgctggtgcctgcctgtgcggctgtgccttgtgagttctccgtgctcatctttatccgctgggtgcgatcgaactgccaagtcaccagcgtattgcagcgaggaggtgtacgttttcg

SEQ ID NO: 130307 - DNA, 1658 bp, Zea Mays
accccaccctcccctcccatcgcgattcgcgaatcaccaaactacccctcgttgtgaaaggaaggagacgaacgaggcagcggaaaggggagaggatttttcagattttccggcagcgacctacctagcccagcccagcgagagagaccgagcgacagcagctaccttctcccgacatgacgccgcatctgcccgccgtctcctcctcctccacgacgaccacatcccgcgccgccgccgccgctgccgcgcctccgtcctcgccgcatcagtaccggaggcggaggcggcgccgggtgccgggctgcctccgcccgcgcgccgcgtccgtccgctgctgcgccgcggcggcgcccgcgccgcaggcagcggtgcccgcggccgcgcgggccgaggcaaccacgcgggtcttcgtcgtgtccgacctgcacacggactacccggagaacatggagtgggtgcgccgcctgcccgccgaggtcggggcgggcaagggggaaggcgtcgacgcgctcgtcgtcgcgggcgacgtggccgagacaagggacaacttcgcgcgcaccatggagatgctcagggatggattcgccgccgtcttctacgtgccggggaaccacgacctctggctgcgccgcgagggcggccgctacatggattcgctggagaaactgactgcattgcttgatgcgtgtagtgagctgggtgtggatacaggcccaagaacgataggtgacttgggaatcataccattgttctcatggtatcacaagagctttgacaaggagaaggatgttagcagtgtgcgtgttccgtcgctagaaatggcttgtaaagactttcatgcttgccaatggccttcagacctgacaaatgatgatgaggctcttgctctttactttgacaagttgaatgacaagaatcatgatgctactgaagaagtgaaaagtagcagcaaacagatattaacattttcacacttcgtaccaaggcaagagttgtgtccagagaaacgtatgctttattacccataccttcctaaggtaattggatctgattttttggaaaggaggctgagagatatacacagcaacagaaaagacggaggagcttgccatgtttttgggcacactcatttctgttgggattccgtggttgatgagatcaggtatgtgcaagcccctctggcatacccccgagaaagaaaacgtcggatgaacggcgaaggttggctgccattttgtgtataccgtgacggtttcaacccagaaatatatccggcattgtggtcagactactacaacaagaacaaaagggaacccgagaacactcagctcgcgccttgggttgccagccatttcgcgaggtaccacaagttccactgaccctttctaagttccctggctttttgccgaagtggatgcagttcgtctgttcaggatggtgttgaaacctgcatttacctgggaaaaggagatattgacgttttacctgtacacgatctttttcttgtttccactcttaccataacttttgggcaaagtaagcgctagcatctgttttgtactagtatgttgcacagatctgaataatgtgcataagattcttcaaagccttgctgcagtgcagaaatagtgaaattcttcatcccttttaaatta

SEQ ID NO: 130308 - DNA, 1951 bp, Zea Mays
gcaaagcaaaccgaagccggtttcatatgagatcgcaccccgctgcgctgctgctcctccttcctccggctccctttcctccgcagctcgaataaagccccctcctcctcttccagtcttcctcctccgcgcttcagtcttcccagcgccacgattccggttcttgcagagtagcgcagagtgccggaggaatctgttggattctcctgctactggttcggttctttgggagttgttggcggtgtgccttgagcgatttggtgcgccgcggattgttgtggggtgagggtgatagcagagacaagggccgtgtggagagccgaggaggagggaagggaaagggggcgcaccgcgcatgggcgggcagtggctgggggaggggatgccgccgtccaacctgcagtgcttcttggactgcaccacccccaccgtggacacgcacattctccccaagacgaatggacgtttgccagccgatgcttggcaccacgctgagatggacagcgtcgagtacttcaatctttccgacctctgggaacagtactacgagtggagcgcgtacggcgccggagctacggtgcagctcccaggaggggagagagtagttcagtactatgttccatacctgtccgggatgcagctattcaccaacaaggtcctgacggcatccaggagttttggtgaagataatggcatggatttctggagtgatgatgaggacaacgagaagatgtcaagatcgtggagttcgacttctgatgaatcattgttcaactgtgatgtggtatggcccaacaggaagcgtccagggcacttgtcctttgagttctttgaagtaggttcaccttacggaagggtcccgttcattgacaaggtctatgaactatcccagggctttcctggattgacattactgaagagtgctgacctatcgcctgttagctggatgtcagttgcctggtaccctatataccacattccttaccagcgtagcgtgaaggatttatctgcatgcttcttgacttaccatactatttcctcctcgttccaagattacgggctcgagaccatgaccaatgattgttgccatccagttgccgacggcaagcagaatggccacatggataaaaagagtaacaccgtgtcactgcctccattcggcctcgcagcacacaaggtacatggttccctctggaccaaccccatgacaggagatcacagaaagatggacttcctcttcagtgcagcggactcctggttgaagcagcttggagtccagcaccatgacttcaacttcttcatcactcaccccatgtgaaccgctgctctggaacagcttccgaagaaccacatggacgcagtgtgaagctactaatgttacttacaccaccaacgacggtagcaaaacgttcacagtacagtccgttggtaaagtaagtctaacaatcgcagggtagatttatacttgagtttactgcagcgaataccaaacatgtcggcagtcggcactcaaaaggttttctgtttcttgtttcttggcagaaagatgtaacagatctgtacagaagttttgcaactaatttggtatccattgtggggttgggtatttggatccatattgtagctgttgcttgtgaacattagggctagtttgggagccagaaaaccgtagaggattggtgcggctaaaatcctcttttattcaattttaaataacaaggggattttagaccctataatcctgatttctgtctgccattgtcaacttcattttcctaatagatttatattttttaaaggaaaatgaactaatttttcttcgggaaattgaaatcactcgaggaaaggttgccaaactagcccttagtgtcctagagaatgttagtcctgctttacgcagctgaatctgttgacgacaatttcattctcttctgcagtaaggcagttgtac

SEQ ID NO: 130309 - DNA, 1709 bp, Zea Mays
gcaaagcaaaccgaagccggtttcatatgagatcgcaccccgctgcgctgctgctcctccttcctccggctccctttcctccgcagctcgaataaagccccctcctcctcttccagtcttcctcctccgcgcttcagtcttcccagcgccacgattccggttcttgcagagtagcgcagagtgccggaggaatctgttggattctcctgctactggttcggttctttgggagttgttggcggtgtgccttgagcgatttggtgcgccgcggattgttgtggggtgagggtgatagcagagacaagggccgtgtggagagccgaggaggagggaagggaaagggggcgcaccgcgcatgggcgggcagtggctgggggaggggatgccgccgtccaacctgcagtgcttcttggactgcaccacccccaccgtggacacgcacattctccccaagggccgctagctagtagtactactctgttcctatctgaaagtgagtcgccgttcggttgcatccagacgaatggacgtttgccagccgatgcttggcaccacgctgagatggacagcgtcgagtacttcaatctttccgacctctgggaacagtactacgagtggagcgcgtacggcgccggagctacggtgcagctcccaggaggggagagagtagttcagtactatgttccatacctgtccgggatgcagctattcaccaacaaggtcctgacggcatccaggagttttggtgaagataatggcatggatttctggagtgatgatgaggacaacgagaagatgtcaagatcgtggagttcgacttctgatgaatcattgttcaactgtgatgtggtatggcccaacaggaagcgtccagggcacttgtcctttgagttctttgaagtaggttcaccttacggaagggtcccgttcattgacaaggtctatgaactatcccagggctttcctggattgacattactgaagagtgctgacctatcgcctgttagctggatgtcagttgcctggtaccctatataccacattccttaccagcgtagcgtgaaggatttatctgcatgcttcttgacttaccatactatttcctcctcgttccaagattacgggctcgagaccatgaccaatgattgttgccatccagttgccgacggcaagcagaatggccacatggataaaaagagtaacaccgtgtcactgcctccattcggcctcgcagcacacaaggtacatggttccctctggaccaaccccatgacaggagatcacagaaagatggacttcctcttcagtgcagcggactcctggttgaagcagcttggagtccagcaccatgacttcaacttcttcatcactcaccccatgtgaaccgctgctctggaacagcttccgaagaaccacatggacgcagtgtgaagctactaatgttacttacaccaccaacgacggtagcaaaacgttcacagtacagtccgttggtaaagtaagtctaacaatcgcagggtagatttatacttgagtttactgcagcgaataccaaacatgtcggcagtcggcactcaaaaggttttctgtttcttgtttcttggcagaaagatgtaacagatctgtacagaagttttgcaactaatttggtatccattgtggggttgggtatttggatccatattgtagctgttgcttgtgaacattag

SEQ ID NO: 130310 - DNA, 1150 bp, Zea Mays
gcaaagcaaaccgaagccggtttcatatgagatcgcaccccgctgcgctgctgctcctccttcctccggctccctttcctccgcagctcgaataaagccccctcctcctcttccagtcttcctcctccgcgcttcagtcttcccagcgccacgattccggttcttgcagagtagcgcagagtgccggaggaatctgttggattctcctgctactggttcggttctttgggagttgttggcggtgtgccttgagcgatttggtgcgccgcggattgttgtggggtgagggtgatagcagagacaagggccgtgtggagagccgaggaggagggaagggaaagggggcgcaccgcgcatgggcgggcagtggctgggggaggggatgccgccgtccaacctgcagtgcttcttggactgcaccacccccaccgtggacacgcacattctccccaagacgaatggacgtttgccagccgatgcttggcaccacgctgagatggacagcgtcgagtacttcaatctttccgacctctgggaacagtactacgagtggagcgcgtacggcgccggagctacggtgcagctcccaggaggggagagagtagttcagtactatgttccatacctgtccgggatgcagctattcaccaacaaggtcctgacggcatccaggagttttggtgaagataatggcatggatttctggagtgatgatgaggacaacgagaagatgtcaagatcgtggagttcgacttctgatgaatcattgttcaactgtgatgtggtatggcccaacaggaagcgtccagggcacttgtcctttgagttctttgaagtaggttcaccttacggaagggtcccgttcattgacaaggtctatgaactatcccagggctttcctggattgacattactgaagagtgctgacctatcgcctgttagctggatgtcagttgcctggtaccctatataccacattccttaccagcgtagcgtgaaggatttatctgcatgcttcttgacttaccatactatttcctcctcgttccaaggtatgttttcctctttgttttgtttcaaggcatgtttgttgcacatcagagtatcagacactgaactctaccattttgataaattcatacggcaaaat

SEQ ID NO: 130311 - DNA, 370 bp, Zea Mays
ctcggacgtggcggctcctcctccactccccctcgactcctcctccatccccgacgcgacggctccatccccgacgctgagctccgtatctgcttgtccgcctccggcggcggctaccactccccagcaagccatctcctggagctggagggggtctgcttcctccttgactgcccatcgacgtctccgccctcgtggccttcgcgccggtgcccctcgcctgtgatgcagggggtctcatccatgtggtgccacgctactggttgccaacgaccgggaaaggtggtgtggatgtcgtgctcgtgtcttcctctacagggatgctcggactccccttcctcactgggctccctggatacgccaacacgaa

SEQ ID NO: 130312 - DNA, 598 bp, Zea Mays
ccttgccctgccccagatctcggccttcagtcctcgctgccgccgcgacttgctcgccccgtctccctccggccccgcctcatcgcggccgtggtggccaaggaacacgagctcattggaaacactcttaaataaagcttccaatgaacaagacaggagctcgacttcgcctagctccgaacaagcccgaacaagcggtcgacgaggcggaggtctcgcgtcctgcgtgcgtcgcgccgttgcctggctccgtcctcgccgttcctctgtagaagctggccgctgacccccgcccgcctccgcttggccgtctggccgccccccgcgtggtcacctagatggctggccgcgcccctagatttgggttcctatcttgttaggacttccatcttcgttcattttgctgtgtgtccgtcagatagatgactaatgcatcctcaaagttctccaaggcggagccttgcatctttgtgtgtttgatttggttgagctgcaacccgtgctgctgtccttttcagtataaaaaaaagatttagatgtaggttggcattcggatgaaaaatggaccgtgaaaaaaaggaggtccattcaccttgtt

SEQ ID NO: 130313 - DNA, 557 bp, Zea Mays
attttctgctaggcatatcgacagtaggatcatcggaaggggcaaaaggtggaggattattggcagtacttgtatctctcaaagtcctagttctaagcctcgaagcaatctctgtgagggctcctcttgcaatagctggaggccctgcaacctgaaagcttggaacaaatatacaggtacaacaaaagttaacaaataaatggtctagataataaaaacatatagaaatatgttgatgctgttagcaaatattaagtcacctgcacaagttcatcaccaaaagacaagtattttggtttatctgccttcgagtaaactcgaatttcagccccagttcgtcttctcatttcagtaatcacctgcccaccttccccaagaatacagccaactttgtttgatggtacaacaagccttgtacttgaatggtgtttctcagaggatgcacttactttatcgtggagcaaaatgagtgcctcaattgttggggatattggttcagttggtatctggatgaatgaaaaggagataaaattgtgagtattggtgcaagaaagtgg

SEQ ID NO: 130314 - DNA, 2997 bp, Zea Mays
gaagcatcctcttccacagtttccttccgctaccgctagtgacctttccaggacgacaactcccaggtcccgactcccccaaatttcccccttcccttccgcctcgcctccagccaccgcgtccgcctcgcctccagccaccgcgtccgcctccgatggcgtcggcggcggggtcctcgaacgtgatgctcgcgatcaacgagaagaaaacgatcaccactgacctctaccgcccgctgcgcctctacatcgcctccacctactcggaacgcgaggccgctgcggccgacgacgaccttagcgtggtgtgcgacctccgcgctgctgtcgagaagccctccctcccggacccgtcctccctcgagcagcgccgcgacgcgctcctcgcctacgcgcgggctctggcactcgtggagccccgcttccccatctcccccgatcgcgcccacgtccactccctcaccttcacctggcacgacgcattcaaggggaacaagaagtgcgccctcgcctccatccacctcgagaaggcatccgtgctctttaacctcggcgccgtctactcccagatcgcgctcgccgcggaccgctcgactgacgtcgggatcaggatcgcgtgcggcgccttccagagtgcggcgggggcgttcgcgtggctcagggagagcggggccgcggcgaaggctgtcgctgcggggaccaccaccgtggacatcacgcccgagtgcgccggcatgctggagaaactcatgctcgcgcaggcgcaagaatgcttcttcgagaaggttataggtggagggaagccacccgcgctgtgctccaaggtggcgcggcaggttggcatactctatgaagaagcatacacagctctcagtgcatctcctctaagtcagcactttgataagacatgggtgtcccatgtccagcttaaagctgctcaattctacgccgatgcttgctacaggtattcactggatcttcatgagaaagaagaaattgctgaggaaattgcacgtttaaagattggtatgagtgccttggcagatgctaagaagactacgaagggagttgctgcccaacttctggattccgtcaacaagctggaaagtaacatgaaaaccaacttggaaagggctatgaaggagaatgatcgtgtttacttgatgcgggttccagctgctggttccttgggtgccctccctgcagcgtcccttgtaaaacctacctctttggctgaagttttagatgccagcaaggaaaggcttttttcatcacttgtgcctgatggcagcatgaaagcactttctaagtacacagagatggtagataatagtatccggacccaggctgagaaattgcagcaagctagtgagatcactagagtcaggctgaaggaaatggacttaccagattctattctttcattggaaggaaatataaccttgcccatggatctgaaggaagacgtagaggctgtgcagataagcggtggccctgctggcttagaatctgagttgcagcaacttagggatttgagcagggtcaatcaggaactacttgtccagactgaagagcttctacagaaggaggcgaatgaagacgctcaatttcgtacacaatttgggagtcgttggactagacctcaatcaagcaccctaacaaagaatattcaggatagattgaatctgtttgcttctaatttgaagagagctgctgatagtgattctctgattgaacgaggcgtgaaggagaactattcattgatgtctatccttgacaaaaggccgatagagtctgcacttccaagtatttccaggcctatcatgtccttggatggaaatgaagatgccattgttggagccctgaaacaaagcttgagacaactggagtctcttggcgcacaaagggcaggtcttgaagacatgctcaaagaaatgaaaagaaaggatgatatattgcctaagttgatggttggcgtgggatcacatgatgatcttttcaagaaggagattgctaagtatgatcctatatgtgctgatattgctgataacattgtggcacaggaacaattgttgctacaaatacaggcacaaaacgagcaatttgctgctgtattcaacctagaggattacaaagctgcccgtgagagatgttacaagcaaatcgctgctgctgttgtgaaataccaggagtttaaaaagaacatcaacgagggcctaaacttttatgtgactttacaggaagcaattggcaaaataaaacagcagtgcagcgacttcataatgacccgaaacattcagtgccgtgaaatgatggaagatgtgcagaggaagctacccggcttcagattctcgtcgtccagccgctcctctatgcagaggaatgctgcttctgtgccacctgacgagagcagcccatcaccgccaccgccgcatgcccaggctccctatgcctctccaccaggggtagactcgaggcatggatattctcaaccggaggcaagacctgcatactcgcagccataccccccatcctatggggcgacaccgcaacagccgacgtatggtgcacaacaccccgggcagtaccagccgcctcctggccatgactgcggtcagccggcatatcctggatggcgcgggccatacccatactacaatgccccccagccgcagcaatctgtgccttgtccacaggcgccgtacaatgccactggggcttaccctccgcaccagagcaactattaccgacctcaataagtgctgcaactatttcttattattttgcttcttttttttccattgggtcttaccattctggtgtactactactgcatacgagagagttcgggtagtgtaatagcaggtatagctttgtatgatttagtggcggacccagaaagacccggtccgaagcgaccataaactataatatagtagcatataaaaaattgtacggcgaaacaatgttgtcatagatattaaagatgacatacaa

SEQ ID NO: 130315 - DNA, 167 bp, Zea Mays
ggaaatgcagttcctcataagatgcagcaaatcgctctcaaacgccaaacatcaggctgaacttggtggcgagggggacggatatgatggcaactcccagcgcgacaccgaagatacggtgcgagatagagaaagtagcgctgaactgtggcttcttcagaggaaga

SEQ ID NO: 130316 - DNA, 3994 bp, Zea Mays
cgtggattggcgactgctggaggggtttggggatcgatttgaggtcgtcggagcggagatcccgaggggacctgcggtttcgttgtggcccgtgagttggattccggacgcagtgccgtccggcgggccgccgagacgatggcgtcggtggaggtgaggtcggtgcggaaatccacggccctgcgggcgcgcggcgggcccagcaagctgcagtcggcgcggtcgatgccgctcgactacaggtactcggacggtccctcggcggcgaacggcgccggtggcgggccggctgggaacggcgtcgggcgccgggcggttgcggtggaggcagggaaggaggagaaggaaggtgaagtggtgcggttggagggggacgacgcggactctccgtacagctccaatgtggtgacagcggaggaggaggcggggaatacaggtggaggaggagacgaggtggattcggcggccgcggcgacgccaaggcggttgtcgccaagggcagcagcgagccccacgcaagtcgacgcccggtggggtgacaccagctcgtacggcgctaagaagaagcatagagtgttttgtcagcttcgaaatggtgattgggcattatgcacagtacttgcaacctccggtgacgagtctgttctaaaggtttctgaagggaaagtactgagattgaaaacagagagccttcaacctgcaaatcctgaaattcttgatggagtggatgaccttatgcagctaagttatctaagtgaaccatcagtgctgtacaatctgcagtacagatactcccaggacatgatttatactaaagcaggtccagttttggtggctgtcaatcctttcaagaaagtttctctgtatggtaacgagtacattgatgcatatagaaataaatcaatggatagtccacatgtttatgcaatagcagatgcagcactttgtgaaatgaaaagagatgaagtcaaccaatctataattataagtggtgagagtggcgcaggaaaaacagaaactgcgaaaattgctatgcagtatctggcttctcttggaggtggaagtggcattgaatacgaaattcttcagaccaatccaatactcgaggcttttggcaatgcaaagacattgagaaatgataactcaagtcgttttggaaagcttatcgaaattcatttcagtaccactggaagaatatgtggtgccatgattcaaacatttttgcttgagaagtccagagttgtgcaatgtgcagttggtgaacgatcgtaccatatattttatcagctgtgtgctggtgcacctgcatctctaagagagaagttgaatttgaaaaaggtagatgagtacaaatatcttaaacagagctgttgctattcaattgcgggcgtggatgatgcccaaatgtttcgaactgtgacggaagctatggacatcgttcatatcagcaaagaggaccaagagaatgtttttgcaatggtctctgctgttctatggctgggggatgtctcgttcacagtaattgacaatgaaaatcatgttgaaatcattgcggatgaagcttcaaaaatggttgcagaacttcttggctgcagtattgaagatctcaatttagctttgacaaagcgccacatgaaagtaaataatgaaaacattgtccagaaacttacccttgctcaggcaactgacacaagagatgctctggccaaatcattgtatgccagtttgtttgaatggcttgtagaacaaattaataagtctctctcagttggcaagcgtcgaactgggagatctatcagtattcttgatatctatggctttgaatcatttgataagaacagttttgaacagttctgcatcaattatgctaatgaaaggttgcaacaacatttcaatcgtcatttatttaagcttgagcaagaggaatatgtggaggatggcatcgactgggcaaaggtcgactttgaggataatcaagattgtttgagtctatttgagaaaaaaccactggggttattgtctctgctggatgaggaatctactttccccaatgccacagatcttacttttgcaaacaagcttaagcaacatcttaactcgaattcttgcttcagaggagaaagagacaagggatttgctgtccgtcactatgcaggagaggtggcttatgatacttcgggttttctggagaagaatagagatttattgcacatggactcgattcagctccttgccaaatgcaaaacttttctgccaaaaatgtttgcatctaagatgttagttcaaccagatgattctatgtctgttccatatagatctagtgctgctgattctcaaaaactaagtgttgccatgaagttcaagggtcaactgttccaacttatgcaaagactggaaagtacaacaccacactttattcgttgcattaaaccaaataatttacaacttcctgcaatttatgaacaaggacttgtgcttcaacaacttaaatgctgtggggttctcgaggttgtccggatttcaagatctgggtatccaacaagaatgactcaccagaagtttgctcggcggtatggctttcttcttcttgaggatgttgcatctcaagatccactcagtgtttcagttgcaattcttcatcagttcaacattttacctgagatgtatcaagttggctacacaaagttgttcttccgaactggacagattggcaaacttgaagatactcggaatcgtactctacacggtattctaagggttcaaagctgtttcagggggcatcaagcccgtcatcatgcgagagaacgaataagaggagttttggctcttcaaacattcattcgtggtgagaaagcacggcaaatttattcctctttgttgaggaaacatagagcagcagttattttgcagagtaacttgagatgttggcttgcaagaaggtatttcataaatgtccggaaggcctcagtgataatacagtctggtattcgtggcagtcttgttcgaagatgtaatggcaatattgatctaataaacgtgctaagagagtttgaatcaaaacaggaggcagagggtgaccaaattttgatcaaggcatcagtcctggccgagttacagaggcggatactaaaagccgaggccacagtacgtgaaaaggaggaagagaatgagacgcttcatcagcggcttcagcaatatgaaaaccgctggttagagtacgagcagaaaatgaaagctatggaggaaatgtggcagaagcaaatgcgttcgttgcagtcgagcctttccgtagcaaagaagagtcttgctctgcatgagacacctaggatgtcggactcatcagtggatcagagctgggaaagcaacgggaaccatgtcagcagcgggtctcagctggtgccacgcactggtgggcgcgaaatgagcgctggcctgagcgtcatcggccgcctagcagaagaattcgaacagcggagccaggtttttgctgatgacgccaagttcctggttgaggtcaagtccgggcaggcggatgccagcctaaacccagacatggagctccggaggctgaagcacaacttcgactcgtggaagaaagatttcagtggccgaataagggagacaaagatgatcctgaacaagctcgggaacggcaacgagtcatcgcccaactccgtgaagcggaaatggtggggcaggctgaacacctccaagttttcgtgagtttgttatgtatactgattggtaattcgtagatgtaccggtattttacacgccggtgtggttctagcttcctagagtttctattctacggggtgtcgtgacttgtgaaagtcgagtgtgttgggctggagttgtgttccgtggagggcgagttgtatagttcttccacaatggcttcctttgaggggggtcaaggactactgaattgtgatgtaattacttgctgaagtagttgtcgaagcgggaagattgtgacatcgctcactattcc

SEQ ID NO: 130317 - DNA, 1154 bp, Zea Mays
gtattaaattgttttatctctcccgagccagcccgttgctggctgcttgcttctcgcagagacagggagtgagtgaggcagaggaggcgtacctgcggaggcgggcagccgaggcccgcgcaattcgcgtccagcagggtgggtcgggctcgcggcgcctctattggcattcccgcggttgtgcgggcgggttggcggccagcgagatcggctgttgtttctggcggtttttgtgaggtgtttagtgttttgctgggtgtgactgtgagcgtggattggcgactgctggaggggtttggggatcgatttgaggtcgtcggagcggagatcccgaggggacctgcggtttcgttgtggcccgtgagttggattccggacgcagtgccgtccggcgggccgccgagacgatggcgtcggtggaggtgaggtcggtgcggaaatccacggccctgcgggcgcgcggcgggcccagcaagctgcagtcggcgcggtcgatgccgctcgactacaggtactcggacggtccctcggcggcgaacggcgccggtggcgggccggctgggaacggcgtcgggcgccgggcggttgcggtggaggcagggaaggaggagaaggaaggtgaagtggtgcggttggagggggacgacgcggactctccgtacagctccaatgtggtgacagcggaggaggaggcggggaatacaggtggaggaggagacgaggtggattcggcggccgcggcgacgccaaggcggttgtcgccaagggcagcagcgagccccacgcaagtcgacgcccggtggggtgacaccagctcgtacggcgctaagaaggtgggcggtctccctttcatttctgatgattttgaaatgtgagaagtgtcggggttgggaattcagaacattgcgaaattcttttggtgaaacaatggcagatgcgatcatgcgatgctgatctcgtattttagagggctctccggtaatatgtgaaactaagcgctactataagctatgtaatcaccatttattgatggctcgtacaaaagtgtggatttgagacctttaggttgtttctgtatggcaagtaagataatgcagttatggtgtgtgtatgtaatttatttatttggttttatgagatcagaatcgactact

SEQ ID NO: 130318 - DNA, 144 bp, Zea Mays
atggcgagcctcgagggagagggcacgcagacgtggctcctgcgcacgccgtttagaagacggacttgtgacgacgcgacgagcccaacacccgagcatgggtcgccgctgcgcactggtgacatagggacggctgaagtctga

SEQ ID NO: 130319 - DNA, 107 bp, Zea Mays
gtccttcttaattctttatttgtccttcttaattatttattctgcaagctccatctccttttatgcaacttcgatggctttccttttgctgaagaggcaagctgttc

SEQ ID NO: 130320 - DNA, 1620 bp, Zea Mays
cgcaaaacacagcactagaaaatcgatgacctaaattccatagagagagcgagagaaaaaaatcccaatccatccaccctcgccgcgagatcgccgggcgccgccatgtcgactccagccgccgcctactacgccgccgccgcgcgcaagcaatacttttgctaccaatgcaaccgcaccgttctcatcgcggcctccgccgccgccgccggggagctctcgtgccccgagtgccacggcgacttcctcgaggaggtcaccgtccctgcccccaccttcatcccgctgcccttcccgttcccctttgcccccaccacgatccccgccgccagcaccaccccggcccccgccccagcagccggctccggtgggtccccttccttatcgtcctcgtcctcttccgccgcgacctccccttcccagcccaacgacatctcctccatcctcaactccttcctgggactaggcgaacaacccatcagggtcggcggctctgcctcgcgcgccgccgccggcacggccacccccgagaacgagcccgagcccttcgacccggtcatgttcttccagaattacatccatagcctcgttgagggaggcgccaacatccaggtcctcctcgacgacgccagcgtcaccctcggctccggacccggcctcgggcgtatcggcggggcaagctttggggattacttcgtcggcccaggcctcgaacaactcatcgagcagctcgccgagaacgaccccaaccgctatggcacgccgccggctgccaaatcggtcctctcctcgctccccgacgtcctcgtgactcatgccatggtcgcagctgcggagggcgctgagtgcgccgtctgcaaggaggatttctcgcctggagaggtggccaagcagatgccctgcaagcacatctaccacactgactgcattgtgccgtggcttgagcttcacaactcgtgccccatctgccgatttgagctgcctactgacgatcctgattacgaggggcggaagggcactaatcctcagccggctgttggtgtggctgctgctgcatctgggagctctactgctgctgagggacagatggaggagaggcaggagaatccaagggtggttgagaggaggttcaatgtgtcgctgccgtggccattcagtggactgggagggcaaacatcgcagcaggatgggaacagtggaggcagtggtagcaactcacaaggaaatgcacaggatggtgacccacccagcaacaagaattgatcacaaatcagctggaggttacaccttgtggcgatccgttgagaagtctgcagtatttatgtgtcaccatgacttctatacctacaggaatttacagtctatttgttatggaacaatcgttttgttttacttccctttgtcgctgttggttaggtcatgtagacaaggcagcgaaagctgccctgcagcggaatccgcgcgttgagagggtcgagactttgtgtagatttattggttggtcctggtgtatgatgaaatggtgaaatcccaaatccatgccgtgcatgctaaagggcaatgtgcttgcgtgccaacgccggcccaggagtccatagtgactgggcagagtcggttcaa

SEQ ID NO: 130321 - DNA, 2260 bp, Zea Mays
ccaaagtttatgtactcgctctggcagatacggcgtttagacgacccagttccggccgccgcggtgctccgagcctccgacggccgctgtggccctgtggcgggcggaagcaccctcgggcactagccttctgtttctcctcttcgcggctgacctgcaaagaatccccgaaaaagagttgaggagagtgtacgagttgggtaaagcagaggaagagatggtctgggtgttggaccccgtcgacacagtgcgcgggattcagaagcgttacatcttcgctgccgggacgtacaaggtcggccgcaaagattgtgatgtcattgttcaaactgacacatctatatcccgagtccatgcggagattgcaattgaaaagatggttgcctgggatccacattctggtgcacctgccagtccatcatttgttcgtgtaatcgaccgatcaaagtatggcacatttgtcaacaaagtacatggaacccagggcagccgtctgcataaagatgaagatatgatgcttactgatggggatgctgtgacgtttggaactggtaatgcgacctttaggttgtcatttgttcccatagtggttttttttcatggcgcaaaatcgacacgaattgatccatcattacatgcagtcatgaaatctattggtgcatatgctactcgtaagtggagcaatgaatgtacacatgttcttgttgacggatcatgttcgttgacacctgagctcctcgatgcagttatggcaaagaagcagatcatgttgggagactggtttgaggcaatggctgaaaagaacatacacacagagatcccttcttgtacacaatacattccaaacttgactctagatgggatggtgatcaaaatggtggatatcaacctcattcagaatttcctagaaggctatacttttatcctggggtcatcagataaatatcaatttggtgagaagctccatggattactggaatcaactggagcaaaatacgtgcacattgacgacttttgtgcaaacagccaggactcagcagctggagacactgatcatcaaattcttgtagttcctgcacgatatccattggaattcagcaagatacgtgtgctgtttactttgtcaaagatcagtgatattaagctatttgcagctatattgtctggccgcctggaagcaacttctattgaaccacctgctttcatcgttacatcctcgaattccacggatgccactattgtggcggattcggatgttgaaatggagacagcaacttctaatcctactggtgctgccaacaagtctcaacatcacaccgagaatatctctgacgatgaaaaacaaaccacaaatataaccaacgaagttgcaaggaagggtaacgttattcacccaaaacacccagagagcgttgaagatttgaaaccgatggaggaggatgtgaaggtcatagagaaaacagcaacgtacaggtccacgggtagagacgaggatgctcgcattctaagcaaggcgccaaaggatgaaaaattagacaccagcagggatggggcttctgatgtcatatttagtcagaatctggtcgtcagaagaagcctcccccagtcagctcctgccgcaccagcagaaatcggaggcgttaacttcaagcgcttcaggaagagggaaatggtgtctggaaacagcttcaaggacctcattccgtttgcgcgggaaccatacagagagtcggaccacgaacgtggcagcacgatgaccgatttcatgcgggaggagaagcggcagaaacaaatggaggccattgcggaggatctcttcaacaacgcaaagtccaagaaaagagcagccgctggaagttcgattcacaccctactcaccggccacagatgatgagagccaggcaggcagcaggagatcacctctatatgcgatctgcatgctcatctgttagccacggcgttagaagccgaattagtgtaggacggctgtcggatatggattgtacctgaggtcatgttagatatgaatggttctgagggaaatattagctgtgattttggcattacgcgtcgggcaagtttagcgttagtctagaatttgaccaaacaagaggattttctccggttggatgttgcgagcacgagggttttcttgggttgaatgttgcatggttagttcaccaagggctagtttgacaaccccattttacaacggaacgctacacctacgagattatgatgtttgatgtgttcagcagcc

SEQ ID NO: 130322 - DNA, 2323 bp, Zea Mays
ccaaagtttatgtactcgctctggcagatacggcgtttagacgacccagttccggccgccgcggtgctccgagcctccgacggccgctgtggccctgtggcgggcggaagcaccctcgggcactagccttctgtttctcctcttcgcggctgacctgcaaagaatccccgaaaaagagttgaggagagtgtacgagttgggtaaagcagaggaagagatggtctgggtgttggaccccgtcgacacagtgcgcgggattcagaagcgttacatcttcgctgccgggacgtacaaggtcggccgcaaagattgtgatgtcattgttcaaactgacacatctatatcccgagtccatgcggagattgcaattgaaaagatggttgcctgggatccacattctggtgcacctgccagtccatcatttgttcgtgtaatcgaccgatcaaagtatggcacatttgtcaacaaagtacatggaacccagggcagccgtctgcataaagatgaagatatgatgcttactgatggggatgctgtgacgtttggaactggttgtcatttgttcccatagtggttttttttcatggcgcaaaatcgacacgaattgatccatcattacatgcagtcatgaaatctattggtgcatatgctactcgtaagtggagcaatgaatgtacacatgttcttgttgacggatcatgttcgttgacacctgagctcctcgatgcagttatggcaaagaagcagatcatgttgggagactggtttgaggcaatggctgaaaagaacatacacacagagatcccttcttgtacacaatacattccaaacttgactctagatgggatggtgatcaaaatggtggatatcaacctcattcagaatttcctagaaggctatacttttatcctggggtcatcagataaagttgtgtactattctttttctgtagaaagaaagaagataattaaatacttcattgttgattaattatattcatgtgcagtatcaatttggtgagaagctccatggattactggaatcaactggagcaaaatacgtgcacattgacgacttttgtgcaaacagccaggactcagcagctggagacactgatcatcaaattcttgtagttcctgcacgatatccattggaattcagcaagatacgtgtgctgtttactttgtcaaagatcagtgatattaagctatttgcagctatattgtctggccgcctggaagcaacttctattgaaccacctgctttcatcgttacatcctcgaattccacggatgccactattgtggcggattcggatgttgaaatggagacagcaacttctaatcctactggtgctgccaacaagtctcaacatcacaccgagaatatctctgacgatgaaaaacaaaccacaaatataaccaacgaagttgcaaggaagggtaacgttattcacccaaaacacccagagagcgttgaagatttgaaaccgatggaggaggatgtgaaggtcatagagaaaacagcaacgtacaggtccacgggtagagacgaggatgctcgcattctaagcaaggcgccaaaggatgaaaaattagacaccagcagggatggggcttctgatgtcatatttagtcagaatctggtcgtcagaagaagcctcccccagtcagctcctgccgcaccagcagaaatcggaggcgttaacttcaagcgcttcaggaagagggaaatggtgtctggaaacagcttcaaggacctcattccgtttgcgcgggaaccatacagagagtcggaccacgaacgtggcagcacgatgaccgatttcatgcgggaggagaagcggcagaaacaaatggaggccattgcggaggatctcttcaacaacgcaaagtccaagaaaagagcagccgctggaagttcgattcacaccctactcaccggccacagatgatgagagccaggcaggcagcaggagatcacctctatatgcgatctgcatgctcatctgttagccacggcgttagaagccgaattagtgtaggacggctgtcggatatggattgtacctgaggtcatgttagatatgaatggttctgagggaaatattagctgtgattttggcattacgcgtcgggcaagtttagcgttagtctagaatttgaccaaacaagaggattttctccggttggatgttgcgagcacgagggttttcttgggttgaatgttgcatggttagttcaccaagggctagtttgacaaccccattttacaacggaacgctacacctacgagattatgatgtttgatgtgttcagcagcc

SEQ ID NO: 130323 - DNA, 963 bp, Zea Mays
aaaacaatcagtgccagtcaccgccatcggcggtccgcgtcaatcgaaatcgcttcgatccaagttcgtcccacgcatccgattttcctcctgcaccgcgcttggcgacttggcgtggattcgcggtagctgcgcattcgcgacgacgtctccaggaaccactgctacccagtcactcccgtctctaggtacctgttgttgcctgccgctgcctctgcctctgcgcctcgcgcgccgagggagatggcatcggcgggccgctgggcgtggatggcggaggtggcgggcgaggagctggcgaagctggaggcggcgcacccgggccgcttcgccccgctcaaggccgagctcgagcgcctcgtggccgaccccggcttggacgaggcagcgttcccgctcgtctcaccgcgcgccggcgccggcgccgtcattgatcccactccggccgcctcgtcccagcctgctgctgctccttcgaccacggtgcccgtgtgcactcaagagtcgtcgacccggaagagaaagccgcgtggcagcatgcgggagcgggaggaggggaagcggagacggtgggcgagtacgcagccgccgggagggacaaaggacacggcagacacggccatcgagcgcgcccaacggtgcctggagaggatccgcgccttcaagcagagcttgcttgccgcttggattcactgacgggatgcgggggtggagaaagaaacgagagcaggaggaaagaaaaactctggcgatggaaagggaaaccaaaaaataaaacaactttgatcgatcgagaacccagaaccccttttttttagtattggaaagtgagaatcataatgttcttggacaaaaagttggctcttcaagattacacagacctatgtaagtacagctgcccttgtacacggaatcacggattaagctgaactgcgcaaacagtaaagccagttatatgcctca

SEQ ID NO: 130324 - DNA, 468 bp, Zea Mays
atggaggcgccgtatccgcctcgcgagggaatggagagccgctccaccgtcgacactgtcctcgaggaacagaggtgttctgcggcctccaatctgcttgcaaggagagccgctgcatcggcgctagcgtcctcgaggatcaagtccaccagatccatcgcgcttcgcgcgtacggcgacatcctgccatcgcgacacatgaggacctattctccactcgaaggcggcaacgagggggaagggggcgagagcaggagcctcggcaaggggtttgggttcaacaaggggtttgtggccaagtatgacttgggggatgaggtcagatggggtcactttggctacacctgtgctgccacaattaagaagggtacacgcaagcgggagtctgtcgccatcaaggtcatccccaaagcaaaggtgatgtttagctctcgcaatgctctactctggcaccttttttatgtgtga

SEQ ID NO: 130325 - DNA, 1121 bp, Zea Mays
actggcggtgaacagcgagaacctaaacaggacagcgaacacgactcgcctaacctccggacagccacgtctttccccactctccggacgaaccttcccgatggcgacgccgacctcccctccagctgcccccgcgtccaccgccaccacctccgtctcgcgtctccggccactgcgccctttcgttccgcgccttcgcttctggccagcaccagtggcggccgccgccgctgtgcctttctcgattgctctgggcccaggctgtcgtcccttgcccggcatacgctgtcgagccgccgccgggccctcgccgccctcctcagagccccctcctccatccccgcacggttggcaagagaggctgtcaagtttgcaggatagagcaaggatcttctttgccgttctgttctggatgtcattgtttttctggggaagtgcttgggatggaagtaacaactccggaggcaagaagcggcaacgatttcgaaagaagtcaaagtgaagatgctttaagattggcatttttttcatagggatatagccttctatgttcaaggagacaaggacttgtgaacattcaatggtgcatagtgaaggtgtaggcatagaaagttgtcgtgtcgtgttacatagttgtatttcagcagccggtactgttgggggccttcgtcctccgaaggtcctcaaaaacatgatttgacaatgttttccgagtggattatgtgaacaggtattttcggatccagaattatgaatatggagcacggccaggacgaagcctgaaccagacgaaggtcgagtgtagccgaagctgtgcacagggaagcttcggcgcgatggcagaagggggaaccgacttaaagatgaaaagacttcgggggcctcgacagatttccataagccgttaacaaatgtaatggacatggatgtaattttacgtgggctgcgtcccgcgtctataaatagatgaacagtactcccgtactggacacgctgacttggcatttgcttttggcatcacgcttgtactttacaccttctctcaggaccgaaggtacatttgtaatttggaatcatttctgtttttccatgttaataaaatagaaatgattctatggtga

SEQ ID NO: 130326 - DNA, 1776 bp, Zea Mays
atggtacttcccgtgcgccacgtttctagcgtccccttcttccttcttccccgagccgcgtcaaaggaaccaaacctgtgagagctcccctctcccctcccctcccctcccacccttcccttcctctctcctcgtcgattcctcgcactatctcctattctgcacccccagccgccggcaccgacggcgattccacggggcgccgcccccgaatctgcgccctccgcgcttagatctcccccctccgcgcttccggatgtcatgatccgcccccatttgcccaaggacccggccttcccgcgcaccaatgggtccttggacggcggggcccgcggcctcggcgagatcgaggaggtgggcgctgcggccaccgtagccgtcgaacagtccccctcgcagtcctcgtccccgtcggcgtcgtcgccggcggcggcgatgtcatcgtgcgggcagtacatgctacaccgggtgcgcaagctggacaccctagcgggcgtcgccatcaagtatggtgtcgaggtagccgacattaagaggctgaacggcctctcaactgatctccagatgtttgcacacaagacactgcggattccactcccagggaggcaccctccgtcgtcttaccagcagaatggttcatatgagagtgacgacagggaatgtactccacgtcgcattcatgatgatatcttggaatcaatattgaaaacaccaaattccaaagtttcgccagctatgagtcttctgcagggatactatggccttgaaccacctccaaagagagatcaaacaagtgagggcactgagatggcagttcacagtaaaggcaaatctgcttttttggatgttgagccgtggctggagccaccaaattccgaccccttccctcttcagaataggaaaaacagaagcttgatgataggttcttttcttgatggtggtactgatgagaacggtgacagtgaaaggttcataagacggcgccagaaagctgatggtgagctgttaccgagggaggaaaatggtggtgactttctggcaagcgttggaaaaggcttggctctgaggccaaagtctagcaatcgaccagacatgaacaagagccagcagaatctttttgcaatggcggagcctttgtttggcaatggtttgcaaactgtaaggaaatcatccagcactccggagttccaggagccagagaccaacaccagttcatccatatggtcagcgagcaagtggagcataaatacagatgcttttgctcttcctctcccgatccctcgttttgacaacattccaaagcccattgctgcttggagaaacaagccggctcgcgactaataaactgctacgcgcatgatttttcctgaactccaggaggcccagaaagcgggaagtgttcatgaaggagctttacattaggttggcaccagcctctacagctttggaagcagagcagagcaggactgtagtattggcccctgctagctagaacattccgaagatcagacgcatggcgtctatgtttccagacggcatctagactaggtttacatgattctcgtgttatattgggcatgttgcgccaagagtagcaacgttaatattcggtcatataaattatagatgctagatgacatagaggagatatatttgaggaggatatattttttttctgtacacaatgagaaaatgtagagcatcaaagggcggttatatatgtgttgtatgtgtgattccataccctaatatagaggtggttggcttcgtttaact

SEQ ID NO: 130327 - DNA, 360 bp, Zea Mays
cttccttcttccccgagccgcgtcaaaggaaccaaacctgtagccgacattaagaggctgaacggcctctcaactgatctccagatgtttgcacacaagacactgcggattccactcccagggaggcaccctccgtcgtcttaccagcagaatggttcatatgagagtgacgacaggtagctagactgaaattgtactgtacatcagcatgatgctacataaccatgctaccagtgtgtctcatgttgtgtgtttctgatcaagcattttttttgtgtgaagtgataaccactagttatttaagagtcaatagaaagttcaatcaggatatgcatgtcaaggtcaaggtcaggctaggac

SEQ ID NO: 130328 - DNA, 2706 bp, Zea Mays
cgaggactctagcacgactccaactgccacgcgagctgcgagcggcgagcctcatcaatcgatcacacgcgacgcgagtacgagtacgagtatacggccacgagcagacgagctcctccgccaccagtgtcatcgcgcagcctcgcgctcgtccatggcgtccgtgtacacggcgccgcgcgccccgctcccgacggtggcgtcctcctcgtcatccgcgcggcaggtggatccgaaccctagtggaagccgcttcctcgccgggcggcgcctccgcgtcgtccgccgcctcgccggcgcggccccgtcgcggcgcgctccgtgggtctgctactccgcgcgtagccccgacgcggacgccggcgatgagcaacgccggcggggttgggacgcgatgctccacgacgccttccagggtgccgtgcgacggtggagcgagtacgtcagcaattactggcccctaccgccctctgtgaaggaggcgggtacggggaagagggttgggagttcttacgatgaggaggtgatgaatggggatgaagaggagatgaaggttggggaggaagagggaaagtggagctgggagaggtggaagcggcattttgctctcattgaggagagcgagcgtctcgttgatgagctccagttgcaactccaggcgtctgtttatagagaagactacagaagtgctcataagctgaggctagctattgctactatagtgaaaaatgacactgtgggtagagctgtctctgacttaaatatggccatagatgaggaacgctacaaggatgcagcatatatcagagatcatgctggcacaggactgctggggtggtggtctggaatttccggaaatttgtccgatccatatggtcttataattcgtataagtgctgaacatggtcgatatgtggcaagaagttatgatacaagacagctgacttctgacagctctggtctccctatatttgaaatatactttgcagaggcaaatggtggatacaacctgcaggcagtgcatctgaaaccagatgatagtgattctgaccaagtgccaaacatgttaagggagaaacttggcatggacagtataaatatatctagcagttcagtagggtctaagcatgaagaattcgatggaagtgtaaacatggatgataaagatagtgatgatagcaacattgatgctggccctggttcgaaagacttgtcaagcgatccaactgcagttcccaggattaaaatcttgaaagtggtacccatgcagaatgttgacaaagactacataatcaatatttttgatcagatttcagaggaaaatgatgatcctgaagttgaaaatgaatcttcagaagatgctggtgatgaagataacagtggagtagcagaaacagtttctgcagaagagaacggtgatgaatctggtgacgaaagtgatattgaacccttggtttcaattgattttgtcattgagaataacgatgactatgcttctcatccatctgctgaagcttttgaacgaatgccagctagattagaaaaaagagaccgcttctcgttttccttctatactgaagaatatagtaaaaaactagatgctggaaaggcccagcagacttcaaagaaaacagttcgtttgcataccgatcagcaggattatgatggttttgttgagcttgatcgtgtaaagttgagcggcagcaacaaaaaactttcgatactacaacttggcatcaaacgaaataacaaggttcagaaaaaactgcatggagttacccactttagtcgtattcagatgcctatatcttcagatcctcttaccggcttatatttgaccgcatcaggatttgactcagaaattcttagtttacaacgaaaatttggtcaatggcgggaggatggtccatctgaggagcatagtgacctattgttctatgagtatgttgaagctgtaaaattaacaggggacaacctcatgccagctggtcaggttgttttccgtgcaaaagttggtgaacactatcggctccctcataagggaattatccctagagaacttggagtgattgctaggtacaaggggcaaaggaaaattgcagatcctggtttccaaaaccctcaatgggttgacggggagcttttgatactagatggaaagttcatcagagatggtcctgtgatagctttcttttactggacatctaatgttcatcttttcgaattctttagacagttgaagcttcctgactagttcccttctaaaagtagttaaagcaggccattataatttcagcatagctgcgtttggagccaaccggagttgcctggcatcgagtacagattctgatgtggagaacagggcgcctggcatgaatcagtggcatctccacccaactctgatagcttgccacaagggtggaaaagagatcgcagtcgcaagaggaatatcatcctgccaacatgggtgagccgcgggcgcatcatacttactaattacgtttctcctctgctcgtccaccgccagtttctgtgtttctcatagcaagtagaactaaagcacctcaaagatgtaaagttatgtatgcagtcgcaaatagtttaggattttgagcacatattgataatttttatacatggagagtcagtatgtatgtgaaatagtacgagcaagagttttgtgcagcgtgatcaagctgtggccat

SEQ ID NO: 130329 - DNA, 2717 bp, Zea Mays
acacgagacgaggtcgaggactctagcacgactccaactgccacgcgagctgcgagcggcgagcctcatcaatcgatcacacgcgacgcgagtacgagtacgagtatacggccacgagcagacgagctcctccgccaccagtgtcatcgcgcagcctcgcgctcgtccatggcgtccgtgtacacggcgccgcgcgccccgctcccgacggtggcgtcctcctcgtcatccgcgcggcaggtggatccgaaccctagtggaagccgcttcctcgccgggcggcgcctccgcgtcgtccgccgcctcgccggcgcggccccgtcgcggcgcgctccgtgggtctgctactccgcgcgtagccccgacgcggacgccggcgatgagcaacgccggcggggttgggacgcgatgctccacgacgccttccagggtgccgtgcgacggtggagcgagtacgtcagcaattactggcccctaccgccctctgtgaaggaggcgggtacggggaagagggttgggagttcttacgatgaggaggtgatgaatggggatgaagaggagatgaaggttggggaggaagagggaaagtggagctgggagaggtggaagcggcattttgctctcattgaggagagcgagcgtctcgttgatgagctccagttgcaactccaggcgtctgtttatagagaagactacagaagtgctcataagctgaggctagctattgctactatagtgaaaaatgacactgtgggtagagctgtctctgacttaaatatggccatagatgaggaacgctacaaggatgcagcatatatcagagatcatgctggcacaggactgctggggtggtggtctggaatttccggaaatttgtccgatccatatggtcttataattcgtataagtgctgaacatggtcgatatgtggcaagaagttatgatacaagacagctgacttctgacagctctggtctccctatatttgaaatatactttgcagaggcaaatggtggatacaacctgcaggcagtgcatctgaaaccagatgatagtgattctgaccaagtgccaaacatgttaagggagaaacttggcatggacagtataaatatatctagcagttcagtagggtctaagcatgaagaattcgatggaagtgtaaacatggatgataaagatagtgatgatagcaacattgatgctggccctggttcgaaagacttgtcaagcgatccaactgcagttcccaggattaaaatcttgaaagtggtacccatgcagaatgttgacaaagactacataatcaatatttttgatcagatttcagaggaaaatgatgatcctgaagttgaaaatgaatcttcagaagatgctggtgatgaagataacagtggagtagcagaaacagtttctgcagaagagaacggtgatgaatctggtgacgaaagtgatattgaacccttggtttcaattgattttgtcattgagaataacgatgactatgcttctcatccatctgctgaagcttttgaacgaatgccagctagattagaaaaaagagaccgcttctcgttttccttctatactgaagaatatagtaaaaaactagatgctggaaaggcccagcagacttcaaagaaaacagttcgtttgcataccgatcagcaggattatgatggttttgttgagcttgatcgtgtaaagttgagcggcagcaacaaaaaactttcgatactacaacttggcatcaaacgaaataacaaggttcagaaaaaactgcatggagttacccactttagtcgtattcagatgcctatatcttcagatcctcttaccggcttatatttgaccgcatcaggatttgactcagaaattcttagtttacaacgaaaatttggtcaatggcgggaggatggtccatctgaggagcatagtgacctattgttctatgagtatgttgaagctgtaaaattaacaggggacaacctcatgccagctggtcaggttgttttccgtgcaaaagttggtgaacactatcggctccctcataagggaattatccctagagaacttggagtgattgctaggtacaaggggcaaaggaaaattgcagatcctggtttccaaaaccctcaatgggttgacggggagcttttgatactagatggaaagttcatcagagatggtcctgtgatagctttcttttactggacatctaatgttcatcttttcgaattctttagacagttgaagcttcctgactagttcccttctaaaagtagttaaaggccattataatttcagcatagctgcgtttggagccaaccggagttgcctggcatcgagtacagattctgatgtggagaacagggcgcctggcatgaatcagtggcatctccacccaactctgatagcttgccacaagggtggaaaagagatcgcagtcgcaagaggaatatcatcctgccaacatgggtgagccgcgggcgcatcatacttactaattacgtttctcctctgctcgtccaccgccagtttctgtgtttctcatagcaagtagaactaaagcacctcaaagatgtaaagttatgtatgcagtcgcaaatagtttaggattttgagcacatattgataatttttatacatggagagtcagtatgtatgtgaaatagtacgagcaagagttttgtgcagcgtgatcaagctgtggccat

SEQ ID NO: 130330 - DNA, 3782 bp, Zea Mays
atgcgcctcctcctcaccgcggcatggccgtgcgctatcctcctcatccttgccagtgcgctacagtcggcaacggtggcgagttccggtgccgctgctgcccgtctggagtggcaggtcctgaccagggccaacttctcgtcccagatccggctccgcccccacgtcctcctcctcgtcacgatgccctggtatggtgagtccagatcactgatggctgacatagaacgtttggttggttccaatgaggagcttagtcgcctcaagctgatggttgtatacaagaattctgaaaagttgctgacagatgctattggtgctgctgaaggaataactgtggtatactaccaacgttccatgcaattcaaatatcaagggaagcttcgtgcacatgatattctgtctgcagtgcgctatatcatgtcacttgaccatgaggagtccccttttgaggttttgcatacacaagaagatgtcgagaccttcatcgaatctaccgataaatccatactcctttatgaatcatgtggatggttcaccagattggctcatggcgggggcaaccaaagttatgaggcagcgtcatcaaataacaacacagaaaacgttgacatttctgggaagataatgaccagagaaccagatgggccactagagcttgttatagagaatgaagaacaaacctttggagttgggggtcagcttactggttctccttggaaagttggttttgccttggcaaacgaaagtgtctctgaacaaattggaaacacaaatgatggatatagaaagtgtacaatgcaaaagttccatcaatttgaaagtttctatggaaagcttactgctatagcaagagaatatttgcttccccctgaaatagctaaatttggccttataaccgaaagatcattgttgccttcactggatgttgttaatgaaggcaaccaggatacatggtttgtcatcactcatcatatgggatgcaaaacttgttcagttattgcgaaagatggcgatgatctgagaagtatagtgcaatcccaccataatcttggcattaaggaggttagtgctgatgaaagtagtagagaggctatcttccccagaaacaggccctctgtagttctatttattgatagattatcccactcctcaaaagtcagagatgaaagcaaattagtcctaaagttactaaggcagtatgtgcaaaataattacccatttcatgtcagtaatggggttccaagtagcagtacttccaaagcacgctcaaaagctgtcccttctttgaggaatacaggtatctcagatgcctattctcaaacagcaaggttgagtgcttgggcttctaagcttatggcacttggggacaaaatgtcagttatggtggttaatgatggagatagtatttcttacaaaagttctagccaaggtagtggtgctaatcctgtatatgatgttctcactaagttgctagacaaagcaagaccagggcataagtcaaagaaaacaagaataagtttagtttcacgagatgttggcctaaagatgttgtcagatcattctgaaatcaaagtggttaagtctctatcagttgaagagagtgaatacaaaagaactgatgatgcatctgccactacagctaattccaatgatgatattactgaagcttttgtggatgaaaacacagcaaaagagactgaatatatcaatgatggacaagtaccaagtatacttgagaaatcttcggcaacttaccctgatgaacatgatactgctcgtgaatttaatgatacagaaattgaggacaaaagcataagtgaagcttcagatatgagtgttgatcttaaggaagatgcccccaataatgcagatagtagtagtgaggttggaggtatgctgcataaacacataatggagaaaacagttacagaagcttttcaaattttggaacatgatgaaagaaacttgtacactgaccaagaggaatcagtatcatcaaacgagcaagttgatggatcttcattcctgagtaaaaaaatcagtaaaaccgaagatgcaatttatgaaaacacattcggtctatctgaaggattagaagaaagtgatagaagatgtccccatcatgcaacatgtagctcttcctgtgttcctgtaagagatgacacagactttactgatcaagtaacttcaagtatatctgattaccgttttgctggtgctttctacttctctgatggtggttacagactcctgagaactttaactggtggatcaagaattccgtccctggtaataattgatccagttgaacaaaaacattatatatttcctgaggaaagcgagtatagctatgcttctttacaaaattatcttgacagttttaggaatcgaagtcttccttcatattaccgtggtacctcatcagctataagttcaaaggagtttccaagaccaccttttgttaatcatgatttccatgaggcaaattcgatccctcagttgacagcatttagtttttgtccgttagtatttggacccagaggttgtgattcaaaaagtgaagtatcattttcaaacactgaaaatattgtatctggttggaacaaggatgtaatggtgcttttcagcaactcttggtgtgggttttgtcagcgagcagagctggtggtccgtgagttacaccgatcatttaagagcttttcaagctattcagattctgtatctagaaatgctcaagatgtccacaatgaagagaaaagtgaagaatatgtgatgaagggctttcctgcaatttacatgatagactgcacatcaaatgaatgccaccatttactaaaatctgcaggcatggaagaactttatccggcattgttactcttccctgcggagaacaaaagtgcaatagcatatgaagggggaatgtcagtgtctcacttaatcgaatttttggagtctcatgtgagcaattctcgctatctattggaatataaaggatttatgtggaagaagagaatgacaccacagcacgatgcaccacaggcaattcagtttaaagtcagtgataaaggtagcggcaatgttggttctgagttaccaagtcatccaggtgtcgttacaggatccatccttactgccactaagaagctcgggaccgcagttccatttgataatgccaaggtgctcattgtgtcagctgattctcatgaaggatttcatggcttgatcatcaacaagcgattaagctggggtgtcttcaaggatctggatagctcgatggagcctattaagcatgcaccacttttctatggtgggcctgttgtggtgcagggttatcatcttgtaagcttgtcaagagtatcctcggaggggtacatgcaagtcataccaggcgtctattatggcaacatagttgccacaagccgggtagtcacacggatcaagttgggcgagcaatctgtcaatggcctgtggttcttcctaggctactcggggtggggatacaaccaactttttgatgagctaactgaaggagcatggcttgtgagtgtgaagccgattgagcatttggactggccgaagagttgaaagggttctgtggacctcacgcctcagctgtttctttaggaaaattcagttcatcttgcacatatctgccactctgcccacactgcaccgtgacattgtactgagcttttttttggaacatagcagcactgtgttttcataccattcacaccgtactatggtcacatattttttatacatagtacttttcttat

SEQ ID NO: 130331 - DNA, 1126 bp, Zea Mays
gagaaaccaaataaatttatgcacatcatactgatatttggttggtgtggcattttgtttggaattcaaggatcaaaaccttaactgaattttaaaataatggaaatacaaactgaaaagaaaatacaagaaagagaactcccagccggcctcaccttttcgttttttttcttttcatttcttttttccctctggccggccatgcgcatgcgctacactgttggagaatctttcacaggagcgctgcatgcggaacctcgaggtcctcctcacgcaccagccatttcctccactcgctacggagtctgtggtgcatgcgctcgcctcttctcttgcgcattgcccagtatacaggttcatgcgtgatgccgcccagtggacccctccccatctcgcatgcatcgtctccgccgcgaagccgcgcgtaactgaattagcgtctttgcggggtccgctcggctgtgaaactgaaccccgctttagccgcctgggcgctcacctggtccgttcggtagatgaggtctaccgtgattctcggacgtcagctcaccctgcggctataaagccatgccatctccccagcgatcacccccatggcgagcactctgcagagcctgggcttcttcgtcgtacgccggcgtccctgctagtgcctgccgttgaactctccggccaccattgatccgacctcccctaagccatcgatgagtaagagaaaaacagtgaacgccacctctgtactcgccccaccttatggcgcgtcgcttctgcagtaccggcccacgctctgcgcggcgctcaggtgttacggctgccctcaaatccgtcatcggaccattggcactagggcaagcaaaagcacggacaggtgctcggcgtgctgcaacggcttccgatttgcccggctagatggaagacggctggggagcatcttccttggggaacaccgcgcgtcatgggtgccttgccgaagttcagggacggcgtgattgctcatcgtcgttcatgctccaccgtggcgccacccatctccgtgggcagtgggctgcatcgtccaatcgaccgcgcgaggacacgtgtcatctgaaaagcaagttggtacctgaaatctcaagtgccaggcaag

SEQ ID NO: 130332 - DNA, 2108 bp, Zea Mays
cgccgccgccggagaaatccatgtgtggtggagatctccatggtggtgggctccaccctgcgccgcgccagcgacggcagcgggaatgccctgggcggggccgcgtgcggggccacctcctcctcccccgcgctcgtcgtcgccgcagccggggcacgagcggtcggtggcggccgagccatcggtatcggagaagccgtccgagcctgtctccgagcggcggattctgtgcctgaatcatgctccatatgtggtccctgtccggccggtcgacgtcgccgccgtggcccgtctcctttggcatgacggtagccttctcggcgccagcagcggcggccttgccgttgccgccatcgccagcgccctgctcgacggactgctggcacgggaggagctgctgctcggtggtctccaacattgtcagtgccatgtccgtggacggcagcaagagcgagcagcaggtctcacgtatatggtaacggaaatatgacgacgtgagtttgagatcatcgttacctgttaatggagttgacatgtccattttagagtattgactatgcccaacttttttataatagagaaatcctcgcctgagtctctatttcgttgaagccacatccgtcctcccgcccgcgcctccgtggtcgacctccagctcgcagtgcgcgcggagtctgatccagcccacatctactccctcgtcgcctccgcgctctccagcgatgacttcccgcgcctccatacctcgcgccagctcttttctctggccacttctcgcttgaaccgcctccgccgccccgacctcgccgcctcgctcctcgacctcctccttgcctccgccccgccctccccggggctccttgcgcgggcgctctccctctacccgggacccgacgatgcgctccgggccttctcctcgtctgcccccgccacccgctccgacgtttccctctcggcgttcctccgcgccggccgactcgatgacatcaagtccactattaccctggcggagtcctcgcacggggtcacgcccggccgcgcttcccacaatgtgctcctccacgcgctggtcaagaactctgagcttgctgctgctcggatgctgctcgacgaaatggccaacaacaagtcgaagcaccgccctgccccagacatcatatcttacaacactgtcctcgccggttgctctgtgcaggacgatgaggaggggtttgagaagcttttgaatgagatcagcttgaacaagccggatacagtggttctccaagaaaggcgagacagccaagggggaggagctgcttgatgtgatggaatcaaaggaggtagccccgaattaccttacctacaatgctatcatgcaggggtattgcaaggaggggaatgtcggcgcagcgatgcgtgtgttcaagaagatgaaggtgatgaagaggcgggaggggagaagtgacttgggtgtgtctgctcattcgcagatatatgtggtgctgtttaggagtttggtggagaaacagaagtttggtgatgcgctgtggatttttaagagctgctttgcaatgaaggcagcaccaccatttgaggctgttaaaggtttggtagagggtttggtgaaggcaggcaggtcagcagaggccaaggatgttgttgccaagatggcctttcttgtgaaaggcgatgctaaacttgcttgggagaaggttgttggcgaatttttttttcaaagagggaacaacaaatttgaatccatgatttgctaggctttcatgcattttggacttggaatgatgatggcaaagaagataggctttcaacatgggatccaaagttgccttcttgttgtcactggagtttattttgcaaggtccgtggttagatcaggatgtaatggatgctccctttactgtaagaacttgctgaattttgtcttttaataattttgaaatgatgttaaagtttatatttgttgaagtgcttaggagatcctgatacatgatacatatactatctatctatctatctatcatcttaacatgtttgttgtaatgtgtgtttgatgcctcatcacataattgctctgcttttcctttgaaaatatgatagctgcgatgtaa

SEQ ID NO: 130333 - DNA, 91 bp, Zea Mays
cttttccgcaccttctccgcgctacccgacgtcgatccctcggcttcctctaccgcaacccctaccccggctgtgctcacctccgcccgcg

SEQ ID NO: 130334 - DNA, 3497 bp, Zea Mays
atggcgacgctggcgtcggccgtctccgacgtgggcgtcgaagaaccctctccagcaaaggcagctgacccgaaggaaccagcggccgccgtggaggaaccagcggccgccgcggcggaattggcaggggcatccattccatctcccgtcgcggccgcagacgctggagatgcctcttccggtcccgcgcttgccaccactcctcccgcttcacctgccacgtccgcagcgcctcctcccgtttctcccgccccgctagtttctcctgccccgcccgcagagccagggccgccgcggtcgcaatttgcaggctccctatcctacatagcgccagggacaccgtctccgtcggcagctttttcttataacgtactgccgagagcgccaccagcgccccaagttggcggcgctgcagcttcactacagccatgctcttctccggctcttatggttgctcctatacccgcgtcagctcttcagccaccagccccagggcaatattttgggaacagaccttctttctcatataacgtagtttcgcatgctaatgctagattgcctactggtcagcagtttcaaccgggagcaaatcttgctggtccaatttctagatttgttccaccaggttccttgcagcctcccacccctgggcacataactcgccctagtacagcgttcccaggatctatggcaccaaatcctcctggatctattcagttgccgttttcagtgccaagaccatccaatattccttttggtgctattgcacaacagggcagctcagacattaataatttgaaatcggactccccaagggcaccagaggttacaccccaagccatgcagttatctactggcatgccatcaaaatctccttcaacaatcgcaagtgcttctggaagtccttcaatccccatccagacactaacaaattcatcggtgccacctcgccctgaggtatttggagccactagaccatctgtacctgcacaaccttctgcaactgtctctaatccaacaggtttccttgggaggcctatagttccacctgctgctcctttgccccaaacaccaccaccaattgcaacccaaggtggcacaccacagaattctcaacgaccgttttacccgtcctatccttcaggacctggtattgtcccacctcaacctttatggccacaccctcatcctccacaacctactggatttcagcagcctcccttccagtactatccagctggtcctgtaggctctcttggcaggccaataactggggcttctgctgcaactatggcctttgccaatgtgcaaccacctggcgtgtcaactggtggggataggaaagtacaagcatcaacaaatgcaggatctgaacagtccactcatgctgcagctgagccagattctacaggacatggaggtcaagtcactgagcagctggaggacaatagaaatactggagttcaggattcagatgcatggtctgctcacaaaactgaaactggtgttgtatattattacaatgctttgacaggagagtcgacttaccagaaaccaaccggttataagggggagcttgagaaggttgcaacagaaccagttccagtttcttgggataaattggctggtactaactggagcatagtaactacaagtgatggaaagaaatattattatgataacaaacaaaaggttagcagctggcaacttccgccagaggtgtgtgagatcctcaagaatgcggaatctggttccttaaaagaaggttcaacttcactgcaggatgctgcaactatagagaataagggagtaataagcattgatgcaagtactcctgccatacagacaggatgctggtgcttccagtgcgccttcagctctggctacttcatctgctacctctgaattgaatggatccaaaccagctgatgctgcacttaaggggcaactagtggcgaataatggtgagaaattaaaagataacaatggtgatgtgaatatctcagattcttcttcagattcagatgatgaggaacatggaccaagtaaagaggactgcattcgtcagtttaaggtgatgctaaaggaacgaggagttgcaccattttcgaagtgggagaaggaacttccaaaaatagtttttgacccacgctttaaggctattcctagtcactcaacaaggcgggctatatttgaccactatgttcgcacacgtgctgaagaggagcggaaagagaaaagagctgccctgaaggctgcagtagaggcgtataaagaattacttgaagaagcatccgaggacatcaaccagaaaacagactaccaagaattcaaaagaaaatggggtgctgatacaaggtttgaagccttggatcgaaaggaaagggagattctttttagtgagaaagtcaaggctgttcaagaaaaagtccaatcaatgcgcaaagctgtcatagctaatttcaaatcaatgcttcgagaaagtaaagatataacttcaactagccgatgggcaaaagttaaagaaaatttccgtagtgatccaaggtacaaagccatgaagcatgaagaaagggagactatatttaatgaatacatagtggaactaaaatctgctgaacaggaagcagagcaagctgccaaggccaaagtggatgagcaagccaagttaaaggagagggaacgtgaaacacgtaaaaggaaagaaagagaggagcaggagatggaaagagtaaaaatgaagatacgtagaaaagaggctgtgtcatcataccaagctttacttgttgaaatgattaaggatcccaaggcatcgtggactgaatccaaaccaaaacttgaaaaagatccacaaggtcgtgctcgaaatcctgacttaggccaaggtgatgcagaaaagttgtttcgtgaccatgtcaaggacctatatgagcggtgtgtacgtgatttccgggcacttctatctgaggttatcactccagaggtagcagcacggacaacagctgaggggaagacggcaatcaactcctggagtgaggcaaaaggtcatctaagatctgatctaaggtacaataagctaccgagtaaagacaaagagtctatttggcggcgctatgctgatgacttgacgaggaaactcagacaatcagacacgaaggagaaggacaaatcggatacagatgggaaacaacctaggtcctctgatccacctaggcggaggtagcttgtagtaacagtcacttgtacttcctaggtgctgctcctatatttcttactgttgatagttaagggtctgctcgcactcgtctgcaacatttgaatagtcactggctcactgccacttttgatactgagagtttctgtgttgtagggtgttttccttgcaaatgtttttcccgttctggatcagatgatatatttttgcagtatgagtctgacattgcagtaccgtgccaagttgcgtctcccatgctctcaggtctcagccttccatcttt

SEQ ID NO: 130335 - DNA, 1704 bp, Zea Mays
gtttttgtcgagtttcaactatagtctaccgcaacttgcttgggactaaaagactttgtcgttgttgtagcaatatgtagttctttggttaaaactttcaacattgtaatgaattctgcataactgaatgcttcttttggaaagcacaagtttgctcctatgcgttgaccttcttttcattgaggttagaacttctccaaattgtcttctttttgtgataaactgaggctcaacttcagtacataaggcatataacaagaataattgagcaattaataaataaactatagtgaagaactagtgattttaagtatccttttgttcattcaaagcatagtatgatttcattcttacaaagcagtaattttctctacaagaaacaaatgtgactactgattaagtccaaaagatattttctttccttattataggctattcctagtcactcaacaaggcgggctatatttgaccactatgttcgcacacgtgctgaagaggagcggaaagagaaaagagctgccctgaaggctgcagtagaggcgtataaagaattacttgaagaagcatccgaggacatcaaccagaaaacagactaccaagaattcaaaagaaaatggggtgctgatacaaggtttgaagccttggatcgaaaggaaagggagattctttttagtgagaaagtcaaggctgttcaagaaaaagtccaatcaatgcgcaaagctgtcatagctaatttcaaatcaatgcttcgagaaagtaaagatataacttcaactagccgatgggcaaaagttaaagaaaatttccgtagtgatccaaggtacaaagccatgaagcatgaagaaagggagactatatttaatgaatacatagtggaactaaaatctgctgaacaggaagcagagcaagctgccaaggccaaagtggatgagcaagccaagttaaaggagagggaacgtgaaacacgtaaaaggaaagaaagagaggagcaggagatggaaagagtaaaaatgaagatacgtagaaaagaggctgtgtcatcataccaagctttacttgttgaaatgattaaggatcccaaggcatcgtggactgaatccaaaccaaaacttgaaaaagatccacaaggtcgtgctcgaaatcctgacttaggccaaggtgatgcagaaaagttgtttcgtgaccatgtcaaggacctatatgagcggtgtgtacgtgatttccgggcacttctatctgaggttatcactccagaggtagcagcacggacaacagctgaggggaagacggcaatcaactcctggagtgaggcaaaaggtcatctaagatctgatctaaggtacaataagctaccgagtaaagacaaagagtctatttggcggcgctatgctgatgacttgacgaggaaactcagacaatcagacacgaaggagaaggacaaatcggatacagatgggaaacaacctaggtcctctgatccacctaggcggaggtagcttgtagtaacagtcacttgtacttcctaggtgctgctcctatatttcttactgttgatagttaagggtctgctcgcactcgtctgcaacatttgaatagtcactggctcactgccacttttgatactgagagtttctgtgttgtagggtgttttccttgcaaatgtttttcccgttctggatcagatgatatatttttgcagtatga

SEQ ID NO: 130336 - DNA, 3630 bp, Zea Mays
atggcgacgctggcgtcggccgtctccgacgtgggcgtcgaagaaccctctccagcaaaggcagctgacccgaaggaaccagcggccgccgtggaggaaccagcggccgccgcggcggaattggcaggggcatccattccatctcccgtcgcggccgcagacgctggagatgcctcttccggtcccgcgcttgccaccactcctcccgcttcacctgccacgtccgcagcgcctcctcccgtttctcccgccccgctagtttctcctgccccgcccgcagagccagggccgccgcggtcgcaatttgcaggctccctatcctacatagcgccagggacaccgtctccgtcggcagctttttcttataacgtactgccgagagcgccaccagcgccccaagttggcggcgctgcagcttcactacagccatgctcttctccggctcttatggttgctcctatacccgcgtcagctcttcagccaccagccccagggcaatattttgggaacagaccttctttctcatataacgtagtttcgcatgctaatgctagattgcctactggtcagcagtttcaaccggtcactggagcaaatcttgctggtccaatttctagatttgttccaccaggttccttgcagcctcccacccctgggcacataactcgccctagtacagcgttcccaggatctatggcaccaaatcctcctggatctattcagttgccgttttcagtgccaagaccatccaatattccttttggtgctattgcacaacaggtgtagttgcaatcctcccaatttccatcaagcactatgcatgttcttttttctttgtatgtttgaatctttggattaaagtgttgctaacttaatgatttttattacagggcagctcagacattaataatttgaaatcggactccccaagggcaccagaggttacaccccaagccatgcagttatctactggcatgccatcaaaatctccttcaacaatcgcaagtgcttctggaagtccttcaatccccatccagacactaacaaattcatcggtgccacctcgccctgaggtatttggagccactagaccatctgtacctgcacaaccttctgcaactgtctctaatccaacaggtttccttgggaggcctatagttccacctgctgctcctttgccccaaacaccaccaccaattgcaacccaaggtggcacaccacagaattctcaacgaccgttttacccgtcctatccttcaggacctggtattgtcccacctcaacctttatggccacaccctcatcctccacaacctactggatttcagcagcctcccttccagtactatccagctggtcctgtaggctctcttggcaggccaataactggggcttctgctgcaactatggcctttgccaatgtgcaaccacctggcgtgtcaactggtggggataggaaagtacaagcatcaacaaatgcaggatctgaacagtccactcatgctgcagctgagccagattctacaggacatggaggtcaagtcactgagcagctggaggacaatagaaatactggagttcaggattcagatgcatggtctgctcacaaaactgaaactggtgttgtatattattacaatgctttgacaggagagtcgacttaccagaaaccaaccggttataagggggagcttgagaaggttgcaacagaaccagttccagtttcttgggataaattggctggtactaactggagcatagtaactacaagtgatggaaagaaatattattatgataacaaacaaaaggttagcagctggcaacttccgccagaggtgtgtgagatcctcaagaatgcggaatctggttccttaaaagaaggttcaacttcactgcaggatgctgcaactatagagaataagggagtaataagcattgatgcaagtactcctgccatacagacaggtggccgtgattcgttgccacttcggcaaacagttgcccctgcatcgccatctccattggatttaataaagaagaaattgcaggatgctggtgcttccagtgcgccttcagctctggctacttcatctgctacctctgaattgaatggatccaaaccagctgatgctgcacttaaggggcaactagtggcgaataatggtgagaaattaaaagataacaatggtgatgtgaatatctcagattcttcttcagattcagatgatgaggaacatggaccaagtaaagaggactgcattcgtcagtttaaggtgatgctaaaggaacgaggagttgcaccattttcgaagtgggagaaggaacttccaaaaatagtttttgacccacgctttaaggctattcctagtcactcaacaaggcgggctatatttgaccactatgttcgcacacgtgctgaagaggagcggaaagagaaaagagctgccctgaaggctgcagtagaggcgtataaagaattacttgaagaagcatccgaggacatcaaccagaaaacagactaccaagaattcaaaagaaaatggggtgctgatacaaggtttgaagccttggatcgaaaggaaagggagattctttttagtgagaaagtcaaggctgttcaagaaaaagtccaatcaatgcgcaaagctgtcatagctaatttcaaatcaatgcttcgagaaagtaaagatataacttcaactagccgatgggcaaaagttaaagaaaatttccgtagtgatccaaggtacaaagccatgaagcatgaagaaagggagactatatttaatgaatacatagtggaactaaaatctgctgaacaggaagcagagcaagctgccaaggccaaagtggatgagcaagccaagttaaaggagagggaacgtgaaacacgtaaaaggaaagaaagagaggagcaggagatggaaagagtaaaaatgaagatacgtagaaaagaggctgtgtcatcataccaagctttacttgttgaaatgattaaggatcccaaggcatcgtggactgaatccaaaccaaaacttgaaaaagatccacaaggtcgtgctcgaaatcctgacttaggccaaggtgatgcagaaaagttgtttcgtgaccatgtcaaggacctatatgagcggtgtgtacgtgatttccgggcacttctatctgaggttatcactccagaggtagcagcacggacaacagctgaggggaagacggcaatcaactcctggagtgaggcaaaaggtcatctaagatctgatctaaggtacaataagctaccgagtaaagacaaagagtctatttggcggcgctatgctgatgacttgacgaggaaactcagacaatcagacacgaaggagaaggacaaatcggatacagatgggaaacaacctaggtcctctgatccacctaggcggaggtagcttgtagtaacagtcacttgtacttcctaggtgctgctcctatatttcttactgttgatagttaagggtctgctcgcactcgtctgcaacatttgaatagtcactggctcactgccacttttgatactgagagtttctgtgttgtagggtgttttccttgcaaatgtttttcccgttctggatcagatgatatatttttgcagtatga

SEQ ID NO: 130337 - DNA, 93 bp, Zea Mays
ccaaacagctaacttctgcagcagcttatcagttcagctgcttttcagaatacactaaaagcagccaacaagcagaagctgtttttcaccagc

SEQ ID NO: 130338 - DNA, 704 bp, Zea Mays
gatgaatgtcgtttcttcccgatccactgtgatcgccatggccagtcatcgttgccccgtcctctggctattgtcgcccctagctccgtcgtcaacgtcgacccgcccatcaacaacaaccccgtttggctccagagttccctcccccgtcggcaaccaggaccttggcagctcagcaaacacaaatactgaaccttgtggcttgacgctgattttgaagcccaagtctttcagcaacagaaggatgaagtctcttttcacctcatagtcctagccaaagtcatcacaattgcaagcttcttggaatggtgcaggagctgaatctgttaattttatgtggatatttctaatagctgaggcgatgcttgctgctgcacaagcccaaccgagtctccaacctaatcagtccagacaggtagtttgtcaagtgtcatctcacaagtcttgctatttctatagctggttgtgtcactacaaactgtgcagcaaattctgagttgtgctcaccagtcacactgtaagtttttgacagtgaggatgtgatgatggtcctctcttgcatccctggaagagaagccagtgagatatgcttgttcgcatcgtaagtaatatactcataaacctggaaggtatttacacacattgagacaagatgtagacagatttttatgaaaaattgattgggaaatatgtacaaaaaaaaa

SEQ ID NO: 130339 - DNA, 1259 bp, Zea Mays
tgtttgtcgttccgtttctatatttcatataaattttttactaccgtcgcaacgcacgggtacctacctagtacgatcatatatgagtcgaagttgaaggctccaagcgctaccgattttcacgtgagtcccaaaaccgatagcggaacaaacaaggggctaaactgcaataagaactttcccctcggaactcaccggctggcggctgcagggtcgacttcaatacttcatccaagctccattttctctgaggaagcgaaccttccctttccccaggcacagatccggctctccgccgccgctatggccgctcgccgcctcctcctgctcctcgccgttgtcgccgcgtccctcctggctgccgacgcgcggccgtgccacggcttcctcgtcgccatcccgtccgatcccaaccccgaccccagcagaggctacggcgccgtcaaccgccacctcggcgctccccacgtcgccacggtcatcaccgtcttccgcgtgcgccgcctcggtccacacgtcccccacggccaccgcaaccaccaccacctccattctatccccgccaacgttcagatccatcgccccgatctcctgcaccccgccacggccgcggccgccgggccccaggagcgcgtcagggacatactcgtggtggtcgtggggctcctcttcggcctcgcctgcggcgcgctcaccgctgcctccgtgtacctcgtctggtccatggtcgccggcgccgccgcggcttccccgtacgacgagctctatgaggacgaggacgagtcgtctgacaccgagagccccaagaaggtcggatacgtcatcatccaggagctcgaggtgcatgaaggcggtaagaagtaggcccagatctagtggcgttcgtgctcccggctcccgggtgctagggcaagttcctgtagtgggatgacctattgccatatgattatgtgttgagtgaatcttaatgtctgtatgactatgtagtgggtggctgggacttgggagccttagggttttgccctccatgtgaatatatgatcgtgaagcacgcttaagctacgaaatgtgtttgtttctgatgaacttatcaatcaatttcatgcgccattgtgaaatgttcttctcaaacactgacatttgatctggtgtctaatgtgctgtggcctgtactccagaacagagttctccctgcttatttttgccagttttgtgtcccacttattggtgttatgcaatgacttgtctttcctgatgca

SEQ ID NO: 130340 - DNA, 143 bp, Zea Mays
cccgtttcgttgttttcggttctcctttgcctttgtttcccttttctgttctttgggggttgagctctgaggttttcatacggggtttcatctctagcctaccccaacgtgcttgggacaaaaagactttgttgttgttgttg

SEQ ID NO: 130341 - DNA, 468 bp, Zea Mays
cagcctggtgaaattgccggtcgtagaagttcaactgaactggctcatgtatggaacaaggcggtggacgagactcttgggaaacttgttgtgtaccttagctctcgtggatggtgatccaagcaccatgtcgaacatggcaactgaggaggcacgggtggaggaagactcttttttgaagccactgatgtgctcatatttctctgtatccggattgagcatgttttgttttaaaagaaaagatgctcccagtgaccgatttatctcgaactgagctgattctactgcatgtttcccttaactggtgcatgttacttcgaggtcaatgttctggcccctgtgaaaggcaggattcgtctaactattttgcatatatctattgaaaataaagccttcgtccaaaaagattgcaagtataggttgcgtgcagatcaaaccagtttaactgatggaggttatagtattaac

SEQ ID NO: 130342 - DNA, 643 bp, Zea Mays
gcctgcgaacttatgtgaccaataagatcaagctccagctcaaccgaaggtgtagctcgagccatggctaagatcaccacaatggcggtagtggcggcgatcgcgcttgttcttctacccgtcggccgcggcgaggagatgcccaccgcagcgcacccgcacgggctctccttcgagagcccgctcgctctgtcgccggctgcttacgacttcttccaccccagcgctcgcgcccgacgagctcacggcgtcgcgccggtgccggcgctcgcgcctcgcggacaggagcagctgaggcctgagggagtccgcggtcagaagaacatcggcgagcgtagcgaaggccgacctggacgaagaggccgtggcgcccgtggagacgcaccggcgcctcaaccacaaggtgacatgcgtgttcgtcggcgccgcagcagccgcgctagtggctatcggcgtggcgtacgccgtggtgcggcgccgggtcgtagcggcgcgcggtggcgcgggcgcgcccaagtcgaacgcgtagttgcttcagggcccgcggactggtagctttaggtgggcccagagagttgggccgggatgtttgtataaatatggaatgcaagattttgtttgttgcgtctaacggaaaggaaaa

SEQ ID NO: 130343 - DNA, 1015 bp, Zea Mays
tagaataatgctgaaatcattgatactagtaatcaagatgaattaatcttagtggtgggaagtacatcgaccgagcctctccgggggaaaaatgccaaaaacagaggcttttaatctctactctcccctcatcgatcacgactagagcgacaagaaccaaaacataataaaaagagagagagaaaaaaaagaaccatcgacctaatccaaatggattaaaaggccactaatcaagcaaaagctcctcacttcctcctcctcaaggcgagaacgggatcatcaaacgaggccaggccacggtaggcgggcattgccggccgcgcaaggctggcgctgacagtagcggtcggtcagtcctggaagccggtcttctcccagatggcgttgcggacgcggcggaggtcgcggcccttgagcgtgcgcccggcgccctcgcgcacggagaaggacgccgccgcgcgctcccgcccctgcagcacctcgtggggcggcacccagcgccggcccccggcgccgccgaaggccgccgcgtcgtcgtccgcgcggtcgtcgtgcgccgcccacccgctcccggcgtactcggcgcccaggatcttggaccagtccgggatgttgacgggcaccgacgccggccccggagcgccggcccccacgccacgcggcttctgcttggacggcgcggcaaccggcggcgaccgcgcgtacgggtcgaccgcggaggacaggaacggcgacgacgacggtgaggacgacgccgggtatccgccgccgccgccccagatgacgtcggcctcgtcgagctccacgccgtggtcggcgccgcccacagggttgaccggcgtgaacagccggtgcgacgcgaccatggagaggctgctccggccggccatcctctcctctccgggcccggggggagagaagggagaaacgactggtctgtgactgtgactgtgtcgaacgaactaccgcgcgtggggcgggtgagggtaaagcacttcttctgtgaagtggttcg

SEQ ID NO: 130344 - DNA, 2772 bp, Zea Mays
ccacaacaaggtagaggcgtccgaggcctcgccataattccaacccactgtgtgtgccgctgtagcagcgcagcgcagcgcgcgcgccaccaccgtcaacctcctgatctccccgcctcgccgccgtcgattcttcgccgtcttcctggggctcgggggcagccggagcaagcttgggggggtggtgtcctcggaccgacgacagagtcgttgcccgcgaagatgccggccctggtgtacattcctactccgctttgcccggtgccagagcgtttctcccggagtagcggttgcgccgcctcatgatctgccaattggaacccctgggcgtgcgcagaggaggttgctctgcagctggacagtgatcgcgtttggtgggtgtggcggcggtggaggaagacgacacgacgaagacgaggaggtcaggaggccatgaaggaggcgggcgaggagaggtgccttgacccgcagctgtggcacgcgtgcgccggcggcatggtgcagatgccccccgtgcgctcccgtgtctactacttcccgcagggccacgcggaacacgcgcacggcggcggcggcgccacggacctcgccggggcgcgggcgcgacctctcccgccgctcgtgctctgcaccgtcgccggggtgcgcttcctggccgatccggagaccgacgaggtcttcgccaagatccgcctcgtgccggccgcgcccggcgaggtggagttcggagagccccgcgagttcggcatcgaccccgaggacgcccgggagaagctgtcctccttcgccaagacgctcacgcagtccgacgccaacaacggcggcggcttctccgtgccgcgctactgcgccgagaccatcttccccaagctcgactaccgggccgacccgccggtgcagacggtgctcgccaaggacgtgcacggggaggtctggaagttccgccacattttccggggcacgccgcgccggcatttgctcaccacgggatggagcgcgttcgtcaaccagaagaagctcgtcgccggggactccatcgtcttcctgcgcaccgagcatggcgagctgtgcgtcgggatacgccgtgccaagcgggtgtcctgtggtggcatggagtgcatctctggctggaacgccccggtgtacggggccttgtcggcgttcttgaaggacgaggaaggtaagatcactaagggtcctggtgggtacatgagaggcagggggaaggtggagatcacggacgttgttgaggccgcaagcttagccgcgagcgggcagccatttgaggtggtgtactacccgagagctagcactccagagtttgttgtgaaggctgcatcggtacagaacgcgatgaggaaccagtggtgccctgggatgaggttcaagatggcatttgagacagaggattcgtcaaggatcagctggtttatggggacgatagcttctgctcaggttgctgacacaatcagatggccaaattcaccgtggaggcttcttcaggtgtcatgggatgaaccagacttgctgcagaatgtgaaatgtgtcaatccatggcttgtggagattgtatcaagcattccaccgattcacctagggacattttctccacctagaaagaagttgcgggtggcccaacatccagactttccatttgagggtcagctgttgaatccaattttccatggcaacccacttggtccaagcaacagcccacttcgctgtttctcggacatcgctcctgcaggcatacagggagccaggcatgctcaatttggtttacccctaacagactaccagcttaaccagctgcacctcggtttcaaccggcttggtgctatgactccgacgccccgtatatccaagggttttgtgatcagcagcgcaccagccagtgagagtgtctcttgcttgctgacaatcggcacaccacaggccacagagaaatctgatgacataaagagaccccacataatgctgttcggaaagcctatccttactgagcagcagatggattctggaggatcgagggaaggcctatcccaagaccgcaaggcttctgagcttgggctagaagacgggcactgcaaggtgtttatggaatcagaggatgttggccgcaccattgacctatctgtctttggttcgtacgaagagctgtacggccagttagcggacatgtttggaattgagaaggcggaaataatgaggcacctttgctaccgtgatgctgctggtgctgtcaggcatactggtgaagagccgttcaatgacttcatgaaagtagcacggaggctcaccattatagagggcacggaggggagaccgcagaaacctctcgtggaatacatggtcgagcgggcttgattgcatggtggttcggacaaggcaatctgaaacttgtgcaagactgagcttagagcgaagtaactgctgtgtgttttcatttgtgtttgtctgccgccgaagcagaatcgcgatgcttgtctggtcgtgtggaaaaccttggtgtacgcttcgtgacttggtcgttagaactctgtcgtggtcagttgtgttttgcttggtcgaagttgatgaataacctctttgacgaattagcttggaataaagttcgagttgttgtgttatggtaagtgccatggcaacatggcaattcagttgtcactgtcgatttagttaaaatgcgtgtatctgttattacagtttgacaacacttattcatttcatcagcatacttgtggccggttatctatcgccagtttgggaaca

SEQ ID NO: 130345 - DNA, 1491 bp, Zea Mays
agctacaagctagaacaaggccatccattccaccacccttgtagtagtgcgcgctgttcgcttgcactagctagccagcagcgtgcgcaccacctctcgccgcggcagcgacgacgacgggaggcttgttgagagctagctagctagctcagcgagttcgagagcctgtgtgctagagagacagacagagagagagaaaacatactcctcctctgcacacaggggagctagaagctagcgttaattatagcacagctagccgcaaccgtcgcaggatatatatatagacgacagcaccgatcgagagtagtacgtgaggccggcatgacgatgaggcagtcgaggttcaagaggatctgcgtgttctgcggcagcagccaggggaagaagcggagctaccatgacgccgccattgagctcggcaacgagctggtggcccggagcgtcgacctggtgtacggcggcggcagcatcgggctcatgggcctcgtctcccaggccgtctacgacggcggccggcacgtcatcggggtcattcccaagacgctcatgacaccagagataagcggcgagacggtcggggaggtgcgggcggtggccgacatgcaccagaggaaggcggagatggcgcggcagtccgacgcattcatcgccctgcctggagggtatgggacgctggaggagctgctggaggtcatcacgtgggcgcagctaggcatccaccacaagccggtcgggctgctgaacgtggacggctactacaactcgctgctgaccttcatcgacaaggccgtggaggagggcttcatcaaccccagcgcccgccgcatcatcgtcctcgcgcccaccgcgcaggagctcatggacaagctcgaggagtacgagccttaccacgacatggtggcgtccacgctcaactgggagatgggcaacctgcaggggtactgacgatcgacaccaccactgcgcatgcaagagcccgccagagagctagctaggcagtgcagctagcgcgcggcgcctgaatctgatgaagcacagccggggaacggggcattcgatcggtggattattaagcaacgagcgagcttaactagatagccgtcgtcagctacattgggattttccttttctttttattaactcgacgcaggtctcggtttggagtgccgggcgaaggaaaaaaaaaagggtttggttggcgtacgtagcaggagtatgtcgtagctgctagctagcttgttctgtatatgatgcctcgtgttaattagtttgcttccaccggggatgacgacgatgatggcttgcagtgttgcttgtagcgcagtaagaaaaaaaaaacttggccggtttccccggcctccctccctgctgtgtacgttctggttagtagtgttagcagccggtacctgcctatgtatgctaccttcaagatgctcaattcgattggatatatatatgcagcagatcaacccagcaagtgtgtaatac

SEQ ID NO: 130346 - DNA, 2057 bp, Zea Mays
gatcactagtactactaaatgcaacaattcaatgtgaatcactagatatcactttcaatctctttatggatgaatcactaccattagaagtgagccaaagatatttttgggtttactaggttgtatatcaagttaggaagccataatgctcacccaaaacctagacatgctctatttataaggtcatatataaggagcacataaaaaagtgcctttttagcgggtgacatatttggatctctatatataatatgtttaggtgctcgctgttagcacattggaccccgaaaggcgagtgccttgacatggatgttcccccgtttaatcttcagttccagatccatagccgtcatatatatcaagagccatgtgccgtatgtgcctggctctggctgtatcacgccatgtggcagcctatagctcggtacactactgcaaaagtgtcggcaacgcgttgttgcatgactggagcatcagcagttgatcacacgcggaaagcggcttctccttgtgtttgcttgttgctctgcacaaacggccgtttctttttttttttcttttaggaaaagagagatgaagaaaagaaacaacgtatagagagctacagcggattaatctcacgtacggcaatgcagacaagagagagagagagagagagagagagagagagagagagagagagagagagagagagagagaggagggtttatcaggtcatgctgtacgtacaatgtcaaatcagcactaacacatggtatggtaggatcacagctagcagagtgcagactgcagagacggacggggctgaaccttcttcttcttctctgtggacgttcagcgagcctagcggcagatgatgcagaggacgacggcgacgatgatgatgagtatgagcagcggcagcgagatgatgagcacgaactccatctgacgacctccctgcaaaaaacgagagatggaaaatagtaaaaacgccgccatatctatctgcacatatatggtggttttagcatgttacagtagtgcagcagactggccagactatacaatttgcaggtagcggtagcacaatgggttgtacgtactattgtattcagaacggcatccgtgttagttcttgatcacgctggccactatatacgaatcgattcctgatcagtgtggcgctttgggtcaaactaataacctgcctttggatttcccagaagagaggctgtatgtaggtggtgctggttcactactgcgattgcgagtagttggatgcagtcaaacatggacaccaagtcagtctcgtctagatcactcaccttagtcaacatcaacagatgactcttgcgtctggagcttcgtccagaataccagcgaggcacagttggcgtgctccctcaactactccattttcctaacctaaagcctaaaggcgataaaaaaataatatgctgctgtgctgaaaacaactgctttggtttctgctgaaaaagctactcaaatcgatgtaaagttcatgagatcgcgtaccagcgttgatctagcgaggacggcatacgtaggcatcagcgattcagcgtcgcaggccggactactaagctagctagagtcgccataagatcgaatggtgatcgaatttgtcgcgacaacaagagcagagcatgcatgtcggagggagaagccgcggctacaaaccccagattccatgcgtgggggcgcaccagatcatgaacgatgacgaccttgatacctgatccatacaggatcgagcgcggagcccctgagactgctgagggggccccgcagagcccgcgaacggactggaaagtaatcggcgggcgagaggggcagagagtggaaggatcggaccagtacctgcgcgcggatggagctcttgctggatcggagcagcgaggtggggaagagaggaggcgacagagcgcagtgcagtaatggggactgcgatggagctggcggaagagctgggcgagaagatgccagagccgataaagcgaacgcgaaggcgatggccgatgaccgaccggtggggtggtgtgcggctgcggcag

SEQ ID NO: 130347 - DNA, 304 bp, Zea Mays
gtcatgctgtacgtacaatgtcaaatcagcactaacacatggtatggtaggatcacagctagcagagtgcagactgcagagacggacggggctgaaccttcttcttcttctctgtggacgttcagcgagcctagcggcagatgatgcagaggacgacggcgacgatgatgatgagtatgagcagcggcagcgagatgatgagcacgaactccatctgacgacctccctgcgcgcggatggagctcttgctggatcggagcagcgaggtggggaagagaggaggcgacagagcgcagtgcagtaa

SEQ ID NO: 130348 - DNA, 749 bp, Zea Mays
cagaaacgcaggcagcccagcccacgccgcgaggaagcctgaggccgagagaggactgagcaagcgtcccgcgagaaactggtgttccggaccaccacgcggatgggctcgggcgacccggcggccgaccccctttcttccttcctccgccaccccggcgcgttctccttctcccgtcgcgtcgccatggcgcgcgacgccaccgccacatccgtgccagcgctccgcccctggatcgttgacctcctcccgctcctcgtcgtcctcctcatcgccgcccacgtcctcgccctcggttactggatctacaggctcgccacggacgggtccaggcagcccgcgcggagcaagaagcactaaggggacggcgcccgcggccggatgcttgaaaccagtttgttatttcagtcctgcatccttggcttgttgatctccaaccttccaacgtcagatgatggcgtggaaagttcctgaaagaactaggacagggaaccgatcttatccaatggtttgttcagatgttggtgtcaaaagtgacgatagctgaatagctgatatgtggaaggaggcccttttgagcataaatagttttcggttgctggataggtttgacatctctcgacctctccgtgtaaagaacagtagctagacagatgtgccgtttcatatgttgtggcctggtgggcttttgtaattcatgagcagcattttattactgggcaattaagttaacgaggcatactataatg

SEQ ID NO: 130349 - DNA, 830 bp, Zea Mays
cagaaacgcaggcagcccagcccacgccgcgaggaagcctgaggccgagagaggactgagcaagcgtcccgcgagaaactggtgttccggaccaccacgcggatgggctcgggcgacccggcggccgaccccctttcttccttcctccgccaccccggcgcgttctccttctcccgtcgcgtcgccatggcgcgcgacgccaccgccacatccgtgccagcgctccgcccctggatcgttgacctcctcccgctcctcgtcgtcctcctcatcgccgcccacgtcctcgccctcgtgcgtcctcctcccctagctctcctgttattgccacctgccggataagattggggttatgaatttagcttcccgttgcagggttactggatctacaggctcgccacggacgggtccaggcagcccgcgcggagcaagaagcactaaggggacggcgcccgcggccggatgcttgaaaccagtttgttatttcagtcctgcatccttggcttgttgatctccaaccttccaacgtcagatgatggcgtggaaagttcctgaaagaactaggacagggaaccgatcttatccaatggtttgttcagatgttggtgtcaaaagtgacgatagctgaatagctgatatgtggaaggaggcccttttgagcataaatagttttcggttgctggataggtttgacatctctcgacctctccgtgtaaagaacagtagctagacagatgtgccgtttcatatgttgtggcctggtgggcttttgtaattcatgagcagcattttattactgggcaattaagttaacgaggcatactataatg

SEQ ID NO: 130350 - DNA, 1023 bp, Zea Mays
atgtacatgtacggagtcatgaagaagcttggggaaagtggttatatcatggccgtccaccagctcagtggttttgttacgcacaactcttaccgcaagtacatggatgatccagaatgcatcgatctacgatctaacaaggacaacaaaatgttcgctaaaacactgcaaacttcccaatacgttccaaaaggcaccattgaaggattggaggcggcgggcgacgagatcgagctctcagagtcggccgtcagtggcgtcacagacaagcctgcgcgtgttcttctagaaggcgaaggcgtcgaagtattttcttcaagcaagagatggagctttctttggtttcagaaaacagtttctttaatgtgggcaatgacattgcttagcttgtatgttagagttcaggtcaccatattaggcagccatctctacttagattttgcccagggtacaaatggtgcacagttacaggcagaatctgacacctttaatgaaaatggacataataccttcgttgcaatggatgattatcttgtcactgacaaaatcactgcattcatagtgcaaatgcaaaatgcagcaactgaagtccttaaagaattcagattcagtatatattcagtacatgtgctagactcgaacgctgcgctctatagccgacagaagtctgcggaggcgaagttgtacgagacttggatgatgcccaccatgtgttcgttgaaatcccctcaagttgcaaagaagtatatttatgatgtgcacataccggataaggaggaagggctcaaggccaggtgccactaccggagcggtaaggtgagtggtgctgccgacccattcatccatcaactgcagtctctaggtcctattcatattgttcgtccatctatcgcgatcgcatccaggacggctggctccacctacaactgcgtggacaacatcctgcccaacatcatctcccagctcctcgcattctccaacaagttctgctatgagggcctgaagccaacctacgacaactag

SEQ ID NO: 130351 - DNA, 598 bp, Zea Mays
tatatacagtctttttgcagctaaggctggtgaatctagtgttgttgctgttgatgggagtgcaaagatggcttctgtggctacccaagttgcaaagaataatggtatgttgtatgatgagaacgtggaagcagaacagaagcaaggtagtgctcaagttataagtgttgtacatacaaaggctgaagagctaaaccagaaaatacaagtcccacaaaatggctttgacctgttagtgagtgaatggatgggatattgcctgctgtacgaatccatgctaagttctgtcatatatgcacgtgatcattttctaaaacctggtggtgctattcttccagatactgcaatgattcttggtgctggcttcgggaaaggtggaactagcttgccattttgggaaaacgtatatgactttgatatgtcatgtattggcaaagaagtaacttcaacttcagctcgatttcctgtagttgatgtactgtcttctcaggatattgtgacagagactgctgtactccatggctccggatgtccggattcttgtagaaacgttttggatatgatgaatcagaatcactttgtgaaatcgcttggctga

SEQ ID NO: 130352 - DNA, 1110 bp, Zea Mays
aatcggagttaaaaaagagaagatatgaattttctaagattttatatttagtttcacagtgaaaactagtttccagatttattttgggtattttcaagttccaccaactacgaccactattctctaggatctcagagggtcacttgtaaattctaggacctagtggtaacactcttagcactagtcgagaccgcgggttaaataggataaagtcgagagtctctttatgaattattacccggctaacacacatgcagacggacatgagccgttgatcgctagatctgcggctccgatccaaatcacgaagggatatgtgacgatataatcctagctgtccactatgggattgacgacccaccttttaaataacacagatctaatctacaccgtctattactcgaccagtgcttcaaaaccgatcgctactcctaatctaatcagagccacacaatcggagatcgacgtttcaaactacgaatgatgaagcgatacacccaaaatgattgggccatccaattgccaattagtgacacatgcttgtcttcaaccgcacactcccatctctctccgcaagctaaccatggcatgcccgccgtccacgacggtgcactgcccggcgccacccagagtccccgagcacaggacagaccgtagacgcacccaaacaaagcggtgatcacaacagagaggacgcttacctgagacggcgacgacaggtgaagctcgaagctcgagcggtgatgctgatactcgatgagcggctgttcaccgatgggtctttgggtcgcatctttcttgacactggtgtgctcgatctcccgctcggtgtcggtggtcagcgattcccgccgctgaagtctctatctcccctatacgcggcagcttcaccctctctctctccgctagcctcgatggtggcattgtttgttcttgctttggatagttggacgagggataaagtcgtccagtatataaaaagcccttggaccaggaacgagtccagctgatggacaacggcttcaggcgagcaccccagcggcatccacggcgtatacgtgaaacaaaccggagttcagggatgagaacgatgtcctgacctcatctagc

SEQ ID NO: 130353 - DNA, 303 bp, Zea Mays
atgggggggggggggggggtgggggggcggccatggcaagggggatgggcggccagcgccatggcgagcaggcgcgcgacaaggagaaccagcgacgcgcaggagctccagggcgcgcgcaggaggaagataaggaagaagcggctagggagggagaacgagctgcacgactgcaccagcaggcttggcttgctcaccgttgtcaccgatggaggagatggcgtggggagctcacacggtcaagaatctgcgtacggtgaggacaagcatggagaagatgatgtcctgggactctgggagtga

SEQ ID NO: 130354 - DNA, 1354 bp, Zea Mays
cccgcctccgcctcggggccaccgccggagcgcatgggcagcggagccagcgcggtcgtggacgcggccgagccgggcgccgaggcggactccggctccgccccggcctccgtcgccgccgtcgcggcgggcgtgggcgggaagctgccgtcgtccaggtacaagggcgtggtgccgcagcccaacgggcggtggggcgcgcagatctacgagccgccacctgcgcgtgtggctcggcaccttcgcgggcgaggccgacgcggcgcgcgcctacgacgtcgcggcgcagcggttccgcggccgcgacgcggccaccaacttccgcccgctcgcggacgccggcccggacgccgccgccgagctccggttcctggcgtcgcgctccaaggccgaggtcgtcgacatgctgcgcaagcacacgtacttcgacgagctcgcgcagaacaagcgcgccttcgcggcggccgccgccgccgcctcgtcggcggcggccaccacctcgacgtcgctgggcaacgacaaccgttcctcctcccccgcgtgcgcgcgggagcacctcttcgacaaggcggtcacccccagcgacgtgggcaagctgaaccggctggtgatcccgaagcagcacgccgagaggcacttcccgctgcatctcgcggccgccgccggcggcggcgagagcacgggcgtgctcctcaacctggaggacgccgcggggaaagtgtggcggttccggtactcgtactggaacagcagccagagctacgtgctcaccaagggctggagccgcttcgtcaaggagaagggcctccaggccggcgacgtcgtcggcttctaccgctccgcggccggcgccgacagcaagctcttcatcgactgcaagctgcgacccaacagcgtggacaccgcgtcgacgacgagccccgtggggtcatcgcctccgccggcgccggtggcgaaggccgtgcgtctcttcggcgtcgatctgctgacggcgccggcggacgccatggcccggtgcaagagagccagggacttggcctcgcccccgcaggcggcgatcaagaagcagctcgtggagctggcactagctagtgtagatcaatgctacggagcgggtcgatctttctcttagttagctaagctagtcggtttttattttattttattttattttgctcgatcgctcactgaaatggtagcatcagggctgagctaaatttttagtccctcctcggaatctcatgtagttggttcgtcatcctctggctttgctccgatgtaaatcttctcatcaactgtatactaccaatggaaacaaaaagcagccatggaaggctgcacgatgattaactga

SEQ ID NO: 130355 - DNA, 432 bp, Zea Mays
atgaacaacagatttacaaagataagagagcaaggttcaaagggaaagaaaagcaacccactagtgcttgaagagcttttgtgggaaaatgagtgggttcaggagtctgaagaaggtgaggagctttggagtgcagtagatgaagttttaggtgcaactcaagctacccagggcagaaacttgcctagggcagcagctacacgtggtgggaggacctactccgagacctatgttaggagtaggaagcgccaaaaagttacagtagctcaggacttgcagcaaggagatggcagtggcagtgacagtcacaacgaaaatgatcatcaagagccaactcaaaatgaccaagatgctgcagaaaaagcaattgatgatgaagaagaatctggagctgctggtgatcaattcaagctggatgatgatctcatatag

SEQ ID NO: 130356 - DNA, 390 bp, Zea Mays
gaaacctaaaacttctctgaatttacaccttaacaaaaattggattgacaatgttatctacctttgtgttactatgcacccaatccacagcttctcggtgatgttacaaaatgacaacagtatccatccgcccaagatgcaccaagaattacagaacaacacgctgatgataaagcagaactggaaagctacatgccacgatcttagtttgatggaagtgctagcccacgcttccaagattaacaaagaaaatgcaggcaaacattaacagttcagctccaaaattttagcacaacaattgaattaacagatatccaccctaaggaccaatcagaacacaaatgcaactagtcgaccaggaagggtccatcactatattatcatttgcga

SEQ ID NO: 130357 - DNA, 845 bp, Zea Mays
acacaggcctgtgggattccaccaaggctgtgagggatgccatgacagagcaagggttacatgttgagagacaatgcagctggttatacaatggtacaactgtgcaccctttcgaggctggaaacttgtcacatcccgcaattgatacaattttgagtacatgggaagacttagctaccaggatggagcaatctgggtactcccctcaagatattggcccctattacaatgtagaagttgacccactgtcatgccaccacacagagaagatcgcagtgtgttacgggcttatctccacatctggtcaacagccaatacgcatctcaaagaattttaggatgtgcatggagtgccattcatccatcaagttcatttcaagggataagggccgggagataatcgtttcagacggtcgcacctatcaccattttaaggatggaacacaaatatcggcctggcaacatttgcgcacacacttgcactgtcagttatggctagtatcaacaatctatgccaccatcttgaagcattcaacacttctaagtatatccagtttgctctcgcgggccaggcgggacccaaggcaacaaatttggccagcttcatgtgtgaatctaaagctttttactgtaaagggacaagctacaatgaataccttagtgattgggtgcaaggttgggtatgctcctgtggcgtcctcagttgatgccaattcaggaagtcttaaaagtttcacaggcttccataaaaagaaaagccatgggcattcatcttaccaactacgagtggtccatgctgtagatactcatgacagtcgcactgttcagctgttcatctacaggtag

SEQ ID NO: 130358 - DNA, 189 bp, Zea Mays
ctagcgggggaccccgttgtcgggaacgcgatcgtcgccatgtatgcggcgctgggggacgtggcctccgcccgcgccgcgttcgcgtcgctgcccgaccgcgacgtcgtggcgtggaccgcgctcatcagcgcgcacgccgacgctggggagctggaagaggccttcgacctgtttgaagagatgcaa

SEQ ID NO: 130359 - DNA, 7250 bp, Zea Mays
cctgatccagaaatcaacataagatatgaaatcagacacatgaaatgaaataactcagtggacattgctgatttcattacatggcaagattatagggaagatgttatgaaatccttagtcctcaaatacttaccagagacaatgaaagacactcggtagagaatggcctcttcacgctcagcccctagccctagaccatcatctcccaaccccagccccgtcacttccctccttggcgtcaacgtccaccacctcaacccctcgccggacctcactccaaacccggcgaacacctccacgaacccccctcttcctgcatcagggcccacagcaaacatcgttttggcttcctagtcttggcgggctaagttccagagatggagtgacgacagtcctaccccctcgttttctggaggctcatgtgtcgtgccttactcttataaaggtgtgctctccaatgatgggagagtagcctcttctccgttgtgtgttgctgcttcttctcagttgaggggtgcccaccagttgcaagcggtgaagaagatagtctgtgtgcgcccggtgctgcaaagttaggcgccagcgcttcctacccgttctgaagacaggtggcgggaagtggtgcgtaggagatctagacacgcggcacttggtcctcgtcaatggtcccctgaagatctccaaggaaggtgctacaattgtctttctccctcccactttgttgttgcatgtagacgacctacccgctgctttaggtgcaaggggtttggccattgtgcttctatgtgttcacttcaggcgagtacaaaggcgacgggactgcaccatgagcgtcgaagtattcgcgttccggtgtggtagcggctatcgaagatgcaaggctccggcccgcgtggtggtacattgcaagagttcaagcgtagagaatcggtgtggaagcgagtcactctgttgcagtcgaccacgggggctgatcacctttcacccataccgttggcgccgaacttcgaagaggttgctccacccgttcgtggcaacaggagaaagaggcatcgtgcgaaaagaaggcgggcagtgttcgaagatgcacaggcaatgaggcagcagtccccagctacagtttctactgaagaattagatgctccgacggcactggagaagatcagtacagagaaggatcagcctgtcaagcccatgaagtccccttcttctggttccaggcctgaggttcttggggctgaagtcatcaaagaggtagctcgaagttttgacgtcgaggagcgtgcaatgtccattcatctggccaggctagaggacttcattctattcctaccggacgaagacacggcttcaagggttttcaatggcggaaggattttcagaggtccgcagttcgatctcgcttttaaaaggtcgacgtgttgtgcaaatgcttttgcggcaacgctcctagccttggttgatgttgagatcagaggcatcccgactcatgcatggtcaagagatattgtagatcagcagttacgctattcatgtgttattactgagctgcacccagcgacaatattgaagactgatctctcgtcctttatgttgagaacatggtgtgtagatccggtgaaccttcaacgtgacatgaacctagtcattacagagccgaggctagtgggtagggagaggtgttgcctatcctacatgtttagcctagcggtcactcctgtcgatgcctcgataacatcccttgtttcctcccctccgttgaacgatggcaatacccctgatggcaacgacgatccacctcccccagactcactacagcaatgtccaagaagcaatgaaggcagacggtgcccgatccattctcgattgggcccacagcattcatctcaacgagcagagaaaggcgagacgtgggaggctggggaatccccctagggcgctatggacaaagcaacaaaagatcagccattggatccgcacccaatgagtgtcggcccggtgctcaatggcggttatgaagacctgttggcaaaaatgcccagtcccgagaaatcggctctagggtcggctccaaatccgcgcgtgcacaagtgtatcacgcggggtggtcccgaggtggtagcgcaaggagatatcgatcaaaatgggagagcggtgcagggtcccaaggaattgagcgtgctgggatttcattctacgattgggctcgaggaggccagcacgggtgatgggccgctgggacaggtcgcattagcctcgcctcagcacactgctaggctgatagaataagtcatgtggtctctgttttgtggtgaaaaggacagcagcacagcagtacaggactgcagcacaacagcaccttttgactgctgcagcacagcagcagtgcagttgagtgcagttggagacagtcaccttttgactgctgcagcacagcagcagtgcggttgagtgcagttggagacagtcagtcaccttttgactgctgcagcacaacagcaccttttgactgctgcagcagcaggacagtagcagtagatggcagttgcagtttttgactgcacactttagcactttagtatctaaaggacagcatctgtgtgctgcagtgtgtagtgtgtagtgcagtgtactgcagcccctagggctataaatatgtgtccccaacccctctaagggtatggcattgtgtagtgtttgaggaaataaacagaaaattgccccaactcatagtgtcatcctcttgatgagagttagagtccctctacttacataggctgctggagtctgatgggtcagtctcgccccaatgccaatttgggcaacccgagtctacaggaaccatttccctccctattgagtcttttggccttttgggtcgctgggacagggtgggctgatctcgcctcagcattctggggttgggtcgctgggaccagccaacttagtctcacccccttgttgtaccaatgtaaaccccagcagtaacagagccccgaacagcagaatgcttcctaaccatgacagcacagcgttgaaagtatacagcaggagaagacgacaggacttaaggtgccaagatgaggcgccaggggatgaaccacctagcaagcagcagcttttcttcaggcttgtgtccaggaccatcggcagcttactgcctcctcccaagattatgaagaaaaaaaaacttcctgctccacctccgcaggagctccacagaagtaggcgggtggccaaattgggcgctgagcacattcagcagatccccaagactaagaaaatggtgatgagagttcttcagtttgatctggacagagatcatatcaatcaacaggaactagaagattatgctaagctcttcagtcgacctctctcctgtccccaggttcaagctcttgcctcacttttcagatggtcagttccagataacgtgggtgtggtggccactctagtttactgatagggtggtttgtgggtgtttctcattctgtttatctaatggatccctctttaattctgttctggaatgttcgtggcttaaactccacctcgagacaggattttgtaaagagtctgatggagtcggttcatgctgatattatcagtttgcaagagactaagatgccaagttgcagcaaccgttttattctttccttgttgggttctgacttcgacaacaattttgtggttctctcatccgttggtcctagtggtggggtgttgccggcctggaggtcaagttgggaaccattgttgcctcacgtgtggataatttcagtgtttctgtcaagttttgcccggctagtggtgatgggtggtggcttacatgtgtctatggacctcaaagtaatgataggaagctcttgttccttcaagaattgaacctaattagatctgcgtgttctggaccatggcttgttggtggggacttcaacctaatctaaacagatgaggacaaaaataattctaatctcaactgagccatgatgggaagattcaggaaatgcatacatgacctgggaataaaagatattgaccttcagggaaggaagttcacctgggcaaaggctcatgacgtcttggtgcggctggacaggatgttctgttccttagattgggagcagaagttcccagatttcttgcttcagtgctctgcatcggaagactcagatcattgccctcttctccttggattgaaggacaatcattggggtaagaggcgatttcattttgagcccttttggccgaaatttgaaggctttcatgatgcggtttccagtgcatggaactctgtccagaacatctcttgccctctcaaaaccctctccctcaagttgaaggctacagctaaggggctgcagtgttgggagtgacaagaaagtgggcaatttcaagatgcagcttgagttggatagagaggtgatgttgcagctggaaacggctagggagagcagatatctcaatgatcttgaatgctagctgctgcagaggttgaaaaacattctttggcgcttgcctccctgctcaggacagtggctagaaccagatctcggcttctttggctcaagaatggtgatgctaacaccaagttttttcattcatgctgaaggtttcgtaagaggaagaatttcattgctgcaataaaggatggggatcagctgatcacctctcatgatgggaaggccgaagtcttcctggattttaattcgaatctaattggaagtggggagcaaagaaaccaagctatcaacctggaagccatagacatacagcagcatgatctttaggctcttgagctcttgattacagaagttgaagtattgagcactatcaagcaacttccatcagacaaggcccctgggcccgatggcttcactgggcgtttctataagtgctgctagcctattataaaaaaatgacattatggctgctgtttcaacaatttgggagagatttcagaaacttcaggtttcttaacatagccttcattgtcctgctgccaaagcataatgatgctcttgttgccaaggacttcaggccaattagtttgatccacagcttcgccccaaattggttactaaggttcttgccaataggttgaggggctgatttccaaagctcaaagtgctttcatcaaaggtcgattcatacaagacaattttatgctcgtccagcagacggcaagattttttcatgctcaaaaacaacctagaattcttctcaagttagacatctccaaggccttcgactcggtctcttggccttttcttcttgaggtggagcggttgggttttggtcctgtgtggagggatgtgattagtggtcttcttatgaccacttccactcagatcatgctcaatggtgtgcctgggatcttcatttctcataagaggggtttgcgtcagggcgaccccttgtcaccgctgcttttcatttttgttatggatgtcctcaatgcgcttatggtcaaagctgaggataatgggttgctgcagcccctgtctactattttcatcaaacaccagatctcactttatgctgacgatgtggcgctctttcttagaccagtgtacagcgacctgaatactactgtgcagattttggatctttttgggcaggcttcgggattgaagactaacatgactaagagtagtgttgatcctatccagtgctcccctgctgatctagatgtggtccagcaacttctaccctgaagattggaagcttttcctatcaaatacttgggtttacctctctccctgaagaagttaaccaaagcccagcttcaacctctcatcgataaactggcagacctcttaccggcttggaaggctgatttgatgacccgtgctggcagagctacgcaagtgcaattgtgctcactgctactgttatttatcatacgatggcgttggatttgcctaggtgggctattaaggccattgataaaatccgtcgcggattcctctggagagtgcgcaaagaagctaatggtgggcactgtatggtggcctggggcaaggtaacgcgtcccaaagaattgggggggccttggtatctctgatattcaatgtttgaatagagcattacgtgttagatggatctgactgcaaaagacagacacatccaaaccgtgggctgatttgcctatccagtcaaaccagtttttggagtgtttattctcagtagcaatggcttctgagatgggggatgggcggtccactctcttttggcatgatagatggatattgggacagaggattcaagacttggcacctcatgtatttagtatggttcctaacagaattgtgaaatggtgacatgggagatcattgctgatttcctcactcttacagatgctatcactaatttcgctcttcagcctggggttccagataagcacctttggagattctctagcaatggtctctactctgccaaatctgcctatgaactgatgttcagtggttctacctccttggctgccttcaagagaatctggaggacttgggcgccgcctaagtgccgttttttcctctagttggttacacataataggtgttggacggctgaccgacttgctatgtgggcttgggcgcttggctgccctttccccgggactggatgaaatgtgttttgaagattggtggagcagatcggccgagcttgttcctaaagacctcaaagatggttttaattccttggtgtatctggaggcaccgcaatgattgtgtctttaatggtgctcagcctagtgttgcgagagtgcttgcttcggctggtgatgagttcaatatgtggtgttttgcaggggccgaaggcttgaccttgctttcggaccttgcggttagtaagggtgtgcctcttctaggtgtgtgtgtgtggggggggggggggggggggttgttaggtcatctttcttgttctaggtgtttttggccttttgccttctcctaatgaaatgatatgcggctctcctgcgtgttcgagaaaaaaaatacttaccagagacaccagagtttcaaactttggacgaaatatttgtaatcttctgtttttctcaatttcaaccgtcacatctaatccatatgatacatcagagtccctaaaatacatgaagcattgataacataatttctcaggaaaagcatatgatgtttaattaggttagtcaattaccttcgaatgaggttacgcttaaggcaatgccagaaattaaacgtcatggaggaaatggcaaattcgag

SEQ ID NO: 130360 - DNA, 1062 bp, Zea Mays
atgcaaggctccggcccgcgtggtggtacattgcaagagttcaagcgtagagaatcggtgtggaagcgagtcactctgttgcagtcgaccacgggggctgatcacctttcacccataccgttggcgccgaacttcgaagaggttgctccacccgttcgtggcaacaggagaaagaggcatcgtgcgaaaagaaggcgggcagtgttcgaagatgcacaggcaatgaggcagcagtccccagctacagtttctactgaagaattagatgctccgacggcactggagaagatcagtacagagaaggatcagcctgtcaagcccatgaagtccccttcttctggttccaggcctgaggttcttggggctgaagtcatcaaagaggtagctcgaagttttgacgtcgaggagcgtgcaatgtccattcatctggccaggctagaggacttcattctattcctaccggacgaagacacggcttcaagggttttcaatggcggaaggattttcagaggtccgcagttcgatctcgcttttaaaaggtcgacgtgttgtgcaaatgcttttgcggcaacgctcctagccttggttgatgttgagatcagaggcatcccgactcatgcatggtcaagagatattgtagatcagcagttacgctattcatgtgttattactgagctgcacccagcgacaatattgaagactgatctctcgtcctttatgttgagaacatggtgtgtagatccggtgaaccttcaacgtgacatgaacctagtcattacagagccgaggctagtgggtagggagaggtgttgcctatcctacatgtttagcctagcggtcactcctgtcgatgcctcgataacatcccttgtttcctcccctccgttgaacgatggcaatacccctgatggcaacgacgatccacctcccccagactcactacagcaatgtccaagaagcaatgaaggcagacggtgcccgatccattctcgattgggcccacagcattcatctcaacgagcagagaaaggcgagacgtgggaggctggggaatccccctag

SEQ ID NO: 130361 - DNA, 1367 bp, Zea Mays
gtgccacagtccctcccctcttccagtctcgccgccaattagtactcaccccctcccttgcatccgctcccctcccccctcctctcttccccccccgacctcggcgccgaggcatgctgttgccgtgagtgagcaagggatctttccggcgatcttggaggcggcgagcctggtgccgcatgctggctgtccggccggccggaggctagctagctctcgcctctcgaccgagaagtgaagtgaagtgaagcgagcttgcttgtcagatggacctggtgccgcacccggacagcccgcactccgacaacagcggcggcggcggcggctcggcgtccggggcgctgtcgccgggggcgtcatccgcgggcgcggcgtcggcgctggcgtcgccgagccggtacgagtcgcagaagcggcgggactggaacacgttcgggcagtacctgcggaaccaccggccgccgctgtccctggcgcgctgcagcggcgcgcacgtgctggagttcctgcgctacctcgaccagttcggcaagaccaaggtgcacaccccggcctgccccttcttcggccacccggcgccgccggcgccctgcccgtgcccgctccgccaggcgtggggcagcctggacgcgctcgtgggcaggctgcgcgccgcctacgaggagaacggcgggcggcccgagaacaaccccttcggcgcgcgcgccgtcaggctctaccttcgcgaggtccgcgaccatcagtcccgcgcccggggcgtcagctacgagaagaagaagcgcaagaaggccccggcgcaccccgtccctgccgccgtcatctcctcctcccacgacggcaacgggcaccactacgagcaccagatgccgccgccgccgccgcccggcgccgcggcttgactggccagccggccggccggccggagctcccggtcccggcgcggccccatgtatgctactaccacatgcactactattagccgatcatcttcttggtcggtgcctctctatagctagctgaagctcctgtgatcgactactatatatctattgcctctatctagttcttggctcctttctactatcgatctgtggctatagtttagctgccactactgctagtacaactgctgctgctgctacaaattactcccgttgctctttcaaatatgcttttgctgctggtattgctactggaactactactgtctcttgattaggtcagttctcgatctgatcgtttcccagcttaattggtgacactctactatttgctgctactggtgatgcctccagctgcagctgtgaactcttgatgtgcttcctagcagcttttgctcctttgatcaaattggcttgagattttaa

SEQ ID NO: 130362 - DNA, 1355 bp, Zea Mays
gtgccacagtccctcccctcttccagtctcgccgccaattagtactcaccccctcccttgcatccgctcccctcccccctcctctcttccccccccgacctcggcgccgaggcatgctgttgccgtgagtgagcaagggatctttccggcgatcttggaggcggcgagcctggtgccgcatgctggctgtccggccggccggaggctagctagctctcgcctctcgaccgagaagtgaagtgaagtgaagcgagatggacctggtgccgcacccggacagcccgcactccgacaacagcggcggcggcggcggctcggcgtccggggcgctgtcgccgggggcgtcatccgcgggcgcggcgtcggcgctggcgtcgccgagccggtacgagtcgcagaagcggcgggactggaacacgttcgggcagtacctgcggaaccaccggccgccgctgtccctggcgcgctgcagcggcgcgcacgtgctggagttcctgcgctacctcgaccagttcggcaagaccaaggtgcacaccccggcctgccccttcttcggccacccggcgccgccggcgccctgcccgtgcccgctccgccaggcgtggggcagcctggacgcgctcgtgggcaggctgcgcgccgcctacgaggagaacggcgggcggcccgagaacaaccccttcggcgcgcgcgccgtcaggctctaccttcgcgaggtccgcgaccatcagtcccgcgcccggggcgtcagctacgagaagaagaagcgcaagaaggccccggcgcaccccgtccctgccgccgtcatctcctcctcccacgacggcaacgggcaccactacgagcaccagatgccgccgccgccgccgcccggcgccgcggcttgactggccagccggccggccggccggagctcccggtcccggcgcggccccatgtatgctactaccacatgcactactattagccgatcatcttcttggtcggtgcctctctatagctagctgaagctcctgtgatcgactactatatatctattgcctctatctagttcttggctcctttctactatcgatctgtggctatagtttagctgccactactgctagtacaactgctgctgctgctacaaattactcccgttgctctttcaaatatgcttttgctgctggtattgctactggaactactactgtctcttgattaggtcagttctcgatctgatcgtttcccagcttaattggtgacactctactatttgctgctactggtgatgcctccagctgcagctgtgaactcttgatgtgcttcctagcagcttttgctcctttgatcaaattggcttgagattttaa

SEQ ID NO: 130363 - DNA, 1496 bp, Zea Mays
gtgccacagtccctcccctcttccagtctcgccgccaattagtactcaccccctcccttgcatccgctcccctcccccctcctctcttccccccccgacctcggcgccgaggcatgctgttgccgtgagtgagcaagggatctttccggcgatcttggaggcggcgagcctggtgccgcatgctggctgtccggccggccggaggctagctagctctcgcctctcgaccgagaagtgaagtgaagtgaagcgaggcaagtgctgtccagtagtagtggtggtcgcgaacactatttatagcgccccggcccccgcccccgcgtgcggcgctctcttctctctcacaggaccacggctcgcgcgcgcgggcaccgactccaaaatagatagatctcatctcatctccttcttgctgataggttgtttggttgcttacttagcttgcttgtcagatggacctggtgccgcacccggacagcccgcactccgacaacagcggcggcggcggcggctcggcgtccggggcgctgtcgccgggggcgtcatccgcgggcgcggcgtcggcgctggcgtcgccgagccggtacgagtcgcagaagcggcgggactggaacacgttcgggcagtacctgcggaaccaccggccgccgctgtccctggcgcgctgcagcggcgcgcacgtgctggagttcctgcgctacctcgaccagttcggcaagaccaaggtgcacaccccggcctgccccttcttcggccacccggcgccgccggcgccctgcccgtgcccgctccgccaggcgtggggcagcctggacgcgctcgtgggcaggctgcgcgccgcctacgaggagaacggcgggcggcccgagaacaaccccttcggcgcgcgcgccgtcaggctctaccttcgcgaggtccgcgaccatcagtcccgcgcccggggcgtcagctacgagaagaagaagcgcaagaaggccccggcgcaccccgtccctgccgccgtcatctcctcctcccacgacggcaacgggcaccactacgagcaccagatgccgccgccgccgccgcccggcgccgcggcttgactggccagccggccggccggccggagctcccggtcccggcgcggccccatgtatgctactaccacatgcactactattagccgatcatcttcttggtcggtgcctctctatagctagctgaagctcctgtgatcgactactatatatctattgcctctatctagttcttggctcctttctactatcgatctgtggctatagtttagctgccactactgctagtacaactgctgctgctgctacaaattactcccgttgctctttcaaatatgcttttgctgctggtattgctactggaactactactgtctcttgattaggtcagttctcgatctgatcgtttcccagcttaattggtgacactctactatttgctgctactggtgatgcctccagctgcagctgtgaact

SEQ ID NO: 130364 - DNA, 671 bp, Zea Mays
ggaccctttaactggtcacatgcctcgtcatgggtaagccttgcctcgggcagactaaggccggaataagataacacgaaatgggcgtggagcggtggcgagagtagcgtgtaccctccgtggcaagaggctagacggtggtgtatctgtgctctcggtttgcgtgaacctgatccggtcttaagaaccccggtggcgggttgacatatgcaagggttaagtgctacatatgttgtgtgattggagatcctcagctgagtataatcgattcggatcgccgtaccttcgcggttatgaagacttggtcactgccctacacgtagcattccactaaagacgatgggcttttgttaagaaattggctagtacaggaccagtgattgaattagggtagaaagaactctaatgcaggtaattttacctaacttgacaaataaaattggatttttaaggatccactttagtaagcatttctgcaaaacagagtctttgattattgaaaagccttaccttgactcccatataaccagcatacccttgagagttttttctttagtcgggtaagtcttgctgagtaattccatactcagggtttatcccttcgttgtttttaggtgaggaagtagcagacttttgctgcttctgtgccaaggtggttccaaaagaagaaa

SEQ ID NO: 130365 - DNA, 1416 bp, Zea Mays
gaagaagaaaaatgagcgtgtgactctgcgtgcgtctctgcgtagtgcgtatgggcgtgaccatctcgttcagaacttgagaagcgaaggcaagtgacgacggaagcggttggtttctgcactggacaaccgaacaaacccaagacgaaaagccattcctgttttgcttctcccgccgtctcctcgactggcctctgcactccacgcaagagcaagagatacttccacgcgaggacgcaaccgatgcgattcgttccccttccgtgcactccgccctggtatctgcactgcatatcctctccagtaaaagaacccttttgccaaccgattctggcctgacggaccaaactctcctcgcctttgttttgcccacttcgttcgtctctggctcggcggttgctcgcttcgcttggctcgtttggtgggaactctctgcgcgcttggtcggcggccatggccaagcggcggagtacattcggtttggctaggttcggctgctgcgggagccaacaagctcgtgaggagaagatgacagaggatgggtacccggtgaagctgcacgtctacgatcttagccaaggcatggcgcggcagctcccggcaacgatcgtcgggagggaggccatcgaggctatttggcacaccggcgtggtcgtatacgggcgggagtactacttcggcggtggcatccaggaaggccagcccggccggacgccctacggcacgcccgtccgtgtggaggacctgggcgtgacccacgtccccagggaggtgttcgaggagttcctccgggagatcggcccgcgctactacaccctggccacctacaagctcctcaaccacaactgcaacagcttcagcaacgaggccgcgcagttcctcgctggcagcgccatccccagctacatcctcgagctgccgaaccaggtgatgaacagccccgtcggcgcgctgatactgccgatgatccaggggctggaggcgagcttgggagctggggctgtgccgcagccgccgcaattcaggccggttcttgcccctcttggcgccgccaccgtggctctgccgctgacggatgacgtggagccaggatcggctgctgctgatgaaccggaggctgccaagatagcgggcgccagtgacggcacgcccgttccactgtcagtgcagcccgcagcagcaccggcagccgccgccgctcaggcgagcgcggtgcctacggtttcatctatgttggtgcctccagacccccatgcggaggccaagagccgggtgcaggaggagataaagcgcgagtttgcggacatcatggcggccggcactgcgcgtgccggcgaggcggccgcgctggcaacgcgcagggttatggagcggcacggcgcagggtcaaaggagcaaagtctgacgattgattag

SEQ ID NO: 130366 - DNA, 1275 bp, Zea Mays
acccgtcccgacctcttctctcctaattattcccgggcttcctcctgtgtacaccgctcccgccccgcctaccatttaacccccgcttcccctggcctctgccgccccgccgcacagaatcgcttggtgcacccggcgactcggcgagggcctccctgaaaccctagcttgcccagccccgccgggccatgggcaaatacatgcgcaaggtaaaggtttccagcgaggttgccatcatggatgtcgccgctgctccgctcggggtccgcacccgcgcgcgcgccctcgcgctgcagcgccttgagaagcagcaggtgcagcaggaggagggctgcggcggtgagtacctggagctaaggagccggaggctcgagaagctgccgccgcaggtggcgtccgtgaggaggtgcggcgggaggaaggtggcggccacggcccccgccgctatggaggaggcggaagcatcgtacggggagaacatgctcgagtcggaggccatggggaggaataccagggagacgacgccctgcagcttgattaactctgagatgatcagcactcccggatccacaacaagatccagccactcttcccaccgcagggtgaaagctcctcctgtgcacgccatcccaagttcaacggagatgaacgagtacttcgctgctgaacagcgacgccaacaacaggctttcattgacaagtacaactttgatcctgtaaatgactgccctctcccaggcaggtttgaatgggtgaagctagactgatagattcagaggacatgagagcagcagcatggaactcacctccgctccctccaccgccgcagcgtcgtggcagaggcgcataccgtcgtgttagctttgtttctgttgtaaaaacttagcgttagcttgtagccttaattgtcgcgtgtcacagtacagaactgatgctgagttacagcaccctgatatgatctggtccctcaactccaatgtaacccttaacagctcattctgtaaggaacctatcatcctgttaccagttgccgaattaatgaagtagagctagataatgatgttctgtcacagttattaatacttatactctgtgatgttgcacctgaagctgatgtaatttttgtgtgtgattcatgcactcctcttggtacctgcaaagctggctgccatggtttgacctttggagccttgtgctgtgcccttcctgcagtggcatcttctctctcagggctcaggatgctgctgcatgtgtcattattgctggatgctggcc

SEQ ID NO: 130367 - DNA, 201 bp, Zea Mays
atggtggataaggaccgtggcaccccaacgggtccaggtgcccagccacctcctctgttggggatccaaggcgacagctctggcaacaacgcttctccaccacgccaagatccactaccacttctacaaggaggagggactgatgccaccaattacacaggagtaaaccttgcccttaatcaaggttccaaagatgattag

SEQ ID NO: 130368 - DNA, 236 bp, Zea Mays
caaaataaggttacttcaatctacttttttctcactctcttcctcaatcatcgtttttccattgcctgatgtggatgctactcgtactgaacgccaggtaccttcttttccctactttgccaagatttcttttgattttttaaaatttagacccgaatgataagtaaacacttgaagtcagcaatcctaatatatatctttgttatttcctttcaaaatcttctgttagcacttcc

SEQ ID NO: 130369 - DNA, 717 bp, Zea Mays
attcagcatatagttgccttttcagggaatgcatcacaaggtggtaccacattacccatgatctacgtgctcggagactccctggcgcctgtcgagaacaacaataacctggtgacactgctcaaggccaacttcctacgaaacaacatcgactacctagggcacaaggccaccggctgcttcagcaatggcaagaactccatcgacttcctcgaaggtaggggaaaagcagggaagtaggtcgtaccacggtgcctcgtgctatcgctaacgagggagctcgctcaacaaccatagggagaccacatcgagctgcaccagaagcgccatggtaagcacttggaccacgaagtgcgcaagcacgaggcgcgcgaggtgcataggcctcaaaggacacccgcaatttgattggtactaagggcaagaggtttgtcaagaaacgctatgctaagaaggcgcagatgaagaagacataagtgcttgtttgctgctcctgtttatgtgttgatatttgtgagccaataacttttaaccatgactgctttactggtgtatcataccctgagtaacggttgtgagcatgaaaaattgcttacgccccatagaggttatgactcagcttgtcagccatccccaactaagttgtgttcttctgaaccatgctactttgttctttactgcaacctgcattcgttgatgtgaacaaactgattatgt

SEQ ID NO: 130370 - DNA, 94 bp, Zea Mays
atttatccatatacatatctattgtcatccttgttcgtgtcaatctttgaccgtacggcagttatccatagccataatatatgaaagtcagaat

SEQ ID NO: 130371 - DNA, 101 bp, Zea Mays
gtttatcaaaaagatttaaaattacatatatacttacacataatatcaaacttcagcagatgtttcatgcaacatgacaactaacttcttgaatgaagaag

SEQ ID NO: 130372 - DNA, 1968 bp, Zea Mays
atgcgtataagcccttcaggcaactggtccgcgcggacccatgagcagctgcagcgagcggatgatgcagcccgctgcgtggacatcgtcaccgaaaccgccaccacacataccacagttcaacagtgccacatcatgggcaccgaccttgttctcggtaccttctcctatacgcccatcctctattcactttttagagaacagatctaccatcgtcctgagtcccgctctctttcttttgagatagcttttgacagaatttgcagaaggctactcgtcgctgattccttttgggaggcgacgagcgcgcagctgggcgtcttcttcctgggcctctacatcctggccgtgggcacgggcggcaccaagcccaacatctccaccatcggcgcggaccagttcgacgacacccacccgcgggagcgcggccacaagctctccttcttcaactggtggatgttcagcatcttcttcggcacgctcttcgccaacaccgtgctcgtctacatccaggacaacgtcggctgggccgtgggctacgcgctgcccacgctcggcctcgccgtctccatcgccatcttcaccgccggcacgcccttctaccgccacaagccgcccacctccgagagccccttcgccaagatggccagggtcatcgtggcgtgcgccaggaagctgcccgtcgcggtgcccgtggacccgcgcgacctgcacgagctcgacgacgggtactacgccaagaagaacgcggccccgctcccgcacacgccccacctgaacgtcctgagcaaggcggcggtgaagacgaccggcgggggcggcgcgcctgcgtcgcggtggtcgctcagcacggtgacgcaggtggaggagacgaagcggatgctcaagatgctccccgtgctggccatcacgttcgtgcccagcgcgatggtggcgcaggtcaacacgctgttcgtcaagcagggcacgacgctggaccgccacatcggccgccacttcgagatcccgccggcgagcctccaggggttcgtcaccatctccatgctgttctccgtcgtgctctacgaccgtgtcttcatgcccctggcgcgccgggtgacgggggacccgcgcggcatctcgttgctccagcgcatgagcgtcggcctcgtcatccacatcgtcattatggccaccgcgtcggtgacggagcggcaccggctggcagtggcgcacgagcacgggctctacgacagcaagggcaccacgatcccgctcaccatattcgtgctgctcccgcagttcgtgctcatgggcgtggccgacgcgttcctggaggtggccaagatcgagttcttctacgaccaggcgcccgagggcatgaagagcctcggcacgtcgtactccatgaccagcctcggcatcggcaacttcctcagcagcgcgctgctctcggctgtgtcgcacatcacggagcgccacggccggaccggctggatcctcaataacctcaacgcctcgcggctggacaagtactacgccttcttcgccattctcaactgcgccaacctcatcgccttcttcttcgtgtgccggttctacgtgtacaacgccgaggtatcccgcgtcgtcgacaccgggagcagcaagcagaagcgggaagtggcgatgcagccggcggccgtgggcgcagtggaggccaccctatagtagctactagtgttccattacaaatgtagctgtcatactcatacgtacgtgaaaagctctgcgtgtacattgcgtaatctctgcatgctccaccatcactagaagctttgatccaccacaacccgtcatacgcccaatacagcaagcatccgcgcacaacagcggaacccagagcctgaaatctttgaggcacaggaagatgatgacgacaaaccacgtcgtcgtagcgcacgcctctccaagaaggcagtgagccggtcgtgagggcgggcaaccgga

SEQ ID NO: 130373 - DNA, 2363 bp, Zea Mays
gaagcttgccgacggttagagtgcactgctctacagatttttgcgcaacatggatggaagtttacaaatcaaattgcttcgtagttttgtctatggattgtgtgtctttttctagttatgaaaccgtggtcttttatggtgtatttcaggaggtttgtccctccatatgtggctagtcgtgtgattactccatataaaaacttcctgtgtgttggctaatcctttgagtgaggtgaagctggactggtatccattataaataaaactaatttgtgcatatgaaatgaattggttttaggtctcttttttccctaggtacttctcacaaaacccccttcctaaatccatttccttctcgctttacgtttccttcctggtcttgtgctatgggatcacccatgctctcgtgcagatttgtgctggcgtgtacttcattcttgtctagcagtcggaccgttgctctcagtcgccaccgtgttcctgccggccatttcaccgctagtagtcctaatgcacgatgtgtgctccagattccacgatgaccgcgagtccgtggtcgtcgtcgtcaaccacgtcgcacttgttacttaatcacacaagtgggagtggccgccgatcgaactgaaaactaacaacaaaagatccccgcaccgctaggctcaaacccagagctagctagcctagccatggcagagcacgcaagaggctcccaaatccttctcatttacctctgcctcctcctactatcctcctcggcgcacctggtgacgagcatggaccttgacagctacgacgactacgacaacttctccgatgagttggtggcaccggcagactacgacgacgagagcttctccgacgaggcggtagcggcaccagcacggcgccgcctgtacgacatcagcctcaacgcctcctcctccaacaggtccggcgcagccttctgcaggctgctgttcctgcagatactggacctgtccaacaacaagctcacgggagagctgccggattgcctgtgggagatgcaggcgctgcagttcatggacctgtcgaacaactccttctcgggcaagatccccgaagctccaccgtcccacaactgttcgctagcatcactccacctcgccggcaacagcttcaccggagagttcccgaccgtcgtcgggggttgccaggagctggccaccgtagacatcggcaacaacaggttctacggcgacatccctcgctggatcgggaccttcgttccggcgctgaagatccttaggctcagctcgaacaacttcagcggccagatccctccggagctgtcgcagctctcgcagctccagctgctggacctggcccacaacggactgacggggctgatcccgagagagctgggagacctggcttccatgaagcaccccaagatcaactccagcacaggatcgctggacgggtccatctaccaggatcggatcgacatcatctggaaggggcaggatttcacgttccagaggatactggagctgatgacgggcatcgatctgtcgggcaactccctctcgcattgcatccctgacgagctcaccaatctccaaggcctccggtttctgaacctgtcgagaaaccgtctgtcgtgtggaattcctagcagcatcggaagcttgaacgttctcgagtcacttgacctctcgatgaacgaactgtcaggagccattcctccagggctgagcaatatgctgtccctcaacaatctgaatctctcgagcaacaacttgtcgggcacgatacccactgggagccagctccagaccctcactgacccatcgatctacagcaacaatcccgggctctgtggacctcctctcaacccttgccaagacacgtcacgtgttcatgaaggagatgtcggaggataccgggacggggacccatggctgtactactgtgtgatcgctggagtcgtttctgggttctggctgtggtacgggatgctcttctccgttgcgaggttgaggtgctctgttttcttctttgctgatcgcgtacagtacagagttatgcagaagatgcggcctttcaatcattttgtttcgaaagagaagagcgatccatcgtctgtgcctatgttttctacaagtgatacaagctgaagaatggactactgatatcttctctttttttcccctctgccctagtgcagcaggagatttgctgtctttctttgtacgctttaagatgtactgtaatgctgagaggaggccagaaggattatagtcaactgttgtatagcaatttcagtaaaaaaaacattatatttttaaggagatctactgtctttctttgtgtgcctttctgatatgaatatgatatgttta

SEQ ID NO: 130374 - DNA, 3811 bp, Zea Mays
cgccagcccgcacggccgcccctgcccgcacgaacgggcacgcagcgctccgctctgacaccctgccaatgccgacgccgccatccgcccccgcccgcttcctcctcgcgtccctactcttcgccatccttgccctcgctgccgtctctgccaatgctgcggcgccaccatcgccggctgaggccctgctggcgtggaaatcgagcctgggcgacccggcgatgctatccacgtggacgaacgccacccaggtatccatctgcaccacctggcgtggggtcgcctgcgacgctgccggccgcgttgtgtcgctccgtctgcgcgggctcggcctcaccggcggcctggatgcgctcgacccggccgcgttcccgagcctcacttccctcgacctcaaggacaacaacctggccggcgccatccctccgtcgctctcgcaactgcgcactctggccacgctcgacctgggcagcaacgggctcaacggcaccatcccgccgcagctcggcgacctctcgggcctcgtcgaactccggctcttcaacaacaacctggccggcgcaatcccgaaccagctgagtaaactgccaaagatcgtccagatggacctggggtccaactacctgactagcgtcccgttctcaccgatgcccacggtggagttcctctcgctctctgtcaactacatcaacggcagcttcccggagttcgtgctcaggagcgggaacgtcacctacctcgacctatcgcagaacggcttctccggtccaatcccggacgcgcttccggagcggctgccgaacctgcggtggctcaacctgtcagccaacgcgttctccggccggatcccagcgtcgctcgcgaggctgacgaggctcagagacctgcaccttggcggcaacaaccttactggcggcgttcccgacttcctcgggtccatgtcgcagctgagggtccttgagctcggcagcaacccactcggcggggcgctcccgccggttcttggccagctcaagatgctgcaacaactcgacgtgaagaacgccagtctggtctccactctgccgccggagctcggcggtctgagcaacctcgacttcctcgatctctcaattaaccagctctatgggagcttgccggcgtcattcgctgggatgcagaggatgcgggagttcggcatatcgtccaacaacctcaccggcgagatcccaggacagctgttcatgagctggccggagctcatatcgttccaagtgcagaccaactcgctaaggggcaaaatcccaccggagctcggcaaggtgacgaagatccgattcttgtatctcttcagcaacaacctcaccggcgagatcccgtcggagctcggcaggttggtgaacctggttgaactggatttatctgtcaactcgctcatcggacccatacccagcacgttcggcaacctcaagcaactcacgcggctggcgctcttcttcaacgagctcaccggcaagatcccgtcggagatcggcaacatgacggcgctgcaaaccttggacctcaacaccaacaacctggaaggcgagctgcctcccaccatctcgttgcttaggaacctccagtacctgtcagtgttcgacaacaacatgactggtaccgtcccgccggacctcggcgcagggctggcactgaccgatgtgagcttcgcgaacaacagtttctccggcgagcttccgcagaggctctgcgacggcttcgcgctgactaacttcacggcgcaccacaacaacttcagcggcaagttaccgccgtgcttgaagaactgctccgggctgtaccgggtgcggctggagggcaaccatttcaccggcgacatctcggaggcgtttggggtccaccccatcatggactacctggacatctccgggaacaagctgaccggtcggctttcagatgactggggacagtgcaccaagctcacacgcctgaagatggatggcaacagcatatcaggcgccattccagaggcgtttgggaacatcacaagcttgcaggacctcagcttggctgcgaacaacctgacaggagctattccacctgagctgggtgacctcaacttcttgttcgatctcaacctgagccacaactccttctccgggccgattccgacaagtctggggcacagttccaaactgcagaaagttgatttgtcggagaacatgcttaatgggaccataccagtgagcgttggcaaccttgggtcactgacgtatcttgatttgagcaagaacaagttgtcagggcagataccaagtgaaatcggcaacctgtttcagctgcaggccctgcttgatctgagcagcaactcactgtccggccctatcccttcaaacctcgtgaagctgtccaaccttcagaaactgaatctgtcacgcaatgagctcaacggttcgattccagcaagcttctctcgcatgtcgagcctggagactgttgatttctcctacaatcagctcaccggtgaggtaccgtcaggcaatgttttccagaactcctcggcggaggcctacatcgggaacctagggctctgcggcgatgcgcaaggcattccttcttgcggccgcagctccagtcctccagggcaccacgagagaagactcattgccatagttctctccgtagttgggacggtgttgctggcagccattgttgtcgttgcttgcctcatcctagcatgccgaaggaggcccagggagcgcaaggtgttggaggcaagcacgagcgacccttacgagtccgtgatctgggagaagggagggaacatcacattcctggacatcgtgaacgccaccgacggcttcagtgaggtgttctgcatcggcaaaggtgggttcgggagcgtgtacaaggccgagctccccggcgggcaggtcgtggccgtgaagcgcttccatgtggccgagacaggcgatatatcggaggcgagcaggaagagcttcgagaacgaggtcagggcactgacagaggtccgccaccggaacatcgtcaagctccacggcttctgcacgagcggaggctacatgcacctggtgtacgagtacctggagaggggcagcctggggaagacgttgtacggggaagacggcaagaggaagctgggctggggcacgagggtgaaggtggtccagggggtcgctcatgccctggcctacctgcaccatgacggcagccagcccatcgttcaccgcgacatcactgtcagcaacatcctgctcgagtcggaattcgagccgcggctctctgatttcggcaccgccaagctgctcggctctgcttctaccaactggacttctgtagcaggatcatatggctacatggctccagaactggcatacacaatgaacgtcacagagaaatgcgacgtgtacagcttcggggtggtcgctctggaggtgatgatggggaagcatcctggcgatctcttgtcctcgctgccggccatctcctcctcttcctcaggagaaggcttactgctccaggacatactagaccagcggctggaacctccgacgggcgacctcgcggaacaggttgtgctcgtcgtcagaatcgcgctcgcttgcacgcgggcaaaccctgactcgcggccttccatgcgatcggttgcccaggagatgtcagcgcgtactcaggcttcccatctttctgaaccgttcagacagatcactgtaagcaagctaacagattaccagaagtgatgtttgcctgtgcaaaggattggagctgaacaagtgaagtttgtagctagtgtaaatgtgtaattcttttt

SEQ ID NO: 130375 - DNA, 1242 bp, Zea Mays
gcctttttttcttcgtctcctcattcctcaaagagccggaagccttctccgttctctccgtttttccccttcgcgtatcttcgtccgccgcaacccttcacgtatcgtctctctctcacacggtcacaccctgacctcccccctccccctcccagaaaagacccctcgaaaaacggcggcgctgcgacatggcggaggtcgaggctccagctactgcggtcgaggctccagctgctgcggtcgcgacgacgacccctgaggtggcggcgcccgaggccggagccgctacggaggcgaagggtccgcacaagcttcaccggcagtggaccttctggtacgacatccagacgaagaccaagtccggggctgcgtggggcacctccctcaaaaaggcctacaccttcgacaccgttgaggagttctggagcatgtatgatcagatttttcgtccaagcaagttgtctgggaatgctgattttcatctattcaaggctggagtagagccaaaatgggaagacccagagtgtgcaaatggtggcaaatggactgtcccatgcaacagaaaggcaacctttgagaccatgtggcttgaaacgttgatggctcttattggggagcagtttgatgaaacagaggacatttgtggaattgttgctagtgtccgtgcaagaggagataagctggcattatggactaggactgccagcaatgaagctgtccaggtaaacattggcaagaagtggaaggatgtcatcgactacaacgacaagatcacgtacactttccatgacgactctaagagagacaagcccagcagaggtgggcggtacaccgtgtaagctggacgtcaagaaggccgttgctttggattggaagtggagagcggaggtggggattttcttctgggatcgtcgccgactttcgtttgattcagcttttacacgaggcagttttcgccgctattacaatgttattttcctctcagacagcttatgtggtacaagaaagagacgttggagacattgacggtttctgtatggcactagatttctatcttaatatggcccccccggttcagtagcaaccccaacgagtcatttgctttttggagatccctgcaatgcatggccatgttttagatcttatatatattgtactgtatataaaacgtttgtgatctgtggagccattggcaccttgcatgcaaatgtgccctgtcggtaaggtattggcattttgtgt

SEQ ID NO: 130376 - DNA, 378 bp, Zea Mays
cctgtgactctgtgagaacccaccgagtgaagaacgatagatcatggaggcggcgtttctgctaggcccgtacaccgggggcagcggcttgggcgggagggtccacgccaggagcggcggccgccggtcagctgcggcggtgaagcgcctgctgttgaggctgaggcgctcttggagaagacgagcggcgcggccgagacgaaccgcggtgaggttcggttacgacccgcatagctactcccagaacttcgacgacggcactgcctcctgcggccaccaccgcttgtagctgaggcgttgagcacttgtgcttatgtttgctactaattgccggtgactattattagctcgtgcagtcatagactcattgtattgtgg

SEQ ID NO: 130377 - DNA, 564 bp, Zea Mays
gcacagtatcttcagaagctacagctgcagcacacagattcacagatagacctcacctacctactccagctcgaagcagacagagcatctagctagctagttggttagtggcaaagagcgtccgtgacctgtgagaaccgactgagtgaacgatcatggcggcggtgtctctgctaggcccgtacaccgggggcagcggcttgggcgggaggctcgtccacgccaggagcggcggccgccggccagctgcggcggtgaagcggctgctgtcgaggttgagtcgctcttggagaagacgcgcagcgcggccgaggcgaaccgcggtgaggttcgggtatgacctgcatagctactaccagaacttcgacgacggcagtgccccctgcgcccaccaccgcttgtagctcgtgcagcagtgcttatatgttcgctactgtactaattgccggtgactattactagctagctgttacagccatagactcaatgtacatgatgatgctttagtgtggagctatatatttgaagcttggaatagaaatggatttctatatattattataa

SEQ ID NO: 130378 - DNA, 246 bp, Zea Mays
atcatggcggcgtctctgcaaggcccatagatcgggggcagcggcttgggcgggagggtcgtccacgctaggagcggcgatcgccggtcagctgcggcggtgaagctgctgctgtcgaggttgaggcgctcttggagaagacgcacggcgcggccgaggcgaaccgtggtgaggttcgggtatgacctgcatagctactaccagaacttcgacgacggcactgcctcccgcgcccaccaccgcttg

SEQ ID NO: 130379 - DNA, 300 bp, Zea Mays
atggcggcggcgtctctgctaggcccgtacaccgggggcagcggcttgggcgggaggctcgtccacgccaggagcggcggccgccggccagctgctgcggtgaagcggctgtgctgtcgaggttgaggcgctcttggagaagacgcgcggcgcggccgaggcgaaccgcggtgaggtttgggtatgacctgcatagctactaccagaacttcgacgacggcactgcctcctgcgcccaccaccgcttgtagctgtagctcgtgcagcagtgcttatgtttgctacaatactaattgccgg

SEQ ID NO: 130380 - DNA, 246 bp, Zea Mays
atggcggcgtctctgcaaggcctatacaatgggggcagcggcttgggcgggagggtcgtccacgccaggagcggcggtcgccggtcagctgcggcggtgaagcggctgctgtcgaggttgaggcgctcttggagaagacgcacggcgcggccgaggcgaaccgcggtgaggttcgggtatgacctgcatagctactaccagaacttcgacgacggcactgcctcccgcgcccaccaccgcttgtag

SEQ ID NO: 130381 - DNA, 405 bp, Zea Mays
ccaatgagtgacaagtttggtaaaaggctatagctacaaagaaagggaaatacagtgagagggagttagaagtgaagctgtgttagcaggttcctgcaactatactgcatcatgaggctcacatatctcaaataccacgacacaatcatctaatagtgcatcaaggactaaatatcagagttgtcaaaaactgaatcgcaaatggctgtgttaagagcaacaattaaatcagcattgcagcaggcgcagagtggatgtacacttgaaccggatgtcgacatcgttcttggtgagctcggtggcgttgatctactccatggaaatgttggcgaggtccttgatgctgtcatccatgaacaaccacatgtgctccttctccagcttcaccttctcttgcgggtttag

SEQ ID NO: 130382 - DNA, 693 bp, Zea Mays
agctacagctgcagcacacaaatacgtattattccgctcggagcagatagagcacacagctagttagttagtggcaagagcgtcagtgacctgtgagaacccaaccgacggagtgaacgatcatggcggcgtctctgctaggcccgtacaccggaggcagcggcttgggcggtagggtccacgccaggagcggcggccaccgccgttcagctgcggcggtgaagcggctgctgttgaggctgaggcgctcttggagaagacgcgcggcgcggccgaggcgaaccgcggtgaggttcgggtacgacccgcatagctactcccagaacttcgacgacggcactgcttcctacgaccaccactgcttgtagttgtagttgtagctgtgcttatgtttgcttatgatatgccggtgactattatgtacaggatggcttaggtcttgtttgagactaagagtaattgagaggatcaaaatcacttgctattcaaaattgaatagtaataaattttggcaactcaatccctttcattacacttacttccaaaccaacccaccaacccttagcgtcttctgagtagtcaggattcaccagtagcatatatgtaatacaaatctgtcatcgatcagcagaatcgtgctttgttgtggagctatttgaaagcttcgaatagaaatggtttccgtacttattc

SEQ ID NO: 130383 - DNA, 1391 bp, Zea Mays
cttttctcgtccgtcttcaaccccccctccaatttggtctcgtaccatatatcctcttcaagaacagcgggagggagagagagaggagttcgtgatccgccatgctcgacggcgacgacggccatcccttcagtcaggatgacatctcgagccccatagcggcgcacatcctagacttctacgacgacgacgacggtggctgcggcggcggcggtggcgatctcttcgtgggagtgaacgcggcctcggatatgttcacggtgccatcggaggatgtctcgacgtcatccgtaacgacgcctcctgcaccctgcggcggccatggcgacaacgcgtcgtcgttggacgccgctgcctcggccttctctcccatgccgttcctcgactccaccctctcggctctgctcgaagaagaagacgcaccggttctagacacggaactcctcgccatcgacgactaccggttcgcggcgacggcggtagccggagatgagccacggcccgagcagcagcggttcgcacaggtgccgatggtgcttccggtggcagaacacccgagtagtctgcagacgcagatgagcagcacagcgttcgagctgctgcacgcagcgtcgtcgtcgtcggggtacaccgacaacgactgcttcgcggcggcaatggacgaaggaggaggagggtacgtgggcctagacgaggccctttgccagcagcagcagcatcagctcctgcaacctggcgcgttgctctccgctggcatgatggagactgcagcgcagggttgctacttcgtcaacggcggtccgacagcacagggagtcctgttcggtgccagtggcagcggcgtggtgatgcccatgacggcggggttggaggagatcggcgagtaccagcgcatgatggagagcgccagcgcagcgctggccgccacgcacagccccgacgcggactccgtcgccgcggcgcagcagatggcgtttagcggcaacggcggggaaatgcagatgggcggcggcagcatgagcccggggcggctgccggcggcgacggaggcggcgtcgagcttggaggacaccgacttcaagagcgcccgcatcaccgttgaggagagacgggagaagatccacaggtacatcaagaagcggaacgaacgcaacttcagcaagaagatcaagtacgcttgcaggaagaccctggcggacagcaggccccgcgtgcgcggcagattcgccaagaacgacgactatggcgagccgtcgtcaagggtggcgcacaaccacgacgaatacgaccacatggccgccatgaaggcacaggacatactcgaccccgacgccctgcaggccgccatgaactcctacatgtacaaccacactgttgagtcctggatgtaa

SEQ ID NO: 130384 - DNA, 1407 bp, Zea Mays
tcacccctgctgtcatttcgtcgagcatctcgccagcatcgcgaccgccgggcgccggcttcctccgcatcgcgtcggttgattcccagcgaggatggagaggttcttctccaacccttcaaacgccccgcggtgcgacacagacaccggcatcaccctaatctcgggccctccgtgttgcgggaagacctcgctcctcttccagttcgcggtgaaccgcgcggcggagagtggccgcggcgtcgtgttcatctgcagcaaggggaggctggagagcaaccctcctttcctgtcccagggcgtcgatccatcgatgagcttacttcagaggatacaaatcaaatatattgaagacggtgatgaaatcagaaagtactttgctgcatttcaccttcttgacgacttccccgctgcagtcattgttgatgattttgcagatttcttctccgacaggagctgccaacaaagatatggaattgctagggctcgagatctagcaatggtgcgtgcactagctttgtgccacaatgctattgggcatgcaaatgcaaagcttggaactcttggttattgcaatctattactttctgatgtacatcaaggtgatactccaagattgttgttcatttaccagagatggataaattccatatacacaatccgaggtgacggcaatggatcctacatacttcagaaccttggcagttcagaaactgggtcaaagaaagcaagaaaagctaaatactcaatagcactacaatatcttgttcttgaagagaccagcacctaaaaattcttcatttttctattacagttcagttcccaacagagatcataggacccgacagttagttttatgcttttagcatactgagtgtaacaacaatttccttttttatggttctcgtagctgcacttgagttagttgtgtatgtaagtttgcacctctagctgatgtgggtgttttgcatttgaaccaatccacaaccgggtttgatatgttatgctgaacatcagtgagcaccacaaattttcagtgtcctcgttttgccagaagttcaggatttgctcaagttgttcaactggattgattacatgtgcggatgatgtgcctcataactatttagcgaagcagcaaggtcttgctttaaggaaattattgtcatgaacaaagtgtcaaagtggcaactgcgttgtcaggcgtgtttccgttacctatttccctttttcttccggacaatatttcattccgtgtctccttttccattgaatgtttcatgtacaagtctttgactagatttatataaaaaaatattttgactaaatttatatatagaaaattataaatatttataatacaaaatgataactattagattagttatagaatacatttttataaaaaaa

SEQ ID NO: 130385 - DNA, 1432 bp, Zea Mays
tcacccctgctgtcatttcgtcgagcatctcgccagcatcgcgaccgccgggcgccggcttcctccgcatcgcgtcggttgattcccagcgaggatggagaggttcttctccaacccttcaaacgccccgcggtgcgacacagacaccggcatcaccctaatctcgggccctccgtgttgtgcccttgttttggtccaaggtcagcgggaagacctcgctcctcttccagttcgcggtgaaccgcgcggcggagagtggccgcggcgtcgtgttcatctgcagcaaggggaggctggagagcaaccctcctttcctgtcccagggcgtcgatccatcgatgagcttacttcagaggatacaaatcaaatatattgaagacggtgatgaaatcagaaagtactttgctgcatttcaccttcttgacgacttccccgctgcagtcattgttgatgattttgcagatttcttctccgacaggagctgccaacaaagatatggaattgctagggctcgagatctagcaatggtgcgtgcactagctttgtgccacaatgctattgggcatgcaaatgcaaagcttggaactcttggttattgcaatctattactttctgatgtacatcaaggtgatactccaagattgttgttcatttaccagagatggataaattccatatacacaatccgaggtgacggcaatggatcctacatacttcagaaccttggcagttcagaaactgggtcaaagaaagcaagaaaagctaaatactcaatagcactacaatatcttgttcttgaagagaccagcacctaaaaattcttcatttttctattacagttcagttcccaacagagatcataggacccgacagttagttttatgcttttagcatactgagtgtaacaacaatttccttttttatggttctcgtagctgcacttgagttagttgtgtatgtaagtttgcacctctagctgatgtgggtgttttgcatttgaaccaatccacaaccgggtttgatatgttatgctgaacatcagtgagcaccacaaattttcagtgtcctcgttttgccagaagttcaggatttgctcaagttgttcaactggattgattacatgtgcggatgatgtgcctcataactatttagcgaagcagcaaggtcttgctttaaggaaattattgtcatgaacaaagtgtcaaagtggcaactgcgttgtcaggcgtgtttccgttacctatttccctttttcttccggacaatatttcattccgtgtctccttttccattgaatgtttcatgtacaagtctttgactagatttatataaaaaaatattttgactaaatttatatatagaaaattataaatatttataatacaaaatgataactattagattagttatagaatacatttttataaaaaaa

SEQ ID NO: 130386 - DNA, 1585 bp, Zea Mays
cgcgactacacgagctgggctcgctcgaagtcgactcgttgacagccgtcacccctgctgtcatttcgtcgagcatctcgccagcatcgcgaccgccgggcgccggcttcctccgcatcgcgtcggttgattcccagcgaggatggagaggttcttctccaacccttcaaacgccccgcggtgcgacacagacaccggcatcaccctaatctcgggccctccgtgttggtacgcgcctcattgctcacccttgcccttctcaaactagcccgtttggcacgcgctgagccggaatcgaaccggagctaccttattaccgctcggatcatgcagtgcccttgttttggtccaaggtcagcgggaagacctcgctcctcttccagttcgcggtgaaccgcgcggcggagagtggccgcggcgtcgtgttcatctgcagcaaggggaggctggagagcaaccctcctttcctgtcccagggcgtcgatccatcgatgagcttacttcagaggatacaaatcaaatatattgaagacggtgatgaaatcagaaagtactttgctgcatttcaccttcttgacgacttccccgctgcagtcattgttgatgattttgcagatttcttctccgacaggagctgccaacaaagatatggaattgctagggctcgagatctagcaatggtgcgtgcactagctttgtgccacaatgctattgggcatgcaaatgcaaagcttggaactcttggttattgcaatctattactttctgatgtacatcaaggtgatactccaagattgttgttcatttaccagagatggataaattccatatacacaatccgaggtgacggcaatggatcctacatacttcagaaccttggcagttcagaaactgggtcaaagaaagcaagaaaagctaaatactcaatagcactacaatatcttgttcttgaagagaccagcacctaaaaattcttcatttttctattacagttcagttcccaacagagatcataggacccgacagttagttttatgcttttagcatactgagtgtaacaacaatttccttttttatggttctcgtagctgcacttgagttagttgtgtatgtaagtttgcacctctagctgatgtgggtgttttgcatttgaaccaatccacaaccgggtttgatatgttatgctgaacatcagtgagcaccacaaattttcagtgtcctcgttttgccagaagttcaggatttgctcaagttgttcaactggattgattacatgtgcggatgatgtgcctcataactatttagcgaagcagcaaggtcttgctttaaggaaattattgtcatgaacaaagtgtcaaagtggcaactgcgttgtcaggcgtgtttccgttacctatttccctttttcttccggacaatatttcattccgtgtctccttttccattgaatgtttcatgtacaagtctttgactagatttatataaaaaaatattttgactaaatttatatatagaaaattataaatatttataatacaaaatgataactattagattagttatagaatacatttttataaaaaaa

SEQ ID NO: 130387 - DNA, 688 bp, Zea Mays
gcctgtcggacggtcgttggctagctagctcgcctctgcagtgcagagtcgatggcttccagctccggcacggcggcgacgaacgccggcgacaccgccgccacgaccgcgatcaccgtcgagcggaagccgccggcggctcgcctgtcggagctcggcgtcaggtcttggcccaagtggggcgggcctccggggaggtacccgctgagctacggagcgcggcagacgtgctacatcgtgagaggcaaggcgagcgccgccgtggagggctcgccggaggctggcgtccagttcggcgccggcgacctcgttgtcttcgccagggggacgcggtgcacctggcacatcgccgccgccgtcgacatgcactacgccttcgacccgccctaacagcgaggagccggagccggagccttgctctatgtatgcacactgaccgaccaaaatgtcaatcgaactcaaacagaatgtttttgtagactccacactccagccttgatatcaagcgctgatgagcttcttcttaataatttattaattcatcagcagggatacccgcccaaagtcattcaggtgaccttcatttggaacaggatttgctctggccaatcagatggtccaaactctatgatgtttgcataggatgaatcacctgttgtgccattggatgaaatcacgcacaagagaa

SEQ ID NO: 130388 - DNA, 2222 bp, Zea Mays
catcgacctcgatccattgaataattttactaatcaaattcttgttgggatatattcctccaattcccctcctcctcccaacaaggcaacaacaatctgttccggccgccaaacaaaacccaaaaaaaaaacacactgaacccaataatccgatcccacagaaacttttctctcggtccgttcgatcgatcgctgccgtgtcgtttgccagacaccatcagcacccaaaaccatggcctgcaacctggctcagtgcgccaccgccgccgcggcgaccgtcgcgccccgcacccctcgccctgctgcgtccgcgtccgtctccttctccgcgaggaagccggcgggcggcagcctgcggctgcagcggcaggcgtgctgcgagccgtcggtggcgccgtcgcgggcggtgttcgcctgccgggccgcggcgtcggggagcgcggccgacctggcctccgggggcaggaggtcgtccggcgtgccggtgttcgtcatgatgccgctggacaccgtcaaggagtgcggcaccgcgctgcaccgccgcaaggcggtgcaggccagcctctccgcgctcaagagcgcgggcgtcgagggcgtcatggtggacgtgtggtggggcatcgccgagcgcgacggcccgggccggtacaacttcgcgggctacgcggagctcatggagatggcgcgcaaggccgggctcaaggtccaggccgtcatgtccttccaccagtgcggcggcaacgtcggcgactccgtcagcatcccgctgccgcggtgggccgcggaggagatggagagggaccaggacctctgctacaccgaccagtggggccgccgcaactacgagtacgtctcgctcggctgcgacgccatgcccgtcctcaagggacgcacgcccgtcgagtgctacaccgacttcatgcgcgcgttccgcgaccacttcgccgactacctcggcaacaccatcgtggaaatccaagtcggcatgggccccgccggcgagctgcgctacccgtcctacccggagagcaacggcacctggaagttcccaggcatcggcgccttccagtgcaacgacaggtacatgcgtagccgcctgaaggcggcagcggaggcggccggcaagcctgagtggggccacggtgggccgaccgacgctggcggctacaacaactggcctgaggacaccgtcttcttccgcggcgacaacggtgggtggagcaccgagtacggcgacttcttcctgtcgtggtactcgcagatgctgctggagcacggcgaccgcatcctgtcgggcgccacgtccgtgttcggcgccgcgcccgtggaggtctccgtgaaggtggccggcatccactggcattacggcagccggtcccacgcccccgagctcaccgcgggctactacaacacgcggcgccacgacgggtacctcaccatcgcgcgcctcctggcgcgccacggcgccgtgctcaacttcacctgcgtggagatgcgggaccacgagcagccgcaggaggcgcggtgcatgccggaggcgctggtccggcaggtgggcgccgcggcgcgcgccgccggggtgggcctcgcgggcgagaacgcgctgccgcggtacgacggcacggcgcacgaccaggtggtcaccacggccgccgagcgcgccgccgaggaccggatggtggccttcacgtacctgcgcatggggcccgacctcttccacccggacaactggcggcgcttcgccgccttcgtgcgccgcatgaacggcgccgggtcgtgccgggaggccgcggagcgggaggcgcacggcgtcgcgcaggccaccgggtcgctggtgcacgaggccgccgtcgcgctgcggagctgaccggccgggccgggacggaacggaagcctacgatcgactgtacatacaggggttgggacttgggagggagctcgggttcttgttgggttttcctttgggtggagagcgagggagcgcagtcgagagccagcgagcagtctctcgtgcagtgcagtgcagtgcactgcagctccagcgtagacgagattgtattgtgaccaagccgggagggaaagcagggaggggaggacaaagatgttttgtcacgtttcaggctctggccatcgccggagtttgtgcggggaatatatcgatttcctattagaaatccgcagaaaatgatgtgttcctgcactgcctgattcggtgccgcgct

SEQ ID NO: 130389 - DNA, 178 bp, Zea Mays
gaaactactggaattgtggattatagaaattatgacgttatgaaatatgcagtgggtttagtgtacgatttactcatttcttttaatgtgaactcaaaacattttttgctgttgaagagcagaggcaactgttggactgcagcaggtaagaaactagatagctttaatatgtttggtc

SEQ ID NO: 130390 - DNA, 1141 bp, Zea Mays
atacgcaacgcaacatccccgaagagagcttgcctctcgttaagccaggccggcgaggctgcgtgtgcgtgcatgcggcgacgtcggccgggggctgcagcatggccccgatcgacctcgggcgaggcggccgcgcctcaggcactggctcgggggccgcgccgggcacaccccggctcgtgatggttgtcgtcgaccccgtccgcgagtcgacggcggcgctggagtgggcgctctcccacgccattgtcgagggcgacgacatcctgctcctccacgtcaacatgccgtacccgcacaacggggccgcgggcagatccgggccctcacgctcctcgtctggcgggagcaccggttccccgatcgccgcgctcctaggcggaggtggaggcggcggctcgggcgccggcgcggatccggcggacttcatggaggagatgtgcgccgcgtgcaaggcgcggtacccccgcgcgcgggtgaacgcggagcgcgtcgagcccgctaccgagggccgggaagccaaggcgcagaccatcctcgccgagtcccagcgacgcggcgtcgagctcctcgtcataggcctgcgccgcgcgtcctctttctttgggttaagaagcccgagcgggtcgtcgagccgcgggcacgacagcacggcggagttcttgatcgagcatagcaagtgcctgtgcgtaagcgtccagaagaagggccagaatgccggatacctgctcaacaccaagacccacaaaaacttctggctactagcatgaacgtacatgtaccttcatgatcgatcgatcgatcagacttgttttcatgtatgtgtagacacatacatacattaggcatgcatggcgcgtatgcacctacacggcttgcttgattttaccagctggctcgaaccgagcggcggggtaaaaaaagaaaaaagaaaaaggaacgaacaatctcaaatccctggctttgttcatgattcgatcccctctttttaaccaaccgattgtgcacctcggctttttcgataaagaggaggttatttcatccgatctattagagcatatctaagggattctttatttttgtccttctatttaactttctatttatcttcctataaagattacactctctatatatagca

SEQ ID NO: 130391 - DNA, 1035 bp, Zea Mays
atgaatcagcttgattcgttgattagatcagcaattgagaatagcacttcagattatgataaggaaaagctccaggagcggttggcaaaactctctggaggtgttgctgttctgaagattgggggagctagcgaagcagaagttggtgagaagaaggatagagtgacagatgcactgaatgctactaaagctgctgttgaagagggtattgtaccaggtggtggtgttgctcttctctatgcatcgaaggagcttgataaattgcagacagcgaacttcgatcagaagattggtgtgcaaatcattcagaatgctttgaagacacctgtacacacaattgcctccaatgctggggtggagggagcagtagttgtaggaaagcttttggagcaagaaaatactgacctgggttatgatgctgctaaaggtgaatatgttgacatggtgaagaccggtatcattgacccgctaaaggttatcagaactgctttggtggatgctgctagtgtgtcgtccctgatgacaaccacggaatccataattgtagagattcccaaggaagaggcaccggctccagcaatgggtggcggcatgggtggcatggattactaatgcatcacacccacatacacatcaatgcaggtttttttttagcggtgaagttcatcttcactgtttagcggtgcaagttcatctctactgtattttgttcgatgatgaggtggttgtcaggcggatacagttttgagtctgcggacgtaggacctcacaatagttccaaacggaatagtgtgagaataataaatatgaacagtagttctttgagatatgaagttgtagaccaagattggcttccgggcattttgtgtggaaccaactgtattctgatcgttacattttttggctggggtaaaatcggattgccgttctgttttgtcagtgtcgggcagatcttgtgcttctgcgcttgcttctgatgtagtcaggcgtaaatgcgctggcggtggctgttttgctctaacaaggatttcgcgt

SEQ ID NO: 130392 - DNA, 931 bp, Zea Mays
atgaatcagcttgattcgttgattagatcagcaattgagaatagcacttcagattatgataaggaaaagctccaggagcggttggcaaaactctctggaggtgttgctgttctgaagattgggggagctagcgaagcagaagttggtgagaagaaggatagagtgacagatgcactgaatgctactaaagctgctgttgaagagggtattgtaccagacacctgtacacacaattgcctccaatgctggggtggagggagcagtagttgtaggaaagcttttggagcaagaaaatactgacctgggttatgatgctgctaaaggtgaatatgttgacatggtgaagaccggtatcattgacccgctaaaggttatcagaactgctttggtggatgctgctagtgtgtcgtccctgatgacaaccacggaatccataattgtagagattcccaaggaagaggcaccggctccagcaatgggtggcggcatgggtggcatggattactaatgcatcacacccacatacacatcaatgcaggtttttttttagcggtgaagttcatcttcactgtttagcggtgcaagttcatctctactgtattttgttcgatgatgaggtggttgtcaggcggatacagttttgagtctgcggacgtaggacctcacaatagttccaaacggaatagtgtgagaataataaatatgaacagtagttctttgagatatgaagttgtagaccaagattggcttccgggcattttgtgtggaaccaactgtattctgatcgttacattttttggctggggtaaaatcggattgccgttctgttttgtcagtgtcgggcagatcttgtgcttctgcgcttgcttctgatgtagtcaggcgtaaatgcgctggcggtggctgttttgctctaacaaggatttcgcgt

SEQ ID NO: 130393 - DNA, 1372 bp, Zea Mays
aaaccctaaaccctagtggatgcttctagagccgccgcgcaccctccagttcgtctccccagcgctgtctctaaaatccactcgtccaccacctcctcggcgcttcgcatccttcccccctccgcaagaaagaagcgaagcaactctccgccgtctccgtttctccacaccacccaaagctctctccgaccacaacctcgcccccagcgcctccttccgcagtcatgtaccgcgcggccgctagcctcgcctccaaggcgcggcaagccgggaacagcctcgccacccgccaggttggaagcaggcttgcctggagcaggaactatgctgcgaaggacatcaagtttggtgttgaggcccgtgctctgatgttgaggggtgttgaggagttggcagatgctgtcaaagtgacaatgggacctaaggggcgcaatgtggttattgagcaaagctttggtgcaccgaaagtcacaaaggatggtgtgactgtagcaaagagcattgaatttaaggatagagtaaagaatgttggtgcaagccttgtgaaacaggttgctaatgcaactaatgacactgctggcgatggtaccacatgtgccactgttttgacaaaagcaatatttactgaggggtgcaaatctgttgcggctggaatgaatgcaatggatttaaggcgcggaatctcaatggctgttgacgctgttgtgaccaatctgaaaggcatggccagaatgatcagcacttcagaagaaattgcacaggtgggtacaatatcagcaaatggggaaagggaaattggtgagcttattgccaaggctatggagaaggttggcaaagagggtgtcatcactattgcggacggtaacaccctttataatgagcttgaagttgtggagggtatgaaactagacagaggttacatctctccgtacttcattaccaactcaaaaacccagaaatgtgaattggaagacccattgatcttaattcatgacaagaaggttacgaacatgcatgctgtggttaaggttttagaaatggctctgaagaaacaaaagcctctactgattgttgcagaagatgtggaaagtgaagcattgggcactttgattattaacaagcttcgtgcaggcatcaaggtctgtgctgtcaaagctcctggttttggggaaaacaggaaggcaaacttacaggaccttgcaatccttactggaggagaggtaataactgaagaactaggaatgaaccttgagaattttgagcctcacatgctgggtacatgcaaaaaggtgactgtctctaaggttgcccctgttattcttgatggagccggagacaagaagtccatgaagagagacgaatctctagaaac

SEQ ID NO: 130394 - DNA, 1776 bp, Zea Mays
atggttccgacgaccacgggcgctgacggagatggtgaacgacgagtaactgcctctgcagtgggcggaggcgacggtggtgccgccaaatcgacgtccatgggagcggatgtagacgaccccgcgtcaaccaccggcaccggtggtgacggggatgcagtggggagtccgcactccaccaccggcagcggaaccaccgctgtccatccatggagaacgcagaagtgcatgttttgcacttgcacacggcgttcagggatgacgtgcactggtggaagtgcagcgtctagccccacagcaaacgcctccaacatggcatcatcaacaatgtgcagaacttcgcgcatatggcgtatgcgcatggaaacgatcacatttacaaaatgttttgtaacaagaaccagctttacttacatgagcccatccgacgtggcagggaaccaccacgatccgagacgaagacgatgcctcccagtccaagaaagaacggagcaggccgcaggcgatacatacgacgcgatgacggcacggtcccaccaggctgatccctcacggttctttcctattcctattccgctgtaccccagtccccacacacaaagcaccgactcactcggagtcggccactctcaccggccgcggcgcccgcaaccgacctcccctccaggcgaccgcatggcggagcgggagcggaagcggaagcgagcggcggaggagtgggagaggcggaagaggggcaggaagagggagaaggagaggcaggtggggtggacgagcgaccccgttgaggcgcttggggaagatgtgatggggcgggtgatggagttcctggacgcgcgcagcgtggcacgatgcaccgcagtctcctgcgcttggcgcggggtagcggcagacaaccgcctctgggcacctatgtgtactgaattgatggcgggaaaggctcatatcccacgtttaacatcgatccgcactggatccaagttgtctacatattcaatggtcattatggatgggaaacggagtcggatcacaaaagaggatctctgcgatcatgcgtgggaatatcgtttcaccatagcagcacctgattactggaggaaccttgatccatcatggaagcacactggtccacctatgcgacgctacttccaccccgatggctaccacagtgcagaccctcatgacgccgtgtggggtggccatgagtgcacctacacggtcataacgagctttgtcgacgatggccagatcagggagcactacgtgaggatcaaccggtggccgccaatgaaggtgtcaaggaaggacgactggagctgggagctatcgaaccacatgtaccgctataacagcatacctgattcccacaggaaaggatgcactggtcctctgttcccagtttggtgaatgcaagtctacggtagtaatcagcggctacggttcatgctgccgcagtcttatctgctagtagaaatcaagcttgccatacgttcgtaactgaggacaactgaaaaatggaatgtggcatcaggaggttgtatttggtacggctgccgagggtcaaggctaggtgtgtatgcaatatacataaacaaggtatatatatgtattatatgttttgtacttttgtggcattgtgatgatgatgatacccttcgtgatggtttggtagtagacttgtgccgtcgcctgaacacttacatgcctgtggagcgtgttgtaaaaataatgtaagtatgcagcaaatgcggtatgttttggtgtttgtggtgttta

SEQ ID NO: 130395 - DNA, 111 bp, Zea Mays
tataacttgaaaacatatatctgcaaatcctttaacttgaaatccaaagcaaatcctataacttcaactcaaagtatttaacattaagtgtaattgaaaataatcctataa

SEQ ID NO: 130396 - DNA, 2081 bp, Zea Mays
ctgctccgcgtggaaaacgctctagaccgcgaccgcgaccgcgaccaagagtccaagacttccccgtccgcccgctccgtcctcacaggtcacgagctcacggccaacgacacaactcacagtaacgttaccagccacgacacctatgaggctatgacccaacgtcccaaccaagaaccaactactctgccagcctacgcagtaacgcagcagcaatcccaacccaagccttcgctggcgcgcgggtccaccccgactcacgcctcccgttcccataccaccaggtccgtctccggctttccgtcggccctccgccctccgccccaaaacttcgtggtaaaacctccgcgatttcccttccccacccaccgcggcagttgcctcccctcctacaaataacccccgaccatccacgaggacgtaccttctgcagcaagtagtgaccaggagcgagcagccaaggaaaggagccaagcaatggagaaggccgtcgacaggcagcgggtcctgctgcggcacctcaaccccgccgcggcggggagccccgccccgcccgccatctccgcaagcgcgtgcgcggcgggggacagcgcggcgtaccaccggaggccggccttcgccgacgacgtcgtcatcgtcgctgcttacaggacggcaatttgcaaggccaagagagggggtttcaaggatacctttgctgaggacctcttggttcctgtcttcaaggctttggtagacaagacgaagctggacccaagtgaagttggcgacattgttgttggtactgtcttagctcctggttcccagagggcaatcgaatgcagaatggctgcactgtatgctggtttccctgacaccgttcctcttaagactgtaaacaggcagtgctcttctggccttcaggcagttgcagatgttgccactgctattaaagcagggctctatgacattggtattgctgctggtttggagtccatgacagtgaacaaagttagtcttgatggccaagcgaatcccaaagttgagctattttctcaagcacgtgattgtcttctcccaatgggcctcacatctgagaatgttgcacaccgttttggcataacacgactggagcaagatcaagctgctgttgagtcacatagaaaggctgctgccgcagcagctgctggtaaattcaaagaggaaattgtgccagttcatacaaagattgttgatccaaaaactggtgaggaaaagaagatcgtaatctctgcagatgatggaatccgagtggatacttctcttgcagtcctgtcaaaactcaaaccagcattttcaaaggatggcagcactactgctgggaatgcaagccaagtgagcgatggcgctggggccgtcttgctaatgagacgggatgttgctatgaaaaagggtcttccagttcttggtgtctttaggacctttgccgctgttggagttgatccagctgtaatgggtattggtcctgccgtagcaatccccgcagcagtgaaagctgctggccttcagatggatgatatcgatcttttcgaaatcaatgaggcttttgcatctcagtatgtctactgctgcaagaagttgaaacttgatcctgctaaagtcaatgttaatggcggtgcaatggcccttggacatccgttgggtgctacaggtgcacggtgcgtcagtactcttctcaatgagatgaagcgccgcggcaaggattgccggttcggagtgatttctatgtgcataggttctgggatgggtgctgctgctgtgttcgagcggggagacggcgttgatgagctcaccaatgctcggggaatctcgacccacaactggctttccaaggacgccatgtaaagctacacccaccaaaatttgccggaactggtagcattgtttccagatcgctgtagggagcgaattggggaataaaatgattttgtatttgtcgcccctgctggggatttaggaagatttttacgccactggtatttgaacttgcttacctggaaagatgcgtgaataactcaatagtctgctgcaaggatcatacgtgcacccgcttaattttaaaa

SEQ ID NO: 130397 - DNA, 1981 bp, Zea Mays
ctccggctttccgtcggccctccgccctccgccccaaaacttcgtggtaaaacctccgcgatttcccttccccacccaccgcggcagttgcctcccctcctacaaataacccccgaccatccacgaggacgtaccttctgcagcaagtagtgaccaggagcgagcagccaaggaaaggagccaagcaatggagaaggccgtcgacaggcagcgggtcctgctgcggcacctcaaccccgccgcggcggggagccccgccccgcccgccatctccgcaagcgcgtgcgcggcgggggacagcgcggcgtaccaccggaggccggccttcgccgacgacgtcgtcatcgtcgctgcttacaggacggcaatttgcaaggccaagagagggggtttcaaggatacctttgctgaggacctcttggttcctgtcttcaaggctttggtagacaagacgaagctggacccaagtgaagttggcgacattgttgttggtactgtcttagctcctggttcccagagggcaatcgaatgcagaatggctgcactgtatgctggtttccctggtaatgacatttccaatgttgcattttcctcctgtggtgtaggacaaccatcatcccaaccttgatctatttgttggttcaaattggatgcagacaccgttcctcttaagactgtaaacaggcagtgctcttctggccttcaggcagttgcagatgttgccactgctattaaagcagggctctatgacattggtattgctgctggtttggagtccatgacagtgaacaaagttagtcttgatggccaagcgaatcccaaagttgagctattttctcaagcacgtgattgtcttctcccaatgggcctcacatctgagaatgttgcacaccgttttggcataacacgactggagcaagatcaagctgctgttgagtcacatagaaaggctgctgccgcagcagctgctggtaaattcaaagaggaaattgtgccagttcatacaaaggttatgtcgtttaatttacctttgtaaagtaactatgctagctattgatgatttccgacatattaaaaaggtgaaattttcatgagttatatgctaacacaatgttactctataaagattgttgatccaaaaactggtgaggaaaagaagatcgtaatctctgcagatgatggaatccgagtggatacttctcttgcagtcctgtcaaaactcaaaccagcattttcaaaggatggcagcactactgctgggaatgcaagccaagtgagcgatggcgctggggccgtcttgctaatgagacgggatgttgctatgaaaaagggtcttccagttcttggtgtctttaggacctttgccgctgttggagttgatccagctgtaatgggtattggtcctgccgtagcaatccccgcagcagtgaaagctgctggccttcagatggatgatatcgatcttttcgaaatcaatgaggcttttgcatctcagtatgtctactgctgcaagaagttgaaacttgatcctgctaaagtcaatgttaatggcggtgcaatggcccttggacatccgttgggtgctacaggtgcacggtgcgtcagtactcttctcaatgagatgaagcgccgcggcaaggattgccggttcggagtgatttctatgtgcataggttctgggatgggtgctgctgctgtgttcgagcggggagacggcgttgatgagctcaccaatgctcggggaatctcgacccacaactggctttccaaggacgccatgtaaagctacacccaccaaaatttgccggaactggtagcattgtttccagatcgctgtagggagcgaattggggaataaaatgattttgtatttgtcgcccctgctggggatttaggaagatttttacgccactggtatttgaacttgcttacctggaaagatgcgtgaataactcaatagtctgctgcaaggatcatacgt

SEQ ID NO: 130398 - DNA, 2059 bp, Zea Mays
ctgctccgcgtggaaaacgctctagaccgcgaccgcgaccgcgaccaagagtccaagacttccccgtccgcccgctccgtcctcacaggtcacgagctcacggccaacgacacaactcacagtaacgttaccagccacgacacctatgaggctatgacccaacgtcccaaccaagaaccaactactctgccagcctacgcagtaacgcagcagcaatcccaacccaagccttcgctggcgcgcgggtccaccccgactcacgcctcccgttcccataccaccaggtccgtctccggctttccgtcggccctccgccctccgccccaaaacttcgtggtaaaacctccgcgatttcccttccccacccaccgcggcagttgcctcccctcctacaaataacccccgaccatccacgaggacgtaccttctgcagcaagtagtgaccaggagcgagcagccaaggaaaggagccaagcaatggagaaggccgtcgacaggcagcgggtcctgctgcggcacctcaaccccgccgcggcggggagccccgccccgcccgccatctccgcaagcgcgtgcgcggcgggggacagcgcggcgtaccaccggaggccggccttcgccgacgacgtcgtcatcgtctgcttacaggacggcaatttgcaaggccaagagagggggtttcaaggatacctttgctgaggacctcttggttcctgtcttcaaggctttggtagacaagacgaagctggacccaagtgaagttggcgacattgttgttggtactgtcttagctcctggttcccagagggcaatcgaatgcagaatggctgcactgtatgctggtttccctgacaccgttcctcttaagactgtaaacaggcagtgctcttctggccttcaggcagttgcagatgttgccactgctattaaagcagggctctatgacattggtattgctgctggtttggagtccatgacagtgaacaaagttagtcttgatggccaagcgaatcccaaagttgagctattttctcaagcacgtgattgtcttctcccaatgggcctcacatctgagaatgttgcacaccgttttggcataacacgactggagcaagatcaagctgctgttgagtcacatagaaaggctgctgccgcagcagctgctggtaaattcaaagaggaaattgtgccagttcatacaaagattgttgatccaaaaactggtgaggaaaagaagatcgtaatctctgcagatgatggaatccgagtggatacttctcttgcagtcctgtcaaaactcaaaccagcattttcaaaggatggcagcactactgctgggaatgcaagccaagtgagcgatggcgctggggccgtcttgctaatgagacgggatgttgctatgaaaaagggtcttccagttcttggtgtctttaggacctttgccgctgttggagttgatccagctgtaatgggtattggtcctgccgtagcaatccccgcagcagtgaaagctgctggccttcagatggatgatatcgatcttttcgaaatcaatgaggcttttgcatctcagtatgtctactgctgcaagaagttgaaacttgatcctgctaaagtcaatgttaatggcggtgcaatggcccttggacatccgttgggtgctacaggtgcacggtgcgtcagtactcttctcaatgagatgaagcgccgcggcaaggattgccggttcggagtgatttctatgtgcataggttctgggatgggtgctgctgctgtgttcgagcggggagacggcgttgatgagctcaccaatgctcggggaatctcgacccacaactggctttccaaggacgccatgtaaagctacacccaccaaaatttgccggaactggtagcattgtttccagatcgctgtagggagcgaattggggaataaaatgattttgtatttgtcgcccctgctggggatttaggaagatttttacgccactggtatttgaacttgcttacctggaaagatgcgtgaataactcaatagtctgctgcaaggatcatacgt

SEQ ID NO: 130399 - DNA, 1565 bp, Zea Mays
gaaatcacttaccgccttctccgcactgactcgaggtggaactgggccagccagggactctggcccgacccgagaacctcaaccaaaacctcaccttggcaccgccgcgtcgctcggcgcctcgtcgggaactctccgccgccacccagtgacccgccgcgccttgcagcggcgacggagggaccagccagccagccatgacgacccgcatagcgccaggcgtgggcgcgaacctactcgggcagcactcagcggagcgcaaccaggacgccaccacctacgtcggcaacctcgaccctcaggtttctgaggagcttctatgggaattgtttgtccaagcaggccctgttgtgaatgtgtatgtcccaaaagacagagttacaaacttacaccagggatatggatttgtagaattcaggagcgaggaagatgcagattatgctattaagactttgaacatgatcaaactatatgggaagcccataagagtaaacaaggcttcccaggataagaagagcttggacgttggagcaaatctgtttattggcaatcttgatccggatgttgatgagaagctcctctatgataccttcagtgcatttggagtgattgtaactaatcctaagataatgcgagatcctgaaacaggaaattctagaggctttggctttgtgagctatgagtcctttgaatcatctgaccaagcaatagaggccatgaacaaccaacatttgtgcaaccgcccaatcactgtctcttatgcttacaagaaagacacgaaaggagaacgccatggcacaccagcagagagactgctggcagcaaacaatccaggatctcaaaagaataggccacacacaatgtttgcaagtggtccgccgacccaaggtcatccaaatggtggtccgcctgtgccacggccttatggcaatggcacaattcctggacagattcaacacattcggcaaccacctccaccacctgttggacaattcccccctccaatgcagatgcacgggcaaccaacttggcccgctcaacattctatgccgcctcccatgccatcgcaactccagtacaggctcccaatgaggccaccaccaccaaatatgatgcctcctccggttggcatggtaaggccgccacctcctcccactggtatgtcagcaccacctatgtggatgccacccccacccccaccacatcaaggtggtggaatgcctccgcctcccatgtctatgccaccaccgcctccaccaccatctagttaaacacatgcaaaggacagtaccgtctggtcaatgtgtaagctgtaactgtagactaaggatgctggttcctttcatgtctccatgtaacttcgtcaacactaggttaagaggaggtttgagagttaacctgacagatacactcaagattaacagctatttattcatgttgtgttgaagataaaatgaattttgtgcttgtctacccactacttgtgttctctgattgccgtgatacgtttacaacgatcactatgcacgttctgttgccactgaattatcgatggtggaagtttc

SEQ ID NO: 130400 - DNA, 1316 bp, Zea Mays
tttgttttttgatgatctatattattatgtaattggaattctttattttggttatcaaataaattcatttcctttgtattaacagaattaccattcttacatttgtagtgaatgtgtatgtcccaaaagacagagttacaaacttacaccagggatatggatttgtagaattcaggagcgaggaagatgcagattatgctattaagactttgaacatgatcaaactatatgggaagcccataagagtaaacaaggcttcccaggataagaagagcttggacgttggagcaaatctgtttattggcaatcttgatccggatgttgatgagaagctcctctatgataccttcagtgcatttggagtgattgtaactaatcctaagataatgcgagatcctgaaacaggaaattctagaggctttggctttgtgagctatgagtcctttgaatcatctgaccaagcaatagaggccatgaacaaccaacatttgtgcaaccgcccaatcactgtctcttatgcttacaagaaagacacgaaaggagaacgccatggcacaccagcagagagactgctggcagcaaacaatccaggatctcaaaagaataggccacacacaatgtttgcaagtggtccgccgacccaaggtcatccaaatggtggtccgcctgtgccacggccttatggcaatggcacaattcctggacagattcaacacattcggcaaccacctccaccacctgttggacaattcccccctccaatgcagatgcacgggcaaccaacttggcccgctcaacattctatgccgcctcccatgccatcgcaactccagtacaggctcccaatgaggccaccaccaccaaatatgatgcctcctccggttggcatggtaaggccgccacctcctcccactggtatgtcagcaccacctatgtggatgccacccccacccccaccacatcaaggtggtggaatgcctccgcctcccatgtctatgccaccaccgcctccaccaccatctagttaaacacatgcaaaggacagtaccgtctggtcaatgtgtaagctgtaactgtagactaaggatgctggttcctttcatgtctccatgtaacttcgtcaacactaggttaagaggaggtttgagagttaacctgacagatacactcaagattaacagctatttattcatgttgtgttgaagataaaatgaattttgtgcttgtctacccactacttgtgttctctgattgccgtgatacgtttacaacgatcactatgcacgttctgttgccactgaattatcgatggtgga

SEQ ID NO: 130401 - DNA, 427 bp, Zea Mays
accccgctctttgttgtagttttttatggaagttttgcttcgcgcaaccgatgcctcaaaggcgtcgggttgcccatctgaatggcatcgatcgagcagtggccggcacaggtagcagggctcctctcaagtctcaatctggttctgtcggaggggcctgtggtcggagcctttctcggtgaagaaacaagttatgccgaggtgtggactttgcaactttaccctgcatttgcaggacgaaaatcgttacagaggcttgtgctctaccgacccagctagacgcgccaacgtggttgtgtattgagatctttctttgtggcaacaggccggtcactctagcactcatagcaaataatatatagctgttgagtatcatatttggcacctaagcatgttcggacggttcgcccatgtggcccggacggtc

SEQ ID NO: 130402 - DNA, 2202 bp, Zea Mays
atgccctcgtccgtcgtcaccaactcgccgagaggatctaggcaggaacaaggcaggcccctcgtcccgcggctgaccacgcagagatcgcacgagtgtggcattggccgtcgtcgcgacgacacttgggtcatctatcatcctccgatccgtcgcctcgccgccggccggcgagcccgagagtacgaggccatgacgcttgcgagcacggacaaggtggtgctgggatgcgtcgcgttcagcatcttctgggtgctggccgtgttcccgtcggtgccgtttatgccggtggggcgcaccgcggggtccctcctgggcgccatgctcatggtgctgttccgcgtgatgacccccgacgaggcgtacaaggcgatcgacctcccgatcctgggcctcctcttcggcaccatggtggtgagcatcttcctggagcgcgccgacatgttcgagtacctcggcggcgcgctggcgtggcggagccggggcagcaaggacctgctcctccgcgtctgcctcgtgtccgccgtggccagcgcgctcttcaccaacgacacctgctgcgtggtgctcaccgagttcatcctcaagctggcgcgccagaacggcctgcccccgcagcccttcctgctggcgctcgcctccagctccaacatcggctccgccgccacgcccatcggcaacccgcagaacctggtcatcgccgtgcagagcggcatcaccttcggccagttcctcgtcggcgtcttcccggccatggccgtcggcgtcgccgccaacacctgcgtcctgctctgctacttctggaggtacctcgcggcgccggagaaggaccaggaggcggggcccgacgcggtcgtggccgacgaggaggtcacctcgcacaggttcacaccggcgcggatgtcgcacgcctcgtccatgaacggcggcttcgacggcgactgcgtcagcgagcccatgcgccggagcgagagcctgggcagggccgacgcgctgaggagccgcagctacaactcggagggcgacatccaggtctccatccggtccatgcgcgcctccagcctgtcgcaggagatggtggatgtgtccaccgtcggcgacgggcccaggaagatcaccaggagcaccagccagcagcgcagcgtcatcatcgaggacgcgccgcccgaggccgacgacgacgcccacaagggcaaggacggcgacgacgacgacgtcaaggtgaagaggtggaaggtggtcgtgtggaagagcgccgtgtacctcaccacgctgggcatgctcgtcgcgcttctcatgggcctcaacatgtcctggtccgccatcaccgctgctcttgtcctcctcgcgctcgacttcactgacgcgcaggcttgcctggagaaggtgtcctactctttgctcatcttcttctgtgggatgttcataacggtcgacggcttcaacaagaccggcatacccaacgcgctctgggagctggtcgagccgtattcgagaatcgacagcgccagaggcacggcgctcctcgcgcttgtcattctcgtcctttcgaacgtggcctccaatgtcccaactgtcctcctgctgggctccagagtggcagcgtcagcggctgccatctccccggagtcgcagaagaaagcctggctcatactagcgtgggtcagcacggtgtccggcaatctcaccctcctgggctccgccgccaacctgatcgtgtgcgagcaggcgcggcgggcgcagttcttcgggtacaacctcaccttctggagccacctccgcttcggcctgccgtcaaccatcatcgtcaccgccatcggcctgctcatcgtcgtcagctactgaatggcgtcgggttgcccatctgaatggcatcgatcgagcagtggccggcacaggtagcagggctcctctcaagtctcaatctggttctgtcggaggggcctgtggtcggagcctttctcggtgaagaaacaagttatgccgaggtgtggactttgcaactttaccctgcatttgcaggacgaaaatcgttacagaggcttgtgctctaccgacccagctagacgcgccaacgtggttgtgtattgagatctttctttgtggcaacaggccggtcactctagcactcatagcaaataatatatagctgttgagtatcatatttggcacctaagcatgttcggacggttcgcccatgtg

SEQ ID NO: 130403 - DNA, 192 bp, Zea Mays
gctataactattagattttattcgtttaattgaatttcctcggataattcagatttgaactgcaagtgactcgaaaaatgtaaaaccgtaaatgcaaaaatgatattcacgttgtttagcacaagttacagccgatttaaggagcggaccggaatttttgagcactatgttcactaaacatgatcatgaacc

SEQ ID NO: 130404 - DNA, 1463 bp, Zea Mays
gtgcttgtctcgcacgttctctctcgccttccacaggcccccctcccctcgctctcccatctcatcatctcggcggctgcaataaaataaatctcgtgcaggggggagggcgtacgacgacgtggacgcaccgtcaaaggcaccaggctgagcaacccctctctctctccctcttatccccaaggcgaggagcggagcggagaggagggcccttctgcttgtttctccgctttgcaagatgtcgtccccgagcaagcgccgcgagatggaccttatgaagctgtaaggatactggacctcttggtctgtcttccaatttccctcggcatgttctgcttgttttttttttcttgatctggccttccttgccggctttcttggcatcgcaggatgatgagcgactacaaggtggagatggtgaacgacgggatgcaggaattcttcgtcgaattcaagggcccggccgaaagtaataaccctcgcgccgaatcccagcctcccccctctcgcgccgaatcccggtttctcccctccctctgcctcccggcgggctgatgatccacgtgggctggggggagatgggtttccggagaactgccaatctaccctgtcgatcgtgttcagatattcttgttcgtttagcttcatcctcgattggttgctcagttgacctgaagcgtcctttctttttcagtcatacttttttttttctctcacacgaactcgtactccatttggtaggtatctaccaaggtggtgtctggaaggttcgggtagaactgcctgatgcatacccttacaaatccccgtccatcggcttcatcaacaagatttatcacccgaatgtcgatgagatgtctggctctgtctgtttggatgtcataaaccagacatggagcccaatgtttgatctagtaaatgtttttgaagtattccttccacagctgttgctgtacccaaatccttctgatccattaaatggggaggctgcagcactgatgatgcgtgatcggcctgtttatgaacagaaagtgaaagaatattgtgaaaagtatgctaaaccagaggacgctggcatcaccccggaagacaagtccagtgacgaagagcttagcgatgacgacgacgacgacaacgactccggggacgaagctatacttggcaatcctgatccttagtctgagtaggaaacagcgcagtcagctcatcaatacattgtccaattgcagaaactgcaagtaaacaaaaactgaaaaactaaaaaaaaaacctctggatgtcatgtaaataagtgtactttgtatgttctccaatgttgtttccttcatttgtctgattgaatttctagttgctgttgcatgcctgtgctttggtttcaaggaaaggcaaaaacaaggttgtggcttcgtccattggatgtggattgcttgcctgtttaagcaacgtaagggtattttgggaat

SEQ ID NO: 130405 - DNA, 1084 bp, Zea Mays
gtgcttgtctcgcacgttctctctcgccttccacaggcccccctcccctcgctctcccatctcatcatctcggcggctgcaataaaataaatctcgtgcaggggggagggcgtacgacgacgtggacgcaccgtcaaaggcaccaggctgagcaacccctctctctctccctcttatccccaaggcgaggagcggagcggagaggagggcccttctgcttgtttctccgctttgcaagatgtcgtccccgagcaagcgccgcgagatggaccttatgaagctgatgatgagcgactacaaggtggagatggtgaacgacgggatgcaggaattcttcgtcgaattcaagggcccggccgaaagtatctaccaaggtggtgtctggaaggttcgggtagaactgcctgatgcatacccttacaaatccccgtccatcggcttcatcaacaagatttatcacccgaatgtcgatgagatgtctggctctgtctgtttggatgtcataaaccagacatggagcccaatgtttgatctagtaaatgtttttgaagtattccttccacagctgttgctgtacccaaatccttctgatccattaaatggggaggctgcagcactgatgatgcgtgatcggcctgtttatgaacagaaagtgaaagaatattgtgaaaagtatgctaaaccagaggacgctggcatcaccccggaagacaagtccagtgacgaagagcttagcgatgacgacgacgacgacaacgactccggggacgaagctatacttggcaatcctgatccttagtctgagtaggaaacagcgcagtcagctcatcaatacattgtccaattgcagaaactgcaagtaaacaaaaactgaaaaactaaaaaaaaaacctctggatgtcatgtaaataagtgtactttgtatgttctccaatgttgtttccttcatttgtctgattgaatttctagttgctgttgcatgcctgtgctttggtttcaaggaaaggcaaaaacaaggttgtggcttcgtccattggatgtggattgcttgcctgtttaagcaacgtaagggtattttgggaat

SEQ ID NO: 130406 - DNA, 2719 bp, Zea Mays
aatactctacttcctgtacgaacagttgagctcccgccgtcgttctcttctgtcaccatggatttcgctgctgacatagaccttcagagggagcgcttgaaaggcattccaagaaacaagcttgctattatctgtttgatgaattccaaccctcctattcctgatatatctgattcttatctggacaatttattatcaaactctctcccagatggaccttttggtaatagcaatataattaatcagccaaatctggtgcaatgcataccatttcagaaaaacacaacgttagtgctaacaaatgaccaggtatctcccggggtatggtacattgggtactttcatggccttggccctgctcgcacgcaatcaaagatgattagccgaggaaaagcacacttggtgagcactcgcattactgtaagaggatgtgccacttcagcattttggggaccctactgcaaccagacagttgacatgattggttgttctcaaccttcaatagataataactcaaggaatcttctagatctgaaagctgagaggaggaacagtttgtatactagagagcacaataggcgtattaatatcttatcacggccgaacggtttagtagaacaagaagttgcatctaacgccacgaccttggtgagaatggaaaactcgatcagttgttccatttccaatgactcaatatgcatcagacaaggcgacatgaagttctacttcttggatgtagtcaacctagcattgcagtttaaaattacagctacaaattttggagctctagggccatccttgatttgctacctgcggcataatgcctttcctcaaagagatctgcatgactattcaggtgatatcagccatgatcctttggttgtcaagttgccgaatattgggcgttggtatattgcaattgaaactgtcaacaaaacacagacgaatgttacagcatcaacacctgttctagacacaacatgtttctcattgaagtggcaattaactggatgcttgaatggaaaaactggaaccaattgctcttgggaggcatatgggctccatagggttcccaagagaagtccttctgtcccttttgagtcatattatgttcctactgatggaacagcatcactggaagatagtcacttctacttggaacaatttttaagcaattcatcccatgaacagtttgcatggacttatttctttttggatgttcctcaaggttcagccggtgcccttatccatgtccagcttaagtcagataaagacttgaactacgagttgtactcgaaatatggtggcttaccatctaatgatacttgggattattatgccagtaggacaagcagcagtaatggttcagtatttttttcattacagaattccacggattcggacatggatctatcgattttttatgctaaagagggaacttggtgctttggggtgaagcatccaagtgatacggcaaattctcaaacatacatgtctatatctcttcagggatgccataggaactgcaatcagaaaggtgtgtgtcattcctcagttgatgaaagtgggctgactttctacagcttctgcacatgtgatcgcgatcatggtggctttgattgcagcgatgagctagtttcccctaatgggcacatttggcagtctgtttttctaatcgcatcaaatggtgcagctattttacctgccttctgggccctccgacaaaaggcatttgcagaatggattctttacacatctagtggaatttccagtgcattataccattcatgtgatgttggcacttggtgcattctgtcttttcgtgtattgcagtttttggacttctggctttccttcatggctgtcgtgggtacgttcatatatatggctacaattgatgaagtttcaaagagagcaatgcatactgctgtatttatcctcactgctcttttagccgcaactggtgcaacaagatctgcaaatattggaattgttattgccattggttctgttggcctgcttatggggtggctattggagttctctacagcacgaaggtttatatgctggccctcacgaattaaccttaatatgcctcaaagttggccaagcctcagaactttgttccagattactctggagatggtgaacaaacggttccgttggatattcttacttttgggtttcatgacactgtcttttgcggctatcagctggaagctggaatcaaataacaactactggatttggcacagcatatggcacataaccatttatacttcttcattcttcttcctgtgctcaatgcgtgtcagcacaaggaacagcagtccagagtcaaactatgagctaacgaggcaagactctatgccgagatccgagccaagggaaacctaggtttgtttgtgtaggtacatgattatctgttgcagtccggagcgtaataacatatgaccaatcacacaagagggatttgggaaccacgtgtggtcagtctccgcagctgcatcgcatgagaactgtaaatagcacggggcaggtaaaacatctatttgtgggatgttcatcgagaacattgataatcatgtaaatgtgttgtaaaagtaaatccaaaatggaccgtctcttgaggttagctcatgcatcatgagtttggcacttgtcgtagtacgagtctcatacaagctttgatgtggggaacgtatccggtgaaaatcaa

SEQ ID NO: 130407 - DNA, 2754 bp, Zea Mays
aatactctacttcctgtacgaacagttgagctcccgccgtcgttctcttctgtcaccatggatttcgctgctgacatagaccttcagagggagcgcttgaaaggcattccaagaaacaagcttgctattatctgtttgatgaattccaaccctcctattcctgatatatctgattcttatctggacaatttattatcaaactctctcccagatggaccttttggtaatagcaatataattaatcagccaaatctggtgcaatgcataccatttcagaaaaacacaacgttagtgctaacaaatgaccaggtatctcccggggtatggtacattgggtactttcatggccttggccctgctcgcacgcaatcaaagatgattagccgaggaaaagcacacttggtgagcactcgcattactgtaagaggatgtgccacttcagcattttggggaccctactgcaaccagacagttgacatgattggttgttctcaaccttcaatagataataactcaaggaatcttctagatctgaaagctgagaggaggaacagtttgtatactagagagcacaataggcgtattaatatcttatcacggccgaacggtttagtagaacaagaagttgcatctaacgccacgaccttggtgagaatggaaaactcgatcagttgttccatttccaatgactcaatatgcatcagacaaggcgacatgaagttctacttcttggatgtagtcaacctagcattgcagtttaaaattacagctacaaattttggagctctagggccatccttgatttgctacctgcggcataatgcctttcctcaaagagatctgcatgactattcaggtgatatcagccatgatcctttggttgtcaagttgccgaatattgggcgttggtatattgcaattgaaactgtcaacaaaacacagacgaatgttacagcatcaacacctgttctagacacaacatgtttctcattgaagtggcaattaactggatgcttgaatggaaaaactggaaccaattgctcttgggaggcatatgggctccatagggttcccaagagaagtccttctgtcccttttgagtcatattatgttcctactgatggaacagcatcactggaagatagtcacttctacttggaacaatttttaagcaattcatcccatgaacagtttgcatggacttatttctttttggatgttcctcaaggttcagccggtgcccttatccatgtccagcttaagtcagataaagacttgaactacgagttgtactcgaaatatggtggcttaccatctaatgatacttgggattattatgccagtaggacaagcagcagtaatggttcagtatttttttcattacagaattccacggattcggacatggatctatcgattttttatgctaaagagggaacttggtgctttggggtgaagcatccaagtgatacggcaaattctcaaacatacatgtctatatctcttcagggatgccataggaactgcaatcagaaaggtgtgtgtcattcctcagttgatgaaagtgggctgactttctacagcttctgcacatgtgatcgcgatcatggtggctttgattgcagcgatgagctagtttcccctaatgggcacatttggcagtctgtttttctaatcgcatcaaatggtgcagctattttacctgccttctgggccctccgacaaaaggcatttgcagaatggattctttacacatctagtggaatttccagtgcattataccattcatgtgatgttggcacttggtgcattctgtcttttcgtgtattgcaggtaagctacttagcacccacttgttgaatgctagtgtaaagattgttgggcatggtactggtattcatcagtactagtcatgtctatccaaatcaagtttttggacttctggctttccttcatggctgtcgtgggtacgttcatatatatggctacaattgatgaagtttcaaagagagcaatgcatactgctgtatttatcctcactgctcttttagccgcaactggtgcaacaagatctgcaaatattggaattgttattgccattggttctgttggcctgcttatggggtggctattggagttctctacagcacgaaggtttatatgctggccctcacgaattaaccttaatatgcctcaaagttggccaagcctcagaactttgttccagattactctggagatggtgaacaaacggttccgttggatattcttacttttgggtttcatgacactgtcttttgcggctatcagctggaagctggaatcaaataacaactactggatttggcacagcatatggcacataaccatttatacttcttcattcttcttcctgtgctcaatgcgtgtcagcacaaggaacagcagtccagagtcaaactatgagctaacgaggcaagactctatgccgagatccgagccaagggaaacctaggtttgtttgtgtaggtacatgattatctgttgcagtccggagcgtaataacatatgaccaatcacacaagagggatttgggaaccacgtgtggtcagtctccgcagctgcatcgcatgagaactgtaaatagcacggggcaggtaaaacatctatttgtgggatgttcatcgagaacattgataatcatgtaaatgtgttgtaaaagtaaatccaaaatggaccgtctcttgaggttagctcatgcatcatgagtttggc

SEQ ID NO: 130408 - DNA, 1304 bp, Zea Mays
cacaaaccctagagcccgaggacaccagatctgttctcttcttcgcttgtcccaaccatgcggattcgtaggagaacatctcacgtccttggctccggctactctacacctgctactccgcctcctatgcttgtaactccaccaccgatttcggaaccgtgtttggagccgcttacatctcacattcacgacgacttcttgagccctactacaacccgagagagtctctgcaagctcagtcgctcaccatgggacctcttggatgacttgtccctctcggatcctcaggaggtggatgacctccttgatggttactatgtaaacatggactcccatgcatggagcctctcctcggccaccatgcccgtcacctccgtgaagaatgagaagacgacgaccatggccgcagctagcagtgagagagcacaactacagatactgaataagaatacaacattgaaaaaggctacagtgggggagaaaagggtcagagagatccagaaccaaaagactgcaaatgtgaagaaaaaagagggtaaggaagaggcagcacgtacctggcagtgcaagaagaatgatggcaaggggtggaactgccgtcacaatgcgagtcaccccaactccctctgtgagtaccacttgatgaagaagcgttcctacttgaacttacagcatgcttcgccagcggaggaagataaggccatggcggcagcaccaacatcagcagcctccaagccctccagcagctccaacacacagaagacgaagcttcccaacaactacgatgcaaacgagggcttctactactaccacgggtttcgcccgtctcgtggcaagaggcgctgcaggaaccatccaaagaatgatgaagaggtgaaggtggaaccatccaaatctgcttctcttccgagtcatgccaaagttgagattgaagatgctagcacgagcaatggggctacagctggcggtgatgacgtgtgcaacgacaacaactctggccgcggcaacgtcaacaacatggatcagaggaaccaaaatccattgaagctcccgagaaagccagtgaaggtgcggttgctcatgtcgctgtgagcaaccaaaagcagccaggtgcttgcgcgttgcacatcgatggcagaagatgaagtttggtctgtctgttttactttgaattgagactctcgtagctcatgcatcatccccctatcgttgttggtttaaattggcttataagccgtttgcctcttgcatcttgacttgttgtttctggtaataatgctactgacagcaggtattttgagttc

SEQ ID NO: 130409 - DNA, 399 bp, Zea Mays
gacccttatgaacacacatatgatgatgaaatggatgcacacacatctgatgatgaaatggatgcacacacatctgatgatgaaatggatgcacacacatctaatgacgaaacaggtggagaattgcttgttgctctttatgctgttgacatttggggcaggcatttcagtcgggctcctaggagaacattggtcgaatctggtattcaatgggttcaaagaacgctggagattagtaacgactgttttgacatgtttcggatgcgaagaactgtttttcgacgattgcatgacacgttggtacaaaattatggtctgcttccaagcaggggtgtcagtactatggaagctcttggcatattcttgtgggcatgtgggggtccacaatcgtttaggcag

SEQ ID NO: 130410 - DNA, 225 bp, Zea Mays
atgaacagcagcaaatggtgcaccaaccgtgctagttcaaggcatttgtctctaaaagcacttcttgtgcacaatggacggccccgtctcatcatactcgcccttggtcacatgctggttttgagggaaaacgaccttagccaatatcgcaccacccagccaggccgagtaccttgctaggttctcgggcatgtattcaggaggctggaggaaacgttgcccaag

SEQ ID NO: 130411 - DNA, 412 bp, Zea Mays
ccttccctcccgacgaggtaacctctgcctttgattccgttcgactatgcccgacctcagtctctgccgcatccaccgccgtggcctcacccacggtcgccttcccgatccgggcgagcctcgccgtcatccccaccgtcgcgcccttgtcggcctccccgtcgctgcgcctcgcatcggcgtcgtccatcgtcgatgcgtccgggtcctcctccccggcctccgcccactccgcaccgcgcctccttttttcctcttctgccctggcgcgtgtttgatgtggcgcagtgtttggtcgtgcagaacgctgctcgcgagcaggagcgaggagtacatgcttctattccggctgcctcccgacaaggtaattggatgtgcagccaactggtgccgggtgatccctagctcctcc

SEQ ID NO: 130412 - DNA, 381 bp, Zea Mays
atggatcttgatcaggacgccgaggcggcggagcgtgagcttgaggatcacaacgagcgtttggatgagttggccttgtttgggattggcactgccactggcagcaatgttgatcccgtagatgttgatgcggcgcctgtgactgcctcctcgagccccactgccactggtggtagcactgcccgtgacaaccggccgagaaagaggctagcgacatctagggtttgggctgacttcgaggaagtaactgggctcgacgacaaagttgtgtctgaaaggatcaagaagcccaagagaaggttgaatcggctaatctttggagataacgaactattggtagacgagaagcaggagacaagaacagacctacacaccatgtag

SEQ ID NO: 130413 - DNA, 1339 bp, Zea Mays
ctgccctccttatattagcatgcttcctccgctccaataggctacggcagccttggctccctccggcctccgccgtgcctcttcgcctccgacgcggcttccgggcgccttctcgccgcttttcgctcctcagctgatggagcccgcgccgactgaacaagactatggctttcttggcgacctgcagctcagcaccacgattgacagtccccacatactacagatagataatcgtggagtgcgcgatgagcatacagtgatgatcctacaactgttggaagggccccaagatgagacaaacctagatgattggttatcaggtgatttgcatccatccccattgttggagacaaatgcccattaccagccaagatgtaggaaaagcggccgaagaggagctcggaggagaaggacgtctccatgggacccgatgttctttgagagacctgttagcagggagtactccacagccaaaggtaggaaaaacaatagccggtggacttctaaagaagtggagagactggcacgaggcgtctcaaggtttggtgtcggacaatggaccctgctgaagcaggaatttttcaaaagctcaattaggacagcagtaaacctcaaggacaagtggagaaacctgctgaaaggttaccaggaaaactcacagaaaagtacgctgctgtatcttgagccatcattggttgaaaagatcaggaacctggcagcaaaacagccatacccatatagaaggcacagataggaactgcgactttaatccttgtatagaccctacaggacatcacgttttacctatcgtagaaacttgtagctagcttatgaggaaaacaacttgtagctggcttaacactgttttccttgcccatcagttggtagaagaaaacattatcagcgttcccgtctctctctctctgtgtgctaggttctgctcgtgtagaatcttgaatatttgaaccactctgaatatcaaatgcttcatggcagttattgcagttgaaggcttgcagatactactccccagaaagtaaaaaaaatgcagtaagatcattttcaaagatacggaatgggggtgccaaactgccaactggccagggccagtttggaaaggaatccagtagcaggatgtgaatcttctttttcagttttgtcttcttcttatggctttttggaaaggttacagctcttttttttattttgtttttaatgtatcgaactcccaactgaacaacttagaactctgaagtgtctgcgtgtgctgtattgttttacagcttacgtctgtgtatgcagtgtgcaaccaaagttcataatccgaccaagtttgtga

SEQ ID NO: 130414 - DNA, 216 bp, Zea Mays
ggtgttatcaacattgagatgtttaaggatcagcatgacccaaaccgtaaccgtggtttcctctttgttgagtattacaaccatgcctgcgcagactatgccaggcagaaactttcatctccaaacttcaaggttgatgggagccaattgactgttagttgggctgaacctaagggttcaacagatgcttcatctgcggctgctcaggtagacatt

SEQ ID NO: 130415 - DNA, 1809 bp, Zea Mays
ataaatttagccacaggcacacaagatagctagctaggaacaatggagcagaaggttctcgtcgccgtgggcgtggccgtgctactcgtcgtcgtcctctccaagctcaagtctgtgctcgtcaccaagccgaagcttaacctgcccccagggccatggacgctaccattaataggtagcacccaccacctggtcaccagcccgtcgatctaccgggcgatgcgtgatctcgcgcaaaagtacgggccgctgatgatgctccggctgggcgaggtgcccacgttggtggtgtcgtcgccggaggccgcgcaggcgatcacgaagacgcacgacatcgcgttcgccgaccgtcacatgaacaccaccatcggcgtgctcaccttcaacggcaccgacctggtgttcggtccctacggcgagcggtggcggcagctccgcaagatctgcgtgctggagctgttcagcgtggcgcgcgtgcagtcgttccagcgcatccgcgaggaggaggtggcgcggttcatgcagagcctcgcggcgtccgccggcaccgtgaacctgtcgaagatgatctcgagattcatcaacgacaccttcgtgagggagtgcatcggcagccggtgcaagtaccaggacgagtacctggacgccttcgacaccgcggtccggcagacgtcggtgctgaccgtggccgacctgttcccgtcgtcgaggctcatgcaggctgtgggcaccgcgccacgcaacgcgctcaagtgccgcaacaggatcacgcgcatcctggagcagatcatccgcgagaaggtggaggccatgggccgtggcgaaaagacggcgcacgagggcttaatcggtgtcctgctcaggctccagaaagaggctaacttgcccaccctgctcaccaacgacaccattgtggcgctcatgtttgacttgttcggcgccggcagcgacacctcgtcgacgacactgaactggtgcataacggagctaatccggcacccggcggcgatggcgaaagcccaggccgaggtccgggaggccttcaaggggaaggcgagaatcatcagcgaggacgacctcgccggggcagggcttagctacctgaagcttgtgatcaaggaagctctgaggatgcactgcccactgccgctgctgctcccacggctgtgccgtgagacgtgccaggtgatgggctacgacatccccaagggcacggccgtgttcatcaacgtctgggcggtttgcagggacgccaagtactgggaagatccagaggaattcaggccagagcggttcgaggacaccaaccttgagtacaactacaaggggacgaactacgagttccttccgttcgggtccggccgccggatgtgcccgggagcgaaccttgggctggggaacattgagctcgcgttggcgagccttctgtaccactatgactggaagttgcctgacggagtgaagccacaggacgtccaagtttgggagggcccaggactgatagccaagaagaaaacaggcctgctgttgcgcccggttacctgcattgcttttgcttgctccagcggctagctgatgcgtaataaattaacgacaagcccaacatactttggagaactggacgacacttgtcgcttcgacggtgctgtaaaaattcaacaaatactactccccccaagcactaggaagatagtagagtgttgtcttatacttggaagtctaagtaatctacaaatatagaagttaggccttccttactatcgtggcctgttatggttagttaagataagatcctctacagttgctgat

SEQ ID NO: 130416 - DNA, 221 bp, Zea Mays
ttttattttgttttttcattataccttctaattaaaagatttattcacccaaccaatttcatatttatgtttacgagatttttgtgaataaaacgagaccacacatgtattatatattttcaaatagtttatttaatcacaatgactgaccctaatcataaaatgactgacattgataagtacaaactaatgttgataagtacaataactgaccctaatca

SEQ ID NO: 130417 - DNA, 1252 bp, Zea Mays
cattgccacaccctgactccgccatcaaaaacatctccaaaacctcattccgcaatgagacccgcagccgcagcagccaccgctaccaccgccgcgctccgtctccgcgccgcctccctctcgccttctctcgctgcctccctctcgccttctctcgccgccctcctttctcatcgtagatcctccctcattcttcctccgctgcgccgcatctgctcccttgcgcctccccactcctccgccgcccccaattcgcagcccccgccgcagttgctctctcccatcatggacgcgcagttcgtgctcttccgcgcgcagctcgacgagtcttccaccctccgcgaccgcatccgtgccgtcgtcgccgagattgagtccgcctcccgcgtcgccaccgccgcgctcctcctagtccaccagcccgtccccctggcagatgtgcttgtgaaagccaaggcgcaggtagaggtgatcaaggggttgtacgcgcgcctggcggaagtcctcaaggaatgccctgggcagtactacaggtaccatgctgattggaggactgagacacatatggtagtgtcgatgcttgcattcatgcactggctggagacaggtggcctactcatgcatgctgaagcccaggagaagctagggttgtgctctggggagtttggccttgatgttgaggactacctgacaggactgtgcttcatgtccaatgaatttcctagatttgtagtaaatcgcgtcactgctggcgactatgactgtcctaaaagggttttgggcttcttgaccgatcttcatgcttcgtttaggatgctgaatctgcgcaatgacttcttgcgtaagaaatttgatgggatgaagtatgatttgaggagggtggaagaggtctactatgatgtgaagatccgtggacttgtacctgcgtagttgaaacaagagacttagaatccttggtaatgttagattgttaacataccgtggtttggctttttgtcatccataacgtgttcatctagctaaaatgtgaaaaatattctgttggagcgtatgtgttatggactgaacttgggggcactcgaatgaccttgctcatttcttttactgtggcaccacatgttcatgcatttgaccccgggatgtagatcgagttagatttcgtgaactctggagagaataatttttattggctcactttgcctttcacaaatcttcatacttatctaatggtgatatacatgtttggattttc

SEQ ID NO: 130418 - DNA, 783 bp, Zea Mays
cacaccctgactccgccatcaaaaacatctccaaaacctcattccgcaatgagacccgcagccgcagcagccaccgctaccaccgccgcgctccgtctccgcgccgcctccctctcgccttctctcgctgcctccctctcgccttctctcgccgccctcctttctcatcgtagatcctccctcattcttcctccgctgcgccgcatctgctcccttgcgcctccccactcctccgccgcccccaattcgcagcccccgccgcagttgctctctcccatcatggacgcgcagttcgtgctcttccgcgcgcagctcgacgagtcttccaccctccgcgaccgcatccgtgccgtcgtcgccgagattgagtccgcctcccgcgtcgccaccgccgcgctcctcctagtccaccagcccgtccccctggcagatgtgcttgtgaaagccaaggcgcaggtagaggtgatcaaggggttgtacgcgcgcctggcggaagtcctcaaggaatgccctgggcagtactacaggttaattgcttcatccatattgatacatctgtttccagggtgatagcaatcgggttgtcgaaagcgatgtgtcatggttcatgtgtttggagggttgtggcttaggtaccatgctgattggaggactgagacacatatggtagtgtcgatgcttgcattcatgcactggctggagacaggtggcctactcatgcatgctgaagcccaggagaagctagggtgtatgtcaaggctctgtccattgttacagtagttg

SEQ ID NO: 130419 - DNA, 2538 bp, Zea Mays
atggcgagccaaggggagccctcggcctctgcttccgatccgaaggagaagaaggacttctcgacggcgatcctggagaggaaaaagtcaccgaaccgccttgtcgtcgacgaggccaccaacgacgataactccgtcgtcgcgctgcaccctgacaccatggagaggctgcagctcttccgcggcgacaccgtgctcctcaagggtaagaagaggaaagacactatttgcattgtccttgcggacgaaacctgtgaggagccaaaggttcggatgaacaaggttgtccgccagaacctaagggtgaggcttggtgatgtggtttctgtccaccagtgccaggatgtgaaatatgggaagcgtgtccacattcttccaattgatgatacagttgaaggcattacagggaacctgtttgatgccttcttgaaaccatatttcctagaagcatacaggccgttgaggaaaggagaccttttccttgtcagaggaggaatgagaagtgtggaattcaaagtgatagagactgatcctgctgaatattgtatcgttgcgccagatactgaaatattttgtgatggggagcctattaagagggaggatgaggagcgtcttgatgaagttggttatgatgatgttggtggagttagaaagcaaatggcccaaatcagagagcttgttgagcttccactacgccatcctcaacttttcaaatctattggtgtgaagccaccaaagggcatattgctgtacgggccacctggttccggaaagactcttattgctcgtgctgttgcaaatgagactggagcctttttcttcctgatcaatggtccagagattatgtcaaagctggcaggggagagtgaaagcaatctcagaaaggcatttgaagaagcagagaagaatgctccatctatcattttcattgatgaaattgattccattgcacccaagagagagaagaccaatggagaagtagagcgtcgtattgtttcacagctactgactcttatggatggactgaaatctcgttcccatgttattgttatgggtgctacaaaccgaccaaacagcattgatcctgctcttcgaagatttggaaggtttgatcgggaaattgacattggagttcctgatgaagttggccgtctcgaggttctccgcattcacactaagaacatgaaactagctgaagatgttaatttggaactcatttcaaaagatacccatggatatgttggtgctgatcttgctgccctttgcactgaggctgctcttcagtgcattcgtgagaagatggacatcatagatcttgaggatgagacaatcgatgcagagatattgaactcaatggctgttacaaatgaccatttcaagactgcgcttggaacaagcaacccatctgctcttcgtgaaactgttgtcgaagtcccaaatgtctcttgggaggatattggtgggctggagaatgtcaagagggagctccaggagactgttcaatatcctgtggagcatccggagaagttcgagaagtttggcatgtctccatccaaaggagttttgttctatggtcctcctggttgtggtaagaccttgttggcaaaggcaattgccaacgagtgccaggctaacttcatcagtgtcaagggtcctgagttgcttaccatgtggtttggtgagagtgaagccaacgtccgtgaaatttttgacaaggctcgtcaatctgctccttgtgtcctcttctttgatgagcttgactcaattgctactcagagaggaagcagtgtgggtgatgctggaggtgcggctgatagagtgcttaatcagctactgacagaaatggatggcatgaatgccaagaaaactgtgtttattattggagctacaaacaggcctgacatcattgaccctgctctgctgaggccagggcgtcttgaccagctgatctacattccactgcctgatgagcagtctaggctccagatcttcaaggcctgccttaggaagtcccctgtggcgaaggatgtggacttgaatgctcttgctaagtacactcaagggttcagtggagcagatatcacagaaatttgccagcgtgcgtgcaaatatgcaatcagagagaacattgagaaggatattgagagggaaaggcggagaaaggacaaccctgaggcgatggaggaagacgaagtggatgagatcgctgagatcagggcccctcacttcgaggagtcgatgaagtatgctcggcgtagtgtcagtgatgctgatatccgcaagtatcaggcgtttgcccagacattgcagcagtcccgggggttcggcacaatggggaatagggatgcttatctcattaatttggagagctgggacgcttgtgtcgttaatttacagcgccagggaatagttgctccacttgaatcggacattgtaatggttggtgtacctgcattggaggtgttccaggtccagcggtcttccttcctggactggaatcacctagactccttttcaaaagggcctgatgtcggctga

SEQ ID NO: 130420 - DNA, 1644 bp, Zea Mays
cgctcggaatttctttttcggtctattactggatttccaatcttgttgaaattgttaaccttggaggcttggagcagatacaagtatacacttcagccaaaggggccaaaggtagacatcacatcaaccctgcacaacaataatgcccaccgtacacggcatacacgcttcgatcaagattgaagacagttttttatgtgacgcacacgatacaaggcgtacatcgcacacgtattctggggctacctcagctgccgtcctcgagctttcggatcagcggcctccgcaccggcgcttcagctcctcgacgaactcgtcgaagttgtgccgcgacgaaccaccggacgccacggcagcctcgagtgtgcccctgagcttcttcacctgctccctgagcttgaggccgtcttccccgcccatgaccgcttcaatccgcgccctcacctcgtcggcgcgcaccgcgccgcggtctccgacggacacgccggcacgccactcccgcgcgacgaggcggcggttggtgagctggtccgtgagcagcgggaagcacagcatgggcacgcccgcccacacgctctcgaggacggagttccagccgcagtgcgtgaggaaggcgccgacggcggcgtgggagagcacctccacctggcagcaccactggaccaccaggccgcgccccgccgcggcctcggcgaacccctcgggcagcgggtccgggtcgtcggagctcacgatgtccgggcgcatcacccacaggaaccgggcgccgctggccagcacgccgcccgcgatctcgcgcagctcctgcttggtcacgtgcgcgtagctgccgaaggagatgtagagcacggacccgaccggctgcgcgtccagccaccgggagcagtcggactccgcccacatggacgtggccacggcgctgcgcgcgaagcccgccgggaggatgggccccacggcgtagaagggcctgtaggcgcgcagcgccgcgatggtcgacggctccagctcctccacggtgttgcagagcacgtagtcggcgccgcgggcctcgtcgaacgccttgaagatgatgcggtggacgatggaggtggtgtccgtctcctgcaggtacgacatgagctcgctcggctcgatggccgccacgcccgggatgtaggtgatcgtgtccttgcgaggctctgcacatcgatgatgcatggaattgggacggacatcagcgaaacaaacatggcctgttttgccacgatcgaccaagatggcatatgcacgacgctgtttgtgtgtgtgtggttaccgttgcatctaaagtgtccgttctgggtgagcaagtcgatgtggtagtagaggttgaagatgagcgccggctcggtccagaacgacacatacgcgatgccgaggcgcctggccagagtggcgggccacacgaagaaggtgtcggcgacgaggaacgtggctctgggttcgacgacgacgcggcggagcagctgctcgacgtgcgcgggcagcgcgtggaacagagcgcccatgaagtcgtcgtggttgagcgaccggtcgaagcccacggggaggccgtcgctcaccagcgcgtatgacacgtcgcccagcggcggcggcggcggcccctcctcctgcgcccgagcgcgc

SEQ ID NO: 130421 - DNA, 1442 bp, Zea Mays
atgggagaggagaagaagacgggcaagggcggcggcggcggcggcggcgacaagaagaaggacgccggcgctggggccgcgccgcagcccatcgtgttgaaggtcgacttgcattgcgccggctgcgccaacaaggtccgcaaggccatcaaagcgcgcaccaggtgcgtacggggttgccggcggtacgcagtctctttcttgcggtggagggggggggggggcgtggagtcggtgacgccggacatggcggcgggcaaggtggtcgtgaccggtccggcggacgcggtgcagctcaaggagcgcatcgaggctagggccaagaagcccgtgcagatcgtctccgccggcgccggttcgcccaagaaggacaaggagaagaaagctgacggcggcgagaaaaatgcggccaaagagaagggcggcggcgatgcagagaagaagaaggccgacaagaagaagggaggcggtgatggaggagagaaaaatgccgacaagaagaagggcggcggcggcggcgataagaaggccgacaaggagaagggcactggcaaacccaaggaggaagaggaggaggaggagaagcccaaggaacccaaggaggagacggttacgctcaagatccaactgcactgcgacggctgcatggaccgcatcaagcgccgcatctgcaagatcaaaggtgtgaaggatgtggcgttcgacgccgccaaggacctggtgaaggtgacgggcaccatggacgccgccgttctgccggcgtacctcagggagaagctcagccgggacgtcgaagtcgtcgcgcccggcaagaaggacggcggcggcggcggcgacaagaagggcaagggcgcaggagacggggcagagaagaagaacaagaagaaggacggtggggccgaggggaagaacgatagagccgcggccgcggccgcggccgccgcctccgcatcggtggcgccgattcccttggccgacgccggcggcatgtacctgatgcccccgcactacgggtacatgccgtacccgccggctcccggcggctactacggcgccgctccaccgcccaaccacgccggcttctacgccaacgccggtgtccattacccgcccccgacagcctacggctacggccccgcccacctccacgcgccccagatgttcagcgacgagaaccccaacgcctgctccgtcatgtgatctctcgttcgttcgctcgctccgccggtttgccatcggcgccccttcttccgtcattgtgtcagaccaagaatcgtggcttgggttttaacagtcggtttaattaattatcagttagtgttagccagtttaatcattgctccgagttcattaccagcagacctgtgtaaatgacagcagcgagtctcgctccgccccgttgtaatgcagcgtcatgtgtactttagccggacccgacaaaa

SEQ ID NO: 130422 - DNA, 1969 bp, Zea Mays
gtattctctcctcccgcattcacttgttgcaaccatcgccttctccctcgccgcgagagtgctcaacctggtgtcctggataaggcaacgggataggaagcgataattggcggagagtgaaggttcccgtcctaggccgaagtcctcgttgttgccggaagaagtaccgcatgacttcgccgggtagcggcggatcgacgactgcaagttatgtagccaattcgcccccctacttgtagatctgggtttttgtaaagtttatccggaagctacttgtagatctgggtttttgtaaagtttatccggaagatttgtatggattggggtagatccgaagtacatatccatcccacgcttggggttttagggtatgacactcgcacctttggattgtagtagatgttcgtccgtatgcaaccattttgttgttgtcgtcggctgtttcgactagaaaaatacaaaccctaggatattacactacgatttagtttcatatctttcgcttcaaatgcggcaaagtgtagttaacatctttttgaatcactgctagatgtcctacactccaaaagacgccctggaatgggctgttcgggagatggaggaccacacctgtcaaattaggtagcttgtcggcagtgctacaagcacaccaatgccaaccgagcatctgaaatgtgttaacctcaagatttttaagctcgcggactggcttgacaaggtttcaatcctatgcttcgaggttgtcgagaaggatggaagcaaccacctcgatgacaacaccacagaggaagaacttgaagcagctcgtgagatagaacttgaaaggctccccactcccgaaactcttaaaaaccttgaggacttttgtgaggaatggggtatgcagtatgacaacgatcaatctcgtgggatcaactaggagtaattgtagaataatgtaaggttcagagagatgtagcacatggaacttgttatgtgtcaatgtaaaatggtaatgtgaactctagtgtcttgtggagtcaatgtgaaccatgaagtgccatgtttggagttatgaactacatgcttatgaaatgatgatggcttcttccgattttgcattgtgttgttgtgtttaatacaattgcagtcgtactcattactacaaaattttgcccatttatcactcaagtttcctatggacaactcttggcctcgttttccatttcacagtatgtacgaagtaacctatactccaagattggaactgtcaacagatcaagcatggaacaactaggaagggttctagaatcctaacgaggcaatgcaaggcatacaagaccttgttcaggatgagctgccgccaatgagttctaaaaagaaaacagttcacaagaggctcaaaaatttcactgcaactgaggatgaatgtcttgtatcaacgtacttaaatgttagcacagacccaattgtgggtgtgaaccaaccaataaaaggctactaacagaggatcgctaactactgcgaagaacacaagaaaactccagtttctccgaccatatcctccctacagcattggtgggcagacattcaaagggacacttcaaggttttgtggattctttgcccaagttgaaaggcgcaaacagagtggtgtgaacgaatctgacaaggttggtttatggtttggttactctatacaactggcagtgcattcaagttcatgcattgctggttgatgctaaaggacgaaatgaagtggacaactcaattggtcgggcgtcaactaattctgagtccaacaaggcaacaagtgagaagccatgcactgagaaccattaacaacataactcacttcgggtccattccctgtggagaggtcgtcgaacacgggagagatataacaccctaaatctaggaaaaataaaggatgctttaaatatgtgattatggcaagatttgtttatttaaattcatatttgagaacataa

SEQ ID NO: 130423 - DNA, 2064 bp, Zea Mays
gcgggatgcatttcgcatctccttcggtccttccccagcccatccggtacggagccaaatctctggccgaacgaaaaagcgcggagatttccagggagaagcagtgttgcagacgcccggattcggggcgcgtcgttcctacatagaccgcgagtcgcctcctgcacctgcgggattcgccgcctgtcccagatccaagaaacgcataacgggcgtggagccagttgggccagggaagatttaaccagtcgggcccggaaggagcctaagggttggatctgatgctaccaggtcgctgagcatcgctactgaagggggcagcttctgattccggcagatggctcctgaaatgatggaggaggggcaatcagcttcctataccgtggatgacgctctcttgtcatcaggttttgggaggttccagatattgattctttcatatgctgggattggcttaattgccgaagcgatggaaatgatgctgctatcatttgttggtccatcagtacagctagaatggaagcttacttctcatcaggaaagcatgattacaagtgttgtttttgttgggatgctgattggagcttactcgtggggtgtggtttcagacaactatggaaggaggagaggctttctctttacagccattatgacaagtggagctggattttttagcgcttttgctccgaactatctatcattaatttccctgagattcttagttggtattggtttgggaggaggacctgttctgggatcttggttcttggaatttgttcctgctccaactagaggaacttggatggtggtattttctgcattttggactgttggaacaatcttggaggcatctcttgcatggacaattatgcccaagtttggttggaggtggttgttagcattatcagctgttccatcttttctcctgctgctattttatgccattacaccagagtcaccaaggtttctttgcatgaaaggccggactactgaggctgtggatatattggagaaaatggcaagactaaacaatgtacaactaccttctggtaggcttgtttctgacaaaaatattgagctagatgaagtttcaggatcttcagagtccacgacacttctggctggtgccgaagaaagtgacaacctaaatgaggatcagggttctgatttcggaggtattaagtccgtcggcaagctactcgcaccaaaactgatcagagcaaccctgcttctgtggatggccttctttggaaatgcgtttgcctattatggcattgttcttctgacatcagagctcagtaatggaaacaggatatgtgccaaagaggatgttgaatcagttcattcaaccaatgcaagcctatataagaatgttttcatatctagttttgcagagatcccagggtcatttctgtcggccatgatcgtggatagatttggtcggaagcgttccatggcgtcgatgctcttcactagctgcgttttcttactcccactagtgttctcccggacagatatactaaccagaatctccctgtttggtgcccggctctgtatatctgccagcttcaccatcgtatacatatatgctccagagatttacccgaccgcggtgaggacgacgggcatcggcatcgcgagctcagtgggcaggatcgggggcatcctctgcccactcgtcgctgtcgccctggtgcacagctgccagcagacgacggcgatcctcctcttcgagcttgtaatcttcctctccggcctggccgtctcgttcttccccttcgagacgaaggggtgtaggctcaacgacaccgacgtggacatgaactgatccggtggctgggtgtagtgtgactctcagagcaattttcctgtggcggttaccggaattgcatatggattggatatttttagcaacacgtatacgtgttagactacccgtctagggtttatgttattccccttgtaatgaccgttataccccctgtgtaatgggcctggcccagttactcactctattaatatcactcccaacccctgtttagggtatgggttcctattccaaca

SEQ ID NO: 130424 - DNA, 1868 bp, Zea Mays
gcgggatgcatttcgcatctccttcggtccttccccagcccatccggtacggagccaaatctctggccgaacgaaaaagcgcggagatttccagggagaagcagtgttgcagacgcccggattcggggcgcgtcgttcctacatagaccgcgagtcgcctcctgcacctgcgggattcgccgcctgtcccagatccaagaaacgcataacgggcgtggagccagttgggccagggaagatttaaccagtcgggcccggaaggagcctaagggttggatctgatgctaccaggtcgctgagcatcgctactgaagggggcagcttctgattccggcagatggctcctgaaatgatggaggaggggcaatcagcttcctataccgtggatgacgctctcttgtcatcagtacagctagaatggaagcttacttctcatcaggaaagcatgattacaagtgttgtttttgttgggatgctgattggagcttactcgtggggtgtggtttcagacaactatggaaggaggagaggctttctctttacagccattatgacaagtggagctggattttttagcgcttttgctccgaactatctatcattaatttccctgagattcttagttggtattggtttgggaggaggacctgttctgggatcttggttcttggaatttgttcctgctccaactagaggaacttggatggtggtattttctgcattttggactgttggaacaatcttggaggcatctcttgcatggacaattatgcccaagtttggttggaggtggttgttagcattatcagctgttccatcttttctcctgctgctattttatgccattacaccagagtcaccaaggtttctttgcatgaaaggccggactactgaggctgtggatatattggagaaaatggcaagactaaacaatgtacaactaccttctggtaggcttgtttctgacaaaaatattgagctagatgaagtttcaggatcttcagagtccacgacacttctggctggtgccgaagaaagtgacaacctaaatgaggatcagggttctgatttcggaggtattaagtccgtcggcaagctactcgcaccaaaactgatcagagcaaccctgcttctgtggatggccttctttggaaatgcgtttgcctattatggcattgttcttctgacatcagagctcagtaatggaaacaggatatgtgccaaagaggatgttgaatcagttcattcaaccaatgcaagcctatataagaatgttttcatatctagttttgcagagatcccagggtcatttctgtcggccatgatcgtggatagatttggtcggaagcgttccatggcgtcgatgctcttcactagctgcgttttcttactcccactagtgttctcccggacagatatactaaccagaatctccctgtttggtgcccggctctgtatatctgccagcttcaccatcgtatacatatatgctccagagatttacccgaccgcggtgaggacgacgggcatcggcatcgcgagctcagtgggcaggatcgggggcatcctctgcccactcgtcgctgtcgccctggtgcacagctgccagcagacgacggcgatcctcctcttcgagcttgtaatcttcctctccggcctggccgtctcgttcttccccttcgagacgaaggggtgtaggctcaacgacaccgacgtggacatgaactgatccggtggctgggtgtagtgtgactctcagagcaattttcctgtggcggttaccggaattgcatatggattggatatttttagcaacacgtatacgtgttagactacccgtctagggtttatgttattccccttgtaat

SEQ ID NO: 130425 - DNA, 2096 bp, Zea Mays
atgaagatggtaatctcagtcaaagcgcgggatgcatttcgcatctccttcggtccttccccagcccatccggtacggagccaaatctctggccgaacgaaaaagcgcggagatttccagggagaagcagtgttgcagacgcccggattcggggcgcgtcgttcctacatagaccgcgagtcgcctcctgcacctgcgggattcgccgcctgtcccagatccaagaaacgcataacggttcgcttctccggctgtcctcgcatggcgctcggcagacccgttgcttctcgtgtgcgcgtaggctgattccgtgtgcctgctccttgtctggatttcttagggcgtggagccagttgggccagggaagatttaaccagtcgggcccggaaggagcctaagggttggatctgatgctaccaggtcgctgagcatcgctactgaagggggcagcttctgattccggcagatggctcctgaaatgatggaggaggggcaatcagcttcctataccgtggatgacgctctcttgtcatcaggttttgggaggttccagatattgattctttcatatgctgggattggcttaattgccgaagcgatggaaatgatgctgctatcatttgttggtccatcagtacagctagaatggaagcttacttctcatcaggaaagcatgattacaagtgttgtttttgttgggatgctgattggagcttactcgtggggtgtggtttcagacaactatggaaggaggagaggctttctctttacagccattatgacaagtggagctggattttttagcgcttttgctccgaactatctatcattaatttccctgagattcttagttggtattggtttgggaggaggacctgttctgggatcttggttcttggaatttgttcctgctccaactagaggaacttggatggtggtattttctgcattttggactgttggaacaatcttggaggcatctcttgcatggacaattatgcccaagtttggttggaggtggttgttagcattatcagctgttccatcttttctcctgctgctattttatgccattacaccagagtcaccaaggtttctttgcatgaaaggccggactactgaggctgtggatatattggagaaaatggcaagactaaacaatgtacaactaccttctggtaggcttgtttctgacaaaaatattgagctagatgaagtttcaggatcttcagagtccacgacacttctggctggtgccgaagaaagtgacaacctaaatgaggatcagggttctgatttcggaggtattaagtccgtcggcaagctactcgcaccaaaactgatcagagcaaccctgcttctgtggatggccttctttggaaatgcgtttgcctattatggcattgttcttctgacatcagagctcagtaatggaaacaggatatgtgccaaagaggatgttgaatcagttcattcaaccaatgcaagcctatataagaatgttttcatatctagttttgcagagatcccagggtcatttctgtcggccatgatcgtggatagatttggtcggaagcgttccatggcgtcgatgctcttcactagctgcgttttcttactcccactagtgttctcccggacagatatactaaccagaatctccctgtttggtgcccggctctgtatatctgccagcttcaccatcgtatacatatatgctccagagatttacccgaccgcggtgaggacgacgggcatcggcatcgcgagctcagtgggcaggatcgggggcatcctctgcccactcgtcgctgtcgccctggtgcacagctgccagcagacgacggcgatcctcctcttcgagcttgtaatcttcctctccggcctggccgtctcgttcttccccttcgagacgaaggggtgtaggctcaacgacaccgacgtggacatgaactgatccggtggctgggtgtagtgtgactctcagagcaattttcctgtggcggttaccggaattgcatatggattggatatttttagcaacacgtatacgtgttagactacccgtctagggtttatgttattccccttgtaat

SEQ ID NO: 130426 - DNA, 874 bp, Zea Mays
ccggtacggagccaaatctctggccgaacgaaaaagcgcggagatttccagggagaagcagtgttgcagacgcccggattcggggcgcgtcgttcctacatagaccgcgagtcgcctcctgcacctgcgggattcgccgcctgtcccagatccaagaaacgcataacgggcgtggagccagttgggccagggaagatttaaccagtcgggcccggaaggagcctaagggttggatctgatgctaccaggtcgctgagcatcgctactgaagggggcagcttctgattccggcagatggctcctgaaatgatggaggaggggcaatcagcttcctataccgtggatgacgctctcttgtcatcaggttttgggaggttccagatattgattctttcatatgctgggattggcttaattgccgaagcgatggaaatgatgctgctatcatttgttggtccatcagtacagctagaatggaagcttacttctcatcaggaaagcatgattacaagtgttgtttttgttgggatgctgattggagcttactcgtggggtgtggtttcagacaactatggaaggaggcaggagaggctttctctttacagccattatgacaagtggagctggattttttagcgcttttgctccgaactatctatcattaatttccctgagattcttagttggtattggtttgggaggaggacctgttctgggatcttggttcttggaatttgttcctgctccaactagaggaacttggatggtggtattttctgcattttggactgttggaacaatcttggaggcatctcttgcatgggtataatatttgcccctgaatattttgaaactgatagcgctattcatattt

SEQ ID NO: 130427 - DNA, 732 bp, Zea Mays
ggatgcatttcgcatctccttcggtccttccccagcccatccggtacggagccaaatctctggccgaacgaaaaagcgcggagatttccagggagaagcagtgttgcagacgcccggattcggggcgcgtcgttcctacatagaccgcgagtcgcctcctgcacctgcgggattcgccgcctgtcccagatccaagaaacgcataacgggcgtggagccagttgggccagggaagatttaaccagtcgggcccggaaggagcctaagggttggatctgatgctaccaggtcgctgagcatcgctactgaagggggcagcttctgattccggcagatggctcctgaaatgatggaggaggggcaatcagcttcctataccgtggatgacgctctcttgtcatcaggttttgggaggttccagatattgattctttcatatgctgggattggcttaattgccgaagcgatggaaatgatgctgctatcatttgttggtccatcagtacagctagaatggaagcttacttctcatcaggaaagcatgattacaagtgttgtttttgttgggatgctgattggagcttactcgtggggtgtggtttcagacaactatggaaggaggcaggtccaatcttttacttatgtcatgtaccattttgcacaaaattatgcaagtcaatttcctttttgctgatgattaacatgaagttaccaagcttgttactgatgtca

SEQ ID NO: 130428 - DNA, 6035 bp, Zea Mays
taaaaaaactcataaggtacacaaagcatgagataacataacaaacatgagtttcaaagcatttcaaattcaacattgaaaaattaagaaataaatatcattactaactcaatctgcaatggagaaatgcaattaataatgcatggctcgtttacgaaaaatagcttcatactaatgttctggaacatgactttacaatgattaattctgatcgagagacacttagtagcccgaaagtccattgagcagctaactagataaaaaatcattcagccaaacagtacccaccaaaatatatactccctcaatcccaaaataagtgcacaactcacattttgtgccaactaatttcaattttcaacatttgtatatccaaataggtttactataagctggcaaatagaccgtcaggtacgtcccttcccctcccatgccgacgcttgcactccccaatgccccatgtcggcgcccactccggggccggcggccaccttccaggggatcgccgccgcccctccctcctcccatttagcccccctgcaggcgtccgcttcctcccatcctcctcctttgtacgcggctccgctcaagcctggtgggcggtccaagccagatcgctggcgcgcggagagttccgctggtggcggctcctgcagctccgctgggagtgccccttctggcccttcctttcgcgacatggtgctgctctcccggccttcgtctccggctagtcggactcccaggtctgggcctcgggcgtcgctgtgtagggagctccaggccgcggttctccagccgtcggtagtggggggaactgcgaagtgcgccgctgatggttggcagactgtggagtcccggtcacaccggcggcctcggtcacactctccacgaggcggaccacgtgaagacatcaacgcttacaatctcggggagcagggacagcaacgtcgttcagccaaagaaagactaggacccagatgcttggattccaaacaaacgaatcctaactcttctgagctggacaattttgtgggtggcccttgctgcgatctcaacgaagaacaccgtgcgggcctagagactccccacggggatgactcggctccggtgcacactgaagagcaagcccaacatgatgtttttctgatcagacggactgcaatcctattgggcagcagagtatcactagagatttgtgctcagttccaagtgtcaaacaccgtgcgggccttgaggctcccttcggagaggcttcggctccggtgcacattgaagaccaatgcagcgatcacactgctgaacaccgtgcgggtcttgagaatccccacggggatgactcggctccgccaccgtattgctggaatgggagcaaaaattggcaagcaagatcttccctcaagagcaacaaagaaagttatgaaggctctcaaggtggtgggggaactggaagagatagatcagcaaatcagaaaagactatgaaaaaatattctctgaaagacttcccctcaatcacatagaggctctcgcagccttctttgggtggaaggtgccggatgagctgagggcagaggctcaatcgcatagtgctgctgcctgctgagtgcccccttctctcttttgttgtttttctaaacatgtaatttatggatccaagaaaaatatttatatggaatgttaagggactgaattctacttcgagacagagttctgttcgcagttttatagattccctgggagtggacattgtttgtttgcaagagactaagatgcaggaaattaccagattcaaagtgatagccattctgggagtaaacttcgagcattttgtctacttaccctctttgggtgccagcggaggaattcttgtggcctggaagagccatttacaagtcacaggattgagtagagtggacaatttcagcgtatctgtgcagttcaaaaactccaatggccagcattggtggttaaccaatgtctatggtccccaaagcaatgaagataatatctccttcctgctagaactcagacagatcatagcagagtgtcatgggccttgggttgtttcaggggacttcaatcttatatacaaagaggatgacaaaaacaacgctttttgcaatagagccataatggggagattcaggaaatttattgatgatacaagtcttattgacctgcctctaatagggcgtaaatatacctggtctaatcaccaagtgtctcctactttggttagattagacagagtcctgtgctcaagtgactaggaagatatttttcccaataacctcctccaaagcgctgcaccaagtgtctcctactttggttagattagacagagtcatgtgctcaagtgactaggaagatatttttcccaataacctcctccaaagcgctgcctgaggactctgatcattgcccccttgtgctaggtctgcagagcaactgctttggcaagaggcggttccattttgaatccttttggccaaagttggatggattccaggaagctgccagtgaagcatggatgtctatcgatgaaggagtccgcccagttccaagcttcgataggagactaaaagccactgctaggtcctagcagaaatggagtgggcaaaagattggacatgtgacctcacagttagctttagcaagggagattattcacatgcttgaagtagcccaagatttcaggcttttgtcccctttggaggattggctgagatgtggactgaaaaagcactccttagcccttgcctcatttaagcgcaccattgcacgttctagatcaagaatcaactggctcaaagagggagatgctaacaccaagctattccatatgcacgccagatatagaaagaactttatggcaaaattggtctttggagataatgtgtttactgatcatgctgacaaagccatgctggtggataatttctacagaagcctgttgggaacaagatcggatagaactgtcactattaatcttaactacctggggctgccctctcataatttggaggatctggacttaccaattacagaaaaagaagtctttgaagccattaaagagttgccatccgacaaatctcctggacctgatgggttcacaggaagattttacaaggcttgctggcctaccattaaggaaaatgtgatgcaggttctggcagccatttgggacaggaaatttggtcacttcaacaaatttaattcagctcttgtcacccttattccaaaaaaggagggtgctgaccaagtcaaggactttaggcctattagtttagtgcatagcatggccaagctagtcgctaaaatcctagctaacagactggggaataaactgcaatctatggtctctcaaaggcagagtgctttcatcaaaggccagttcatccaagacaattttatgattgtgcaacaaactgccagactcctccttcagcaaagacaagcaagaatccttttgaagctagacattactaaagcttttgactcagtatcctggcctttcctcctcgaagttcttcaaaaactggggtttgggcagatttggacggatgttctgagtggactgctatctacctcgtccacacatgtaatgctcaatggtgttgctggtgaaaaaattcagctcaaaaagggcttaagacagggagaccccctctcacctatgttgttcatacttgtcatggacgtgttaggttggttaatttcaaaagctgatctagaaaatttgttgcaaccattgtcttctagacctttgcaacacagagtgtccttgtatgttgatgatgtgatcatgtttttgcatccaaaagaatctgatattcaattggttctcaaaattttagagatttttggagaagcttcagggctgaagaccaacatccaaaaaagcagtgtgtacccaattagatgtggggaagaggaagtggcgacccttcaggagtttctcccttgtgagatctcttctttcccctataaatacattggcctgcctttgtctttgaacaagctttccagaaatcaaactcaatacataatcgacaagattgctgaccagctccgtgggtggaaagctgacttgatgactagagctggaagaaaagtgcaagtccaatatgttatgacatgaatgatcatctaccttgcaatggcggtggacttacctccaagagctctcaaggacattgataaaattagaaaaggattcttgtggcgtggaagaaaagaagtcagagggggacactgcctggtggcttggggtagagtgtgcaggccagttgagttgggaggtttgggcattttcaaccttaaagagcttggttgggctctgagaatgagatggttgtggctggcaaaagtggaacctgataaaccttgggcaggactccctatgcattttccttcaaaggtgaaatccttctttcatgctaccattcacacggaaattggcaatggatactcgacactattttgggaagatagatggattcatggacgaaatgtgatggacattgctcccagattgctgctagctgtgccaaggcgaattcaaaacagtagaattgtccatacagctctagcaaatagaagttggctaaatgacatccaaggagctctcactgtggaagtccttgctgattatcttgatctttgggatgctattctcacagtaaacataaatccgcatagagaggacaaacacatttttaggcttgctcataacggcaaatactcggccaaagtagcctacgagagtttattcattgggtcaacatattttgggcattgtgacagggtttggcactcctggtcccccccaaatgcaaatttttcctatggcttgtggcgctgcagaggtgttggacagctgacagacttcagaggagggggggcttgatcgccctgatcagtgccctctttgtgaccaggaaatggaaaccattgaccatctcgtgagctgtgtgtttgcaagaaattaccggttcaggctgctgagaaaggttaacctccagaatttcactcctcatgtctatgaagagaatatcatgctctggtggaaaagatgtagtgatcagttgcatggaattgccagaaaagggctaaactcgcttatcagtctcggcctctggatattgtggaaccatcgaaacgcatgtgttttttacggtctttctccctgtcttaatacagccatcaagaggaccggggaggagagggatctgtgggtgttaggaggggctacaaacttagatcttctaacaaccccaatcccaggtctttagatcaaaatagtttctggttccttttatttatggatgtatttttgtttctttgttttcgaccaccgtaatgggggtcttcttgtactgatccattttggatcctttttttccttccttcttaatgaaaagatgtgcatgtctcttgcgcgttcaaaaaaaaatataggtttactatgaaaatatctagcatgattaatctaatgatgcttatttggtatcatgaatattagtgttttttaatatattttatcaaccatgagattgattgactcctcgaaatgtgagatgtgcacttatattttgggacggagtatttctgaaatccatgtagcaactcaactcacttttgctttaattaaataatccaacataaactaagtctcaaagagtcaaaggtgtctctgccttatgctttaataatgtaataaatgagcagagaagtctccatttgcctaattatgtatgcatctggttgttgtggcacatcaacatgcagaaatgcttccaaatttaagatccacgagagttacattttttaatgctattctcaaaatataatctcatggacaaatagtacacttagtttgagtgcaaaagaaaccatgaaatatacaatgctaggtatttcatttaaaatgtatgaatcaaaagtactgtataataagtcaccagccacagttttatataagattggaggacacagaatattcatattatcaactggcttatatcatgagaaaat

SEQ ID NO: 130429 - DNA, 1143 bp, Zea Mays
atgtcggcgcccactccggggccggcggccaccttccaggggatcgccgccgcccctccctcctcccatttagcccccctgcaggcgtccgcttcctcccatcctcctcctttgtacgcggctccgctcaagcctggtgggcggtccaagccagatcgctggcgcgcggagagttccgctggtggcggctcctgcagctccgctgggagtgccccttctggcccttcctttcgcgacatggtgctgctctcccggccttcgtctccggctagtcggactcccaggtctgggcctcgggcgtcgctgtgtagggagctccaggccgcggttctccagccgtcggtagtggggggaactgcgaagtgcgccgctgatggttggcagactgtggagtcccggtcacaccggcggcctcggtcacactctccacgaggcggaccacgtgaagacatcaacgcttacaatctcggggagcagggacagcaacgtcgttcagccaaagaaagactaggacccagatgcttggattccaaacaaacgaatcctaactcttctgagctggacaattttgtgggtggcccttgctgcgatctcaacgaagaacaccgtgcgggcctagagactccccacggggatgactcggctccggtgcacactgaagagcaagcccaacatgatgtttttctgatcagacggactgcaatcctattgggcagcagagtatcactagagatttgtgctcagttccaagtgtcaaacaccgtgcgggccttgaggctcccttcggagaggcttcggctccggtgcacattgaagaccaatgcagcgatcacactgctgaacaccgtgcgggtcttgagaatccccacggggatgactcggctccgccaccgtattgctggaatgggagcaaaaattggcaagcaagatcttccctcaagagcaacaaagaaagttatgaaggctctcaaggtggtgggggaactggaagagatagatcagcaaatcagaaaagactatgaaaaaatattctctgaaagacttcccctcaatcacatagaggctctcgcagccttctttgggtggaaggtgccggatgagctgagggcagaggctcaatcgcatagtgctgctgcctgctga

SEQ ID NO: 130430 - DNA, 564 bp, Zea Mays
atggcacgaatgcctagttcctccagcaacaggtttgactcaggggaagtggagattggagaaggaccagcttcgttgaagatgcatgctgatggcggtgaatttctcagtgaggccatggatgacattgatgacgagggtgcagtcatccacagactcgtcgagaacagagaggacatcagctatgatcttgaagcaccagcagtagtccacgatcaagagatcgaagtagcaagactctgcatcaaggcgtcgcctaggcgacgccttaagaacactggttgggtcagggtcgttgctgagtacaaggggctcaagggagtacttcccgagatgggggaagagttcatgccaccaagagtagtggccagaggtgaggtcaaggatgagaggcacccgggtatggacgtcctctgcacactccgaagagacatgcttgtggtcaacagcgtcatagcgatccttggcagaggtagcggcttcatgctcagcagcctcaagggtgtcagcatcattggtgccagggtgtcgccacgtgccttagcagaagcagtgatgtgctag

SEQ ID NO: 130431 - DNA, 841 bp, Zea Mays
attacaaaagaaattgattcaaaaagattacaatttaaatgtataaaacatttataagttttaaaatacatgctagcttaagtgacagtcctcaataaagaagctaaagatgagatatacttatataagaaggccgagcccaccggcacttagcaccatccacaacagaacaaaattacaacctgaaaaacaacagggaataaaaccctgagtacgcaattactcagcaagacttacccgactaaagaaaagactctcaagggtatgctggtttaaaaaggattcaaggtaaggctcatcaagtttcaaagactcatttttgcagaaaagcttactagtagtggatccttatgccaaaacttttacttcacaaattaagtacttttcctgaatctagatttgcctaatctagagcattcacttgtcctatactagcttcattttagcagctttagtttcacttgttatctacgatgcagggcagtgatccagtcttcatatccgagaagtaacggcgatccgaatcgattaatactcagctgaggatctccaaccacacgacatatgtagcacttaacccttgcatatgtcaacttgccaccgggtttctcaagaccagaacgggttcacgcgacccgagagcacagcactcccccgtccagccgttggcctggttggtacacgttactctcgccatggtgcccgccatgtttccgagagtacagcaccccaccttccagtttcttgccacggagggtacaagctactctcgccatctctccactcccagtgcgtgcgagctgttctggtattggtccgaccgaggctaagcttacccatg

SEQ ID NO: 130432 - DNA, 2557 bp, Zea Mays
tgtaaaccgtggtctcgccctcccccgacgcgccgtctagggtttcacagccgcaccccgatccactagagctatggagttcgacgaatacgagtacctggagaaggcggtggagccggctcccccgccggccaatggttccggctccggcgagaaggaccgcggctcgcgtcgccgcgagggcgacgagggccgcatatcgaagcgctcccgctcgggggaggaccgcgagcggggccggcaccgcagcgttcgggaacaccgggatcgggataaggatgacgggaaggagaaggagaggagccgcgatagccgcgggaaggacagagacagggaagggagagaacgggagaaggagaggggggacaggcaccggcccagagagagggaggtggaacgggagcggaggagcctgagccgttcggagcggcgccgtatcgaggaagaggagatggtgagggagctggagatggagcgcgagcgcagcgagcgacaccactatcgcgaccgtgacgtcaggcgtaggaaagatgacggggcagagccagaagttgatccagaaagggaccagaggactgtatttgctttccagctatctctgaaggcagacgaaagagatgtttatgagttcttctcaagggctgggaaggttcgtgatgttcgtcttatcatggaccgaaactcaagacgttctaaaggagttgggattacacactgaaattttatagtttgctctacatgctgggattatcggcaatttacaagtaagatggaatattagatcattctgatgtcagtcagcagttgaggacagtttgattccagtgtatttgacaaacacttggtgcaggttctaggcaataaagggggcacccaagaaccaagttcgaaacctctacaatttttgatcaaaatgcctgaagttttctgtgaaaaattgaaatgtcttaacatatgatgccccacttattgttcttcttttcttttttacaggaagacatcttttcttggacgcttcgatgtttgtactaaacatatatctaaatttgcaggtacattgagttttacgatgttatgtctgttccaatggcaattgctttgtctggtcaaccgctgcttggacaagcagtgatggttaagccatctgaggctgaaaagaacttagttcagtcaaatgcgacatcaggtggtgcggcttcaggtggagcaagaaagttgtatgttggcaatcttcactcaaatattactgaagaccaattaagacaggtatttgaaccatttgggcaagtggagcttgtacagcttcctctagatgcaatgactggactgtgcaaaggttatggctttattcagtttgcccggcttgaagatgcaaaagctgcacagagtttgaatgggcagcttgatattgccggcagagttattaaggtttcagctgttactgatcatgtgggagtgcaagctagtggagctactactggagatctagatgatgatgaaggtggaggcttggcgctaaatgcaagctccagagctgctctaatgctcaaattggacaggagtggtacagcaaccagcttaactggtggtattggtgctgctggagtggctgtaccagctacttcagttattggggcagcaggagctgcttctcttctgtcaccaacagtttctgctgttggatcagttcctggggcacctgtgcttcctattaccgctcagaatgtgatcatgtccacacctacagaattcttgttgcttaaaaacatgtttgacccatcattggagacggatcctgattttgacttggatattagagatgatgtccaagatgaatgttccaagtttggtgcagtgaagcatatttttgttgacaaaaatactgcaggcttcgtgtatctgcagttcgatagtgtaactgcagcagggaaggcccaacaagcacttcatggaagatggttcgccggaaagatgattacagcgacatttatgtccgatcaggaatacagtactaagttcccaaacttgtgagcatatgcggggaagagttggtcagacccgcatagttcgttcggagagtttgctagtgctgtatcgttggatggtagactagacgaacaccttattgattgtatgacaggatagtttcagttgcagcgctggtcgtgcgtacaatgtttgatgtactttatttacggcatcacacacagtgaccatcccttattttgtccaccgaatgaaatgccctatgatctccaggcacgttggcatatggtttatttatgtacgatctgttggcactggtacgtatttgtatactaagcaaaagcgttacataatcacaatggtacctttattagtcccctgtcgtgggatatgcggccgcattttggccagctttccaatgtgttccattttatttttgttctcatgatgtttcgacatgttttcatcagtttttcctttcaccaaggtcactatttcattccgtttcattttcatttactccactgatactgtatctagttattttatttggtttatcaagaaattataa

SEQ ID NO: 130433 - DNA, 2229 bp, Zea Mays
atagtagggtttggactatacaattctcgtgtctcgccctcccccgacgcgccgtctagggtttcacagccgcaccccgatccactagagctatggagttcgacgaatacgagtacctggagaaggcggtggagccggctcccccgccggccaatggttccggctccggcgagaaggaccgcggctcgcgtcgccgcgagggcgacgagggccgcatatcgaagcgctcccgctcgggggaggaccgcgagcggggccggcaccgcagcgttcgggaacaccgggatcgggataaggatgacgggaaggagaaggagaggagccgcgatagccgcgggaaggacagagacagggaagggagagaacgggagaaggagaggggggacaggcaccggcccagagagagggaggtggaacgggagcggaggagcctgagccgttcggagcggcgccgtatcgaggaagaggagatggtgagggagctggagatggagcgcgagcgcagcgagcgacaccactatcgcgaccgtgacgtcaggcgtaggaaagatgacggggcagagccagaagttgatccagaaagggaccagaggactgtatttgctttccagctatctctgaaggcagacgaaagagatgtttatgagttcttctcaagggctgggaaggttcgtgatgttcgtcttatcatggaccgaaactcaagacgttctaaaggagttgggtacattgagttttacgatgttatgtctgttccaatggcaattgctttgtctggtcaaccgctgcttggacaagcagtgatggttaagccatctgaggctgaaaagaacttagttcagtcaaatgcgacatcaggtggtgcggcttcaggtggagcaagaaagttgtatgttggcaatcttcactcaaatattactgaagaccaattaagacaggtatttgaaccatttgggcaagtggagcttgtacagcttcctctagatgcaatgactggactgtgcaaaggttatggctttattcagtttgcccggcttgaagatgcaaaagctgcacagagtttgaatgggcagcttgatattgccggcagagttattaaggtttcagctgttactgatcatgtgggagtgcaagctagtggagctactactggagatctagatgatgatgaaggtggaggcttggcgctaaatgcaagctccagagctgctctaatgctcaaattggacaggagtggtacagcaaccagcttaactggtggtattggtgctgctggagtggctgtaccagctacttcagttattggggcagcaggagctgcttctcttctgtcaccaacagtttctgctgttggatcagttcctggggcacctgtgcttcctattaccgctcagaatgtgatcatgtccacacctacagaattcttgttgcttaaaaacatgtttgacccatcattggagacggatcctgattttgacttggatattagagatgatgtccaagatgaatgttccaagtttggtgcagtgaagcatatttttgttgacaaaaatactgcaggcttcgtgtatctgcagttcgatagtgtaactgcagcagggaaggcccaacaagcacttcatggaagatggttcgccggaaagatgattacagcgacatttatgtccgatcaggaatacagtactaagttcccaaacttgtgagcatatgcggggaagagttggtcagacccgcatagttcgttcggagagtttgctagtgctgtatcgttggatggtagactagacgaacaccttattgattgtatgacaggatagtttcagttgcagcgctggtcgtgcgtacaatgtttgatgtactttatttacggcatcacacacagtgaccatcccttattttgtccaccgaatgaaatgccctatgatctccaggcacgttggcatatggtttatttatgtacgatctgttggcactggtacgtatttgtatactaagcaaaagcgttacataatcacaatggtacctttattagtcccctgtcgtgggatatgcggccgcattttggccagctttccaatgtgttccattttatttttgttctcatgatgtttcgacatgttttcatcagtttttcctttcaccaaggtcactatttcattccgtttcattttcatttactccactgatactgtatctagttattttatttggtttatcaagaaattataa

SEQ ID NO: 130434 - DNA, 2229 bp, Zea Mays; identical to SEQ ID NO: 130433

SEQ ID NO: 130435 - DNA, 931 bp, Zea Mays
acaatcttgtttgttgttattgttagtttttagaaaaacaagttcattttaccttcctcaatatcatgaaagcccaggtcatccaattttaagagcggagagaaaaaaatattttgtgatagttagaaaggtaaagttaattttttagttagttttttttctgagagaaaccccctttgttgttgagcggcggggctagccgtttatacctggcaaccactacacgacgagggcaatgaggcgaacggcggcgttgctatcggcccactgcggccgcagcatcccgttggcgctcgccgacgtgctcgtctgcccactctctaagcagcctcttaggtactgcgaggtcaacgggtctttggtcagcgactccgctggggtggcctttccagtacttgatgggattccttctcttgtaccaaaagatggaaagttactcgacgaccaagaagtgaaatcagaacaagagtccagcactagggattcttctggttgaatccttgtctatgcaacatctaattgaagcaatatgttgtagtaaatcgacggtaataaaaccaagtgcttcttgtcggaaatcgtcaccatattgccctagaggatgaggtgcaccgtttctgttgagaaggctaatatggttgtcttgaaagacaacaatgaaattggcaaacatagtttctgctttattttcttttactggaataactattctgttcatatactgcatctgatagtacaaaataatagttggactcataattcaaagttatcatgctctatatgtgttcttttagaaaaaaaaacagttggcttgcttttctttagagtagcaattagctgaacctgccaaaatatgtttttgttagccctgatttgggtggatttccccgaaccagccaatgatattatattggtaaaagtaaaaaataaa

SEQ ID NO: 130436 - DNA, 1387 bp, Zea Mays
caaaagcgccggcgccgttcatctccccccccctctctctctctctctctctccccttcctctcgagttcgagtctcgatatcggcaaagcaggggacctacctattgtgcggctgcggcgcccgtcgttgattcatccgctggctcgcgctcgccggtggcgccggggaacagccagctcgagctcgctttcgcttcgcatcatgggagccgctgggttctgagctgcgcggccggcctgtttcagctgagatgaaactggaaaagaatcaaagttctgcatcacctgccacttcgaattttagagtgaatagcaattgccatggggtctggatcagggacactgaagcagaagaaacgagtgaaacatgcaaagaacaaatacttgaaacctggtgccctcgctcagattcgctatagcaggagtacaagcagggacattgggaagaaaaggattttgttgaatgcgaaagatgagctggagttacctccacagcctgaggttctcttagaaagcaatacactagttttgtcccctgcaagactcaattttgagccatttggtagtaatacagggcaggtattgccaaagactccaaggactccaaatgcatctgtgtcctgtggtgattcagggcttgaatcacttcctcttgatttgctgatcaagatcatgtgttgcttgcaccatgacgaactgaaagttgttttccatgtttcaaaaaggattcgaaaagcagttcaacttgccagggagtttcatttcaactacactactccagacagaagcagacaggagttgctcctgaatagaacccctcttccaacggagcattggcctttcttaagaatcaacggcaaggacgtgcacgtttccaccccaaggacaccgagggctccaaaacacgctgctcgcctttcacgcctcaagctggtcgacgtgaagccaatcacggctgttctcttcccggagtcttcgacaccttttccttcgaagcgtctccgacgctgggtgccaccgtggctgccaagacatgcgtgtaaagctgcttcatcgcccagagttttacggtacgaggaggagctttgcgaagcggtggcacagaacaagcttctctgaagatccaaaaagtgcatcgctttcatctttagtgtatagcttatctatgtcaagcccatagtagtatgagttttgtctgccagctcctaaactggcatcttagattattgtggtcaggttaggttttagactagtgctagactatcttataccagtcataagtatggagtttgcttttattccatgagtctgtatatatcacataataaagtgagcttgaaatcagattggatccttcaagagcagagggcctgtgaggcctggatg

SEQ ID NO: 130437 - DNA, 1182 bp, Zea Mays
caaaagcgccggcgccgttcatctccccccccctctctctctctctctctctccccttcctctcgagttcgagtctcgatatcggcaaagcaggggacctacctattgtgcggctgcggcgcccgtcgttgattcatccgctggctcgcgctcgccggtggcgccggggaacagccagctcgagctcgctttcgcttcgcatcatgggagccgctgggttctgagctgcgcggccggcctgtttcagctgagatgaaactggaaaagaatcaaagttctgcatcacctgccacttcgaattttagagtgaatagcaattgccatggggtctggatcagggacactgaagcagaagaaacgagtgaaacatgcaaagaacaaatacttgaaacctggtgccctcgctcagattcgctatagcaggagtacaagcagggacattgggaagaaaaggattttgttgaatgcgaaagatgagctggagttacctccacagcctgaggttctcttagaaagcaatacactagttttgtcccctgcaagactcaattttgagccatttggtagtaatacagggcaggtattgccaaagactccaaggactccaaatgcatctgtgtcctgtggtgattcagggcttgaatcacttcctcttgatttgctggtatggaactgaaacaaccacctttttatttactttagtgcacattctgtttgtggtaaaacctgattatgtttgttcggttgcaaagatcaagatcatgtgttgcttgcaccatgacgaactgaaagttgttttccatgtttcaaaaaggattcgaaaagcagtaagtataatctcttagctgttgcattctttatttgtaaattaggtaaaagcctcgtttttttttctcattttcttgtctgcattgaaatgatgacatattttcaaagaacagtaattgatgtcatctaggtgcggaaaaaagatagcattgccttttagcatatctctgacatatatactcttctcattctctgctcattaacaatgattgatgatgttatctgatattggaaaatgcaaaaagtgttgctttctattccattattaaatgacgtagtgcatagatgcaaaaaaatgttgcgtcttcaattagtagtttcccaccttgggattatgaactagcgagtcattac

SEQ ID NO: 130438 - DNA, 1918 bp, Zea Mays
caaaatccaaagcgaaagcgaaagcaaaagacacggaaagggaaaggcggaggcaggcgagaataaaggcgggaattgagcttgaagcagctgcgccgaccaccagcttacttacgtacacaaagcttctcgccttcgattccttcccacaagtagcaagagctcgcattcttctcttccagttccaacagctctccacttgtcaccgaggcctcgcggcggcggccgccggcaacgtactttatggcctcttcgtcgtcttcgaaccccgcgtcgccacagccgccgcctatgctgccgccgccgccgccggagccggcgtccgcacccacgcctcagccgctgctgccggaggctaggcccaggccgagccccaccgtagccgatagcttccgcggcctgctcaggtccggacatgcgctcgtccgcgccgtcttcggggctaactctgcccactctcgccttcccgtgaaacaccagcagcatcaccttcaccgccaccagccgcagcaccgccccggtgaaatcatgaagcgcatacaaagagaaacgctgtccgacgtcaggaaactcaaggagaaacatgacgagatcgagcacatcctctcgctgtacaaaaccggcaaggggttggagctcctagacctccctatccaggtgaaaatagcgctggatgcgaccggggcactgttccttgtcggcgacgacgacaacggcaacgagttcgaacgggcaagagcagacctcgacaaggcgggcagaaggacgggtctccgctcgaggttcgtcttcgagtcgaagaccaggggcaaagcggacaccattgccgcagagctctcgacgcagctcggagcgtcagctggccatcatattgggagacccgtcgagctgaccaggctgcagtacagcgcccgtgtcaacaggtggctgtccctgaccttggtcccgtttggagcccggtgcaccaacttcttgcatagctcaagcatgatccagaatctacgggctcaagcctctctcgacggcccaccgtcaaccttcgagcaccatgactgcggcgctggcttgaggatccaaggatccaagctcaccgcctccttggctgggctgatcctgggttcaggaggactagacagtgggggcggcggaggaggaacaactaaccgcgtgacgacgttcgggcaagtgacctgcagaccagccaacgatgtgaagctcagcttgtcgggactttggcaggtccactcaccgtcgtcgtcgtcgtcccggctcaaccatgttggaatcctcgccatcccacggggcagcctgagaccagaacaccccgccgccggaggcggcacagaaggacacaccgagctgagcgtgaagttcgacagtcgggccggcggcgccatggcggtgatggtggactgcgagctgtacgagactctcaagacagaaggctgggttcagatggacaggtccaggtccagccacggaccgctgcgctggggcttctccctgtccgacgtccccgacaacgagctcgggtggggcgtcaaggttagcggcggcacggccggagagacgacgacgacgacgacgagggggagggggaggagtcagctgcagcagcagcagcaccagcacctggagctggaagggttcctcaacttcaacctgggtaagggcgcgaggctgcagccggcgctcgtgtacgccaccaggacgaagagcacggccacgccggcgctgttcctgcgctcgtcgtgggtcatgtgatttcgtcgtccagctcgcaggcgcatgccagcgttacggttggtctctctgctggtttgtgagagatatcttcttctacctcgtcctgcttggtttgcttggtcacctgttttgccgctggcattgctgcagctaataacagttttgaatgaca

SEQ ID NO: 130439 - DNA, 1514 bp, Zea Mays
caaaatccaaagcgaaagcgaaagcaaaagacacggaaagggaaaggcggaggcaggcgagaataaaggcgggaattgagcttgaagcagctgcgccgaccaccagcttacttacggtgaaatcatgaagcgcatacaaagagaaacgctgtccgacgtcaggaaactcaaggagaaacatgacgagatcgagcacatcctctcgctgtacaaaaccggcaaggggttggagctcctagacctccctatccaggtgaaaatagcgctggatgcgaccggggcactgttccttgtcggcgacgacgacaacggcaacgagttcgaacgggcaagagcagacctcgacaaggcgggcagaaggacgggtctccgctcgaggttcgtcttcgagtcgaagaccaggggcaaagcggacaccattgccgcagagctctcgacgcagctcggagcgtcagctggccatcatattgggagacccgtcgagctgaccaggctgcagtacagcgcccgtgtcaacaggtggctgtccctgaccttggtcccgtttggagcccggtgcaccaacttcttgcatagctcaagcatgatccagaatctacgggctcaagcctctctcgacggcccaccgtcaaccttcgagcaccatgactgcggcgctggcttgaggatccaaggatccaagctcaccgcctccttggctgggctgatcctgggttcaggaggactagacagtgggggcggcggaggaggaacaactaaccgcgtgacgacgttcgggcaagtgacctgcagaccagccaacgatgtgaagctcagcttgtcgggactttggcaggtccactcaccgtcgtcgtcgtcgtcccggctcaaccatgttggaatcctcgccatcccacggggcagcctgagaccagaacaccccgccgccggaggcggcacagaaggacacaccgagctgagcgtgaagttcgacagtcgggccggcggcgccatggcggtgatggtggactgcgagctgtacgagactctcaagacagaaggctgggttcagatggacaggtccaggtccagccacggaccgctgcgctggggcttctccctgtccgacgtccccgacaacgagctcgggtggggcgtcaaggttagcggcggcacggccggagagacgacgacgacgacgacgagggggagggggaggagtcagctgcagcagcagcagcaccagcacctggagctggaagggttcctcaacttcaacctgggtaagggcgcgaggctgcagccggcgctcgtgtacgccaccaggacgaagagcacggccacgccggcgctgttcctgcgctcgtcgtgggtcatgtgatttcgtcgtccagctcgcaggcgcatgccagcgttacggttggtctctctgctggtttgtgagagatatcttcttctacctcgtcctgcttggtttgcttggtcacctgttttgccgctggcattgctgcagctaataacagttttgaatgaca

SEQ ID NO: 130440 - DNA, 1292 bp, Zea Mays
aacaaaactactgctccgtgcatactcctctcccaaaatttccttgttttttgtttaaaaaaaaatcggctcgtccatcgtcagtaccgtacgtctgaggtagctctgcatcgggaggaagaactgaaggcgggtgatccatggcttccggcgagcgcgtgtacgaggacttcaagcctccgcacaagatggagcgcgagccggccacccacacgctcaccgtcgacctctctgcccaagggtacaggaaggagcacatcagggtgcagatggtccacagccaccggtgcctcatcgtgcgcggggagcgccccgtcgacggcaaccgctggagccgcttccgcctcgatctccccgtccccgacggctgcgacgccaaggccgtccacgctaggttcgacaacggcgtcgtccgcgtcaccatgcctggcgtccagcagccggagcccgtcctcccggtcgtcgccggcaccgccgaccagcagcagcagcagcaggagacgccgctgccgaagcatgctggtacggccgctgccgctggcgacgacgacgtgcaagggcggaaaggcgtcgtcggcgctgcggggcaagacggcggtgatcgtgatcgtgccgcgggagggcaggatgaggtggacaagcacgagacgccgcggaagcaagaagcgaggcagcgcgtggtgagctcagcgaaacacgccggcggcagtagcggtaggggcgacgacacagctgcaggtggggtagggcaggaggtgatggccgccgcttctcccacgtcgtcacgccaaggctacggcttcctccataaccggaagaaggtgaccttcaccgtgctcggcggcgtggcgctcgtcctcatcagcctcggcatctatgccaagtacagcctctcgccataaaccgtgctaccggcctggcgccgtggcgcatgcatcatagtgatgacgactgcaccttgcgtatgtattgttgaagtatactcagtggagagagatggagagaatacaaatgagagaactgtttgtattccacagatcattacacttatatacaagtgaaggggtgtatcccaagaggtgtgtccattggggaaaactgtcgtaccccttggattgatcacatatgtaatattttgtaacactcccccttgatcaatccaacttcatttgatgatctgtcagatgttcttccaagatcttatctcctcaaaaaccctgtgggaaaaataaggagtacacaatgtcttttggataatgagaataatctcacacaaactccaaaagaaaata

SEQ ID NO: 130441 - DNA, 1118 bp, Zea Mays
tgctccgtgcatactcctctcccaaaatttccttgttttttgtttaaaaaaaaatcggctcgtccatcgtcagtaccgtacgtctgaggtagctctgcatcgggaggaagaactgaaggcgggtgatccatggcttccggcgagcgcgtgtacgaggacttcaagcctccgcacaagatggagcgcgagccggccacccacacgctcaccgtcgacctctctgcccaaggcaagcaacgccgacgcgcgcgtactatgaacaagcacttcatttccctcgtgcaaaagtacggtgaattcgttggataatacaatacaacggcagggtacaggaaggagcacatcagggtgcagatggtccacagccaccggtgcctcatcgtgcgcggggagcgccccgtcgacggcaaccgctggagccgcttccgcctcgatctccccgtccccgacggctgcgacgccaaggccgtccacgctaggttcgacaacggcgtcgtccgcgtcaccatgcctggcgtccagcagccggagcccgtcctcccggtcgtcgccggcaccgccgaccagcagcagcagcagcaggagacgccgctgccgaagcatgctggtacggccgctgccgctggcgacgacgacgtgcaagggcggaaaggcgtcgtcggcgctgcggggcaagacggcggtgatcgtgatcgtgccgcgggagggcaggatgaggtggacaagcacgagacgccgcggaagcaagaagcgaggcagcgcgtggtgagctcagcgaaacacgccggcggcagtagcggtaggggcgacgacacagctgcaggtggggtagggcaggaggtgatggccgccgcttctcccacgtcgtcacgccaaggctacggcttcctccataaccggaagaaggtgaccttcaccgtgctcggcggcgtggcgctcgtcctcatcagcctcggcatctatgccaagtacagcctctcgccataaaccgtgctaccggcctggcgccgtggcgcatgcatcatagtgatgacgactgcaccttgcgtatgtattgttgaagtatactcagtggagagagatggagagaatacaaatgagagaactgtttgtattcc

SEQ ID NO: 130442 - DNA, 2941 bp, Zea Mays
gttgaacggaagccagaccggcccgcaccttgatgcccgctcctatggcggcttccaccttccccgtcgccccgctgcacgcgccgccgctggtgcgcccccgggtcgtccctccttcccccaccttcggctgctgctgccgctgctccgctccgcgcggggggctcaccttgcgcccgcaggcttgcgctccacgccgccgctgcaaccccgcgatccgcccggtgaggttctgtgcggaagttggttcggtgtggcccgtggtgctcactcgatcgatcagaagggggtttcaaaagggtataagtgtcgcaagggtggatgacaatgctgctggtcaagtcagtttaggtgatgacaacgaggatttagaccatatcaccaacgaaacccttcgtaccacaataaggaaaagcaaggaagtgctggcaaggcacaagatcataatgaatcagatatcagaaaagaagcagctcatctcaactatactagacagttccattcataatgagcaagagccactcagtggtcagagtgatggttccttatcaaacctgaatgcaattgcaaagggcacagagattggttatgaccatcagacataccataataggtctttacagcaatatgaatttgacaccacttatggagaatccatctacgatcagaacacatactatgaaagttcagaagacgacggcactgatttcagtgagaattatcagtataaaagttttcctagagctactcgtagtgtgtatgaactagaagaagataatggtatgaaacaaggctatgtggtacaactaagtcaagcaagtggacatgagcagtcagttaacgagggaacaaatgacaatgcgtctgaagttgatgttatgaatgtcatattggtagccgcagagtgtgctccttggtccaaaacaggtgggcttggggatgttgctggagctttgcctaaggctttggccaagagaggtcatcgtgtcatggtagtagttccaaaatacggtgactatgaggaaccacaagagataggagagccaaggagctaccacgttgcagggcaggatatggaagtaaagtattatcatgcatacatagatggtgtggattttgttttcattgacaatcctgtcttccactatgttcaaagtgaaatttatggtggggaccaaactgacatctggaaacgaatggttttgttgtgcaaagcagctgtagaggttcaatggtatgttccatgtggtggcttctgctacggtgatggaaatcttgtgtttattgcaaatgattggcatactgcacttctacctgtttatttaaaggcatactatcgtgacaatggttttatgccatatgcccgttcagttcttgtgatacacaatatagcacatcagggccgtggcccgatagatgatttcaggtacctggatttgcctggtcattacatggatcagttcaaactttatgatccattcggaggtgatcatctaaacatttttgcagctggtattagagctgctgatcgtttgcttaccgttagtcatggttatgcatgggagctcaaaacacctgatggcggctggggccttcatagtatcattaatgaaaacgattggaaattccagggtattgtaaatggtattgatactgctgattggaatcctaggcatgatgtccatctacaatctgatgggtacaccaactattctctagaaaccgttcagactggtaaagcacagtgcaaggaagcactacagaaagagcttggactccctgttcgtggcgatgttccggtcattgcttttattggacggctggaccatcaaaaaggtgtagatctgatagcagaggcaatgccgtggattgctggtcaggatgtacaattaattatgttgggtactggaagacaagaccttgaagatacattgaggaggcttgagagccagcattatgacagggtccggggctgggttgggttctctgtccggttggctcatcggatgacagcaggggctgatatactattgatgccatcaaggtttgagccatgtgggctgaaccagctatatgccatgatgtacgggactgttcctgtagttcatgctgttggtggtctccgcgacacagtccaacattataatccctatgaggaggttggagttggatggacttttgagaaagcagaggcaaacagaatgatcgatgccctagggcactgcttgaacacatacagaaattactggagcagttgggaaggtatccaacgtagagggatgatgcaggacctaagctgggataacgctgctaaactctacgaggaagttcttcttgccgccaaatatcagtggtgactgttgttgaactgtccaaggaactgttgatatttgtcattcatagacctgaaggctttctgtcgcatagaagtcaccgactgtttcaattcttttggtgactgcttcacacagctgctgcatgctttgtcctgaattttgcaggacggtgtgcgtcgcaacagccaaattttttttgttgttgccagttcctaataatcgcatcagatgtgaatgtgaattctgagtctacctcctggacaaacacagtggatgaggcttttgctggaaacaggttaatgctggaggaaagattgaggggaagcgtcgtgcactttttgcaagtgtttacgaattcatttgttctacagggagagctcatttagacgctttggtacaggagggtggtagatagcagagaaactgatgctttgtatcttgagtagttttgttgtatctctaaattaggatacttgttacaatgttcagttcttcatatttttttccgtgcatatcctgtagatgatttagtgttccggtcttccgaatgatcgtaaaaaaggggtttgcaggttgttgagaataatatataattatgaaagggc

SEQ ID NO: 130443 - DNA, 105 bp, Zea Mays
cacaatggcaagcagttaccattagtcattgttgttagatttgaacaaccatgtataattgaggaattgcaaaagaacttgtttcctgccagactgaaacaaagt

SEQ ID NO: 130444 - DNA, 1291 bp, Zea Mays
ccttaaacaaagaggcatttttgtccacgacgccctgcctcgcggcctgagctggcacatctccactcctcgccctctctactgtcctgtctcctcactccaccggtccaacccaacaaccagccccgccgaattccaaggtttcccgcgtgcggcggcgagcggggcgggacgtgccggggacggtggttgggttggattggattggatcggatcggtgccgcccgttgaccagagcgtaaaccagagatgggcaagggcggcggctgcgtccccagcaagaagcgccagccgccggccgccgcgccttcttcgtcgtccgccgcggcggcggtgccgcgcgaggcgcccgaggaggaggcggccgccgcggtcgggcgaaagctgcggctctacatcgtgttctactcgatgtacgggcacgtggagtccctggcacggcgcgcagcggctggcgccggcgcagtggacggcctggaggccgtgctgcggcgggtccccgagacgctcccgccggaggtgctggagaagatgcaggcgccggtcaaggaccccgcggtccccgtgatcgcgtcggccgcggagctgcaggaggctgacggagtgttgtttggcttcccgacgaggtacggcgccatggctgcgcaaatgaaggccttcttcgactccaccggctcgctctgggaggcgcagaagctcgctgggaagcccgccgggttcttcgtcagcaccggaacgcagggcggggggcaggagaccacggcttggacggccatcacccagctagctcaccatggaatgcttttcgtcccaattggctacacctttggttcaggcatgttcgacatggatggtatcagaggaggcagcccctatggcgcgggggtatttgctggcgatggcagcagacaacccagtgagactgaactcgcccttgcagagcaccagggcaagtacatggcctccatagtgaaaaagctagctctccatgcttgagacagccacccctgtgcagtggaagtcacatggtcaccttcctccggtgctcggcttctcctattgtttccggatacatccggcccgtcgtatatgtgcacagcttgccctatcgtttgtgaaagtagccacccctaaattaaggttcatttgtacattgtcggcatattcatattgttgtccatttgaacaataagagtgtcataataaacatcatatgtcatattggttttggtgtttgttttgttgcacggaactgttcttatactataaaagaagagtaattttgttctga

SEQ ID NO: 130445 - DNA, 1141 bp, Zea Mays
ccttaaacaaagaggcatttttgtccacgacgccctgcctcgcggcctgagctggcacatctccactcctcgccctctctactgtcctgtctcctcactccaccggtccaacccaacaaccagccccgccgaattccaaggtctattcttctgcccctcgggcgttcccgagatcgcatttccgagttcctgatcacgggaaacccttctggggacccgggaattcctccctcagatccgcgctttccttggaggcgtcgctgaatagctcggttctttgcgcaggtttcccgcgtgcggcggcgagcggggcgggacgtgccggggacggtggttgggttggattggattggatcggatcggtgccgcccgttgaccagagcgtaaaccagagatgggcaagggcggcggctgcgtccccagcaagaagcgccagccgccggccgccgcgccttcttcgtcgtccgccgcggcggcggtgccgcgcgaggcgcccgaggaggaggcggccgccgcggtcgggcgaaagctgcggctctacatcgtgttctactcgatgtacgggcacgtggagtccctggcacggcgcgcagcggctggcgccggcgcagtggacggcctggaggccgtgctgcggcgggtccccgagacgctcccgccggaggtgctggagaagatgcaggcgccggtcaaggaccccgcggtccccgtgatcgcgtcggccgcggagctgcaggaggctgacggagtgttgtttggcttcccgacgaggtacggcgccatggctgcgcaaatgaaggccttcttcgactccaccggctcgctctgggaggcgcagaagctcgctgggaagcccgccgggttcttcgtcagcaccggaacgcagggcggggggcaggagaccacggcttggacggccatcacccagctagctcaccatggaatgcttttcgtcccaattggctacacctttggttcaggcatgttcgacatggatggtatcagaggaggcagcccctatggcgcgggggtatttgctggcgatggcagcagacaacccagtgagactgaactcgcccttgcagagcaccagggcaagtacatggcctccatagtgaaaaagctagctctccatgcttga

SEQ ID NO: 130446 - DNA, 1321 bp, Zea Mays
aggacactcctccttcgtctttctccttcctcgccgctctctgctgcattcgcgaacacgcatcgaccctacgactacgagtagcgagagaggattgatggcggcgcagctgcggaggtgatccaagatctgtactacgccttgaggacaaagggaggtttgacccccaaggaggaggagacgctcctggcttgcaatttacttcctggtgtttatttcatcgtgggttcagtactgggcactttcgcgatgttgttgggttcccacaaaggactcaaattgcttgggcgtccacctaattctccattaagatctttgactgtttatggctacggttttattgtcggaaaggcctgtgctaatgaaacctggcatcaattgcctgaactgcttttagacagggaagaaggacgcatgaagacagagctagctaaaataatactcaataagcatagtgatgacatatacctggttgaagttgtgagaagacacttttttgtcgagcatctgttcgatgatctgcatcaaggtcaaccacttttcaggtggcgcctacgacatacgtatgttgacagcacctttgtagaaagaacgaaggaagttgaagccagcaactctgatgatgtggctagatcaatttcaagagagacaattacaaacactacaccatttggagaaatgatggaggattcactggcttgtatactgggttctcccggatgcaacatggaaagcaacaatcccccagaaaagacagctaatgtcctgacgcgaagtgatctgcgagctcgcagaagaggtcgcaggcatcatcggcatgctgatgactagtttcctattgtgaatgttgtgtagaagtgctgtggaataccctagaccattaccattttatttgggcctcatgccccacagttaatctgctgtgcctggtcaaaatttctaggctggacaagagctgcttttgtaagctgggcaatcctgtatcgtgatgtatcccatggcccctgcattcttcacaaagcaaccaataagacggtatagacaagcgaaacgacgctgggtggtgtgatgtttgcagttcgtggtccacaggctgccggagcatacagcagttcattttcaattcttattatcatatattatggaagaagaaatgaacatcttcaggattgaacagtgtcgcgaaattgtagatgatggttccacaatcccaatgggaccgacagacaaagagacatgctgcttcctgctgtgagttttgtattgcagacgacactgtttatgtggagtttgaattctgttgtgagttttgcacggtaga

SEQ ID NO: 130447 - DNA, 1416 bp, Zea Mays
attgagcccaatgccatcaaagggtccgagcctccgagggaagaaaggtccacacaggacactcctccttcgtctttctccttcctcgccgctctctgctgcattcgcgaacacgcatcgaccctacgactacgagtagcgagagaggattgatggcggcgcagctgcggtacatgatgagccattattttggtaccccacctagcaaggaggtgatccaagatctgtactacgccttgaggacaaagggaggtttgacccccaaggaggaggagacgctcctggcttgcaatttacttcctggtgtttatttcatcgtgggttcagtactgggcactttcgcgatgttgttgggttcccacaaaggactcaaattgcttgggcgtccacctaattctccattaagatctttgactgtttatggctacggttttattgtcggaaaggcctgtgctaatgaaacctggcatcaattgcctgaactgcttttagacagggaagaaggacgcatgaagacagagctagctaaaataatactcaataagcatagtgatgacatatacctggttgaagttgtgagaagacacttttttgtcgagcatctgttcgatgatctgcatcaaggtcaaccacttttcaggtggcgcctacgacatacgtatgttgacagcacctttgtagaaagaacgaaggaagttgaagccagcaactctgatgatgtggctagatcaatttcaagagagacaattacaaacactacaccatttggagaaatgatggaggattcactggcttgtatactgggttctcccggatgcaacatggaaagcaacaatcccccagaaaagacagctaatgtcctgacgcgaagtgatctgcgagctcgcagaagaggtcgcaggcatcatcggcatgctgatgactagtttcctattgtgaatgttgtgtagaagtgctgtggaataccctagaccattaccattttatttgggcctcatgccccacagttaatctgctgtgcctggtcaaaatttctaggctggacaagagctgcttttgtaagctgggcaatcctgtatcgtgatgtatcccatggcccctgcattcttcacaaagcaaccaataagacggtatagacaagcgaaacgacgctgggtggtgtgatgtttgcagttcgtggtccacaggctgccggagcatacagcagttcattttcaattcttattatcatatattatggaagaagaaatgaacatcttcaggattgaacagtgtcgcgaaattgtagatgatggttccacaatcccaatgggaccgacagacaaagagacatgctgcttcctgctgtgagttttgtattgcagacgacactgtttatgtggagtttgaattctgttgtgagttttgcacggtaga

SEQ ID NO: 130448 - DNA, 1427 bp, Zea Mays
attgagcccaatgccatcaaagggtccgagcctccgagggaagaaaggtccacacaggacactcctccttcgtctttctccttcctcgccgctctctgctgcattcgcgaacacgcatcgaccctacgactacgagtagcgagagaggattgatggcggcgcagctgcggtacatgatgagccattattttggtaccccacctagcaaggaggtgatccaagatctgtactacgccttgaggacaaagggaggtttgacccccaaggaggaggagacgctcctggcttgcaatttacttcctggtgtttatttcatcgtgggttcagtactgggcactttcgcgatgttgttgggttcccacaaaggactcaaattgcttgggcgtccacctaattctccattaagatctttgactgtttatggctacggttttattgtcggaaaggcctgtgctaatgaaacctggcatcaattgcctgaactgcttttagacagggaagaaggacgcatgaagacagagctagctaaaataatactcaataagcatagtgatgacatatacctggttgaagttgtgagaagacacttttttgtcgagcatctgttcgatgatctgcatcaaggtcaaccacttttcaggtggcgcctacgacatacgtatgttgacagcacctttgtagaaagaacgaaggaagttgaagccagcaactctgatgatgtggctagatcaatttcaagagagacaattacaaacacttgtgcttgcagacaccatttggagaaatgatggaggattcactggcttgtatactgggttctcccggatgcaacatggaaagcaacaatcccccagaaaagacagctaatgtcctgacgcgaagtgatctgcgagctcgcagaagaggtcgcaggcatcatcggcatgctgatgactagtttcctattgtgaatgttgtgtagaagtgctgtggaataccctagaccattaccattttatttgggcctcatgccccacagttaatctgctgtgcctggtcaaaatttctaggctggacaagagctgcttttgtaagctgggcaatcctgtatcgtgatgtatcccatggcccctgcattcttcacaaagcaaccaataagacggtatagacaagcgaaacgacgctgggtggtgtgatgtttgcagttcgtggtccacaggctgccggagcatacagcagttcattttcaattcttattatcatatattatggaagaagaaatgaacatcttcaggattgaacagtgtcgcgaaattgtagatgatggttccacaatcccaatgggaccgacagacaaagagacatgctgcttcctgctgtgagttttgtattgcagacgacactgtttatgtggagtttgaattctgttgtgagttttgcacggtaga

SEQ ID NO: 130449 - DNA, 1565 bp, Zea Mays
attgagcccaatgccatcaaagggtccgagcctccgagggaagaaaggtccacacaggacactcctccttcgtctttctccttcctcgccgctctctgctgcattcgcgaacacgcatcgaccctacgactacgagtagcgagagaggattgatggcggcgcagctgcggtacatgatgagccattattttggtaccccacctagcaaggttcgcgggatcgctcccagaaacgtccgagttgcagttcccaatttttttctctttctttccaaaatcattttctgaagaattctccccaaatcctgttcacttctttggttcggggttgacggggttctttgttgctaacgaggcaggaggtgatccaagatctgtactacgccttgaggacaaagggaggtttgacccccaaggaggaggagacgctcctggcttgcaatttacttcctggtgtttatttcatcgtgggttcagtactgggcactttcgcgatgttgttgggttcccacaaaggactcaaattgcttgggcgtccacctaattctccattaagatctttgactgtttatggctacggttttattgtcggaaaggcctgtgctaatgaaacctggcatcaattgcctgaactgcttttagacagggaagaaggacgcatgaagacagagctagctaaaataatactcaataagcatagtgatgacatatacctggttgaagttgtgagaagacacttttttgtcgagcatctgttcgatgatctgcatcaaggtcaaccacttttcaggtggcgcctacgacatacgtatgttgacagcacctttgtagaaagaacgaaggaagttgaagccagcaactctgatgatgtggctagatcaatttcaagagagacaattacaaacactacaccatttggagaaatgatggaggattcactggcttgtatactgggttctcccggatgcaacatggaaagcaacaatcccccagaaaagacagctaatgtcctgacgcgaagtgatctgcgagctcgcagaagaggtcgcaggcatcatcggcatgctgatgactagtttcctattgtgaatgttgtgtagaagtgctgtggaataccctagaccattaccattttatttgggcctcatgccccacagttaatctgctgtgcctggtcaaaatttctaggctggacaagagctgcttttgtaagctgggcaatcctgtatcgtgatgtatcccatggcccctgcattcttcacaaagcaaccaataagacggtatagacaagcgaaacgacgctgggtggtgtgatgtttgcagttcgtggtccacaggctgccggagcatacagcagttcattttcaattcttattatcatatattatggaagaagaaatgaacatcttcaggattgaacagtgtcgcgaaattgtagatgatggttccacaatcccaatgggaccgacagacaaagagacatgctgcttcctgctgtgagttttgtattgcagacgacactgtttatgtggagtttgaattctgttgtgagttttgcacggtaga

SEQ ID NO: 130450 - DNA, 2351 bp, Zea Mays
attgagcccaatgccatcaaagggtccgagcctccgagggaagaaaggtccacacaggacactcctccttcgtctttctccttcctcgccgctctctgctgcattcgcgaacacgcatcgaccctacgactacgagtagcgagagaggattgatggcggcgcagctgcggtacatgatgagccattattttggtaccccacctagcaaggaggtgatccaagatctgtactacgccttgaggacaaagggaggtttgacccccaaggaggaggagacgctcctggcttgcaatttacttcctggtgtttatttcatcgtgggttcagtactgggcactttcgcgatgttgttgggttcccacaaaggttgctcactccctcagctctcgatttaatatttgataatgttaaagcatgccattcctgagaaagcgataatattgtgtcaacaatctgcgagcaccaaattgtgttaaaaaacatgccaggagcatgactgcggccttgtatatcaaggttaaaacctaaaatagtattcaatagccatactcgtgcaaaccatccaggatggggattggggaggacagtatctctagataaagttcaaagaaccgtgggtcatctggcaagcaacattattccattattatggctgtattttgtgagctccttccctaaatgttgcaccatggatgctgttgttatgctgctatcaagtgggcacaccagggtaaacgaattatattctgcttttgttattgctcctacttttcaaggatatttgtatgcttaccctgcgccggcattctgccattgttattactgttaaaggatatctgtatgtccctaccctatccttttactagccacggtgaatatgttacttttggagcaatttggcttaatttatgtttacaaatctcgctatgctactgtgcatttgatgcatgtatgcaggcacagctccctcacatttgagtgtagccttgggccattcaaagtgctggtgcctcccgtgatttgttcctgagtgcaggcatgcttgagttgtagagcttgctgtagcaatattatataaatagtggtgcttgaacattatagttaatgttttcctaatcagtaaaacaagtctctatatggtcaatgcatttattggagagggacaatgcaagtcatcagattttgactgttgattcaattaagtgtcgtataaacaaaccgcaaaactgtcatttttaaatttttcttgcagacaatagctattggtaccaaatgcatgcttacgaaattctgttgtgcaggactcaaattgcttgggcgtccacctaattctccattaagatctttgactgtttatggctacggttttattgtcggaaaggcctgtgctaatgaaacctggcatcaattgcctgaactgcttttagacagggaagaaggacgcatgaagacagagctagctaaaataatactcaataagcatagtgatgacatatacctggttgaagttgtgagaagacacttttttgtcgagcatctgttcgatgatctgcatcaaggtcaaccacttttcaggtggcgcctacgacatacgtatgttgacagcacctttgtagaaagaacgaaggaagttgaagccagcaactctgatgatgtggctagatcaatttcaagagagacaattacaaacactacaccatttggagaaatgatggaggattcactggcttgtatactgggttctcccggatgcaacatggaaagcaacaatcccccagaaaagacagctaatgtcctgacgcgaagtgatctgcgagctcgcagaagaggtcgcaggcatcatcggcatgctgatgactagtttcctattgtgaatgttgtgtagaagtgctgtggaataccctagaccattaccattttatttgggcctcatgccccacagttaatctgctgtgcctggtcaaaatttctaggctggacaagagctgcttttgtaagctgggcaatcctgtatcgtgatgtatcccatggcccctgcattcttcacaaagcaaccaataagacggtatagacaagcgaaacgacgctgggtggtgtgatgtttgcagttcgtggtccacaggctgccggagcatacagcagttcattttcaattcttattatcatatattatggaagaagaaatgaacatcttcaggattgaacagtgtcgcgaaattgtagatgatggttccacaatcccaatgggaccgacagacaaagagacatgctgcttcctgctgtgagttttgtattgcagacgacactgtttatgtggagtttgaattctgttgtgagttttgcacggtaga

SEQ ID NO: 130451 - DNA, 6825 bp, Zea Mays
atggcgactttggttcgtcatgattcaaggcagtactcttggtggtgggttagccatatcagccccaagaactcgaaatggctccaggaaaatctcagcgacatggacacaaaggttaaagcaatgatcaaacttatcaatgaagatgctgattcttttgcaaggagagcagagatgtactacaagaaacgtccagagctaatgaaatttgtggaggaattctatcgagcataccgtgcgctggcagaaagatacgatcaggccactggggcacttcgtcaggctcacagaacaatttctgaagcatttccaaatcaaatgccgtcaatgtcagacgagtcaccctcttctttcagccaagagatggagcctcatactccagatatgtctacttttacacgtgcggcatttgattctgatgatcttcagaaggatggagttggtatgtcaccacagcgtttcacctccaagagaaatggtacacaccctgaggaaacaagtgcattgtcaagtagaaaaggtctaaagctgttcaatgatttgtcatcgagtagtgaaaatgctcctcgtgctggttttgatgggaaagtacggaaaggcctaacctttgaaagcccagaagttaaagggaaagatggtatcagcaatgagatggcaaatttgcagcaagaagttgcaagactattatccgagagccagaatctgaaacagcagatgctgtcagaatccgagcgggcaaacaaagctgaaaatgagatgcaaatgctcaaggcaacagtattgcaattaagtgctgataaagacacatcacttacgcaatataatcattcctctgagcgaatatctacgttggagtccgagctcttgaaggcgcaggctgacctcaagaagttaactgatgaaatggctgcagatgtccagaagctaattaatgctgaaacactcaatattgctatactgtctgaggctgagggtttggatcagaagatgaagatgcaacaacaagaactagaacaaaagcttaaggaattggagagtttccgctcaagcttccaggaggagcatgaaaagcgtatgcaggctgaaagtgctctactttcccaggggaaggaacttgctcaatctcatgaagaagtacagaggttgactatagaaataaagatggcgaatgaaaagttgaatgagctcaagcagaccaaggaggaccttcatgacactgtttgtgagctgaagagggatgttgagcgccttacagaacaaaaccagtcatctgaggtgcttatacgggaacttggtgacgagataaatacactcaaggattcaaaaaatgaactccaaagtgaaataaaaagccttaagagcaccatttcacagctaaacactgagaagaatgcagctgcgcttcaacaccagcagtctgtggagcaggtttcggtaatcgaatctcagctgtcaaagctacagtcagagctagatgagactgagcagaaagtacagttgctgacacaagatcttgaaaagaaaaaagaagaagcggagaatatccatttcaagctgcaagatgaatgccataggcgtatgcaaattgaagcaactcttctcatgacagagggtctacattcccagttgcaagaagaaatgaaaacactgacacaagattttgacggatcaacaaagaagcttagtgagttagaaaataataagttagacctggagagcacactgaaagaactgaataacaccattttaggtttgaactcggagaaggatgcagcactccttcaacaacagcagtctttagacaaagtatctgatttggaattagaactctcaaagatgcagttggaaatggagaagtctgagcaaaaaattctcttactggagcaagaaattgcacggaagactgaaagtgtcgacagcttggagataagttttaaagatgaatgtgagaagaggctacaagcccaaacatcgcttgtgtcattggagaaaatgtattgccagtcacaagaagatgttagaaggttgcagatagagattgagaagcagaatgacaagttgaatgagttggagaacttgtcatctgaacttaacaacaccatcctacttgtaaacactgagaaagatgcaaccctccatgagaaccagcagtccttagcgagaatattggatcttgaatctgaactcatggtcttgaaaactgaactggagaatgttgaaaggaaagttcacatgatagagcaagaactcatatataagaaagaagaagcggataacctccaaattagcctacaagatgaaactcaaaaacgggttgatggtgaaacatctcttcttatgatgaaaaatcttcattcggagtcacaaaatgaagtgagagggttggcactggaactcgagaagctgaatggtaatttaagacaggtggagaacagtaaggttgatcttgaaaacattgtaaccaagcatacggaggaaatccatatccttcgtgaacagaatctttctactgagcttatgataaaggacctccatcttgaattggatgtattgaaggatttgaatgtgaaacttcaagcagaaatggatttacacaaaggtgaaaaagaagtacttcagagagagtttacttctcaaagggaagagaaggaaaatctagaggggatacaccacactctggtggatgagatggataccctaaaaactactacaacaatgaaccagaagttgattgaggaattgcaaatcacaaacttaaaactgaaggaagtgtgtgcaaggagtgaagttgagaaggcacttctctcagaaaaactccaagaggtggagaagctatctgaagaatattcactcttggagaactcactttcagatgcaaatgctgaaatggatgcattgagggagaagataaaagcacttgaagcttcagaaagctctctcaaggatataatttcctgtcatgtttctgagaaggctgttcttgtatcagagctagagatccttggtaaaagattatctgatgctttagagaacaaatctatcttggatatctcattatctgatatgaaactagacctagaagatttgagaacaaagctgaaagattctgaagaatcctgtcagtatctccttgcaaataactcagcactttctggtgaactggatgcattgagggagaagataaaagcactacaggcctcagaaaggtctctgaaggatgaaatttcctgttatgtttctgaaaaggttgttcttgcatcagaggtagagatccttggtaaaagtttatctgaggtttcagagaagaattctatcttggatacctcattatgtgatatgaaaactgagttagatgaattgagaacaaagctgaacgattctgaagaatcctgccagactcaccttacaaataattcagctctttctgctgaaaagaacaatctgttctctcagctggagagcattacattggccatgaaagcactagaaggtatgcacaccaatctggaacagatgcactcctctgtatcaagagagaaggattttgcatatgatcaagtaagggaactgcaggatcagttgagaattaagaatgaggaatttgaagtgttagcaaagtcacatcaattgcaagcaaacagctatgagatacaaatttcttctctgcaagagaaaaaccattatatggaggaggtgcttgaacaggaacagcagaaaaacgtaaatgcttctattagtacagttattttggagaactgtttggtcgatgagcaagacaagaaggctgctcttttcactgaatgccaaaagtatgctgtggaaaatcattcagccaatatgttggtttcacagttgatgggggaagctagatatcatggggaggagagaaaaacattgctaaagcacaatgaaaaactgaggcaagggatttcaaagcaaatgaaggttctgaatatctgcaaagatctagcacctgctgatttagctgaggacgaagttctgttgcagactgttttagatgaaaccattaacactctgagacttaaggatgaaactgaagatgtgaataggctcatgaacactgagttctcagttctctcagtagttttgttgcaattagggatggagctcagagatctgcacttacagaagtgtgccattgagaaagaagtggagagtggagaaacagagttgctttgtttgcaaaacaaaaaccaacagatgttggaacagaatgaacaactaaggaatggattacaggaaagcagtgaaagggaggaggtgctgaaaactgaagtattcatcacacaagagaaactatcttgcttgagagagtcctaccagacatcacaagatgtaattttcaacctgaccgaaaaaaatgagtccttgtctaaggaataccagtccttgagtgagaagtacaattccttggaagatgagaatgatactgttcttgaagaatgcatgatgctcgagaacctgtgcctgttctttaggggacataataatgagattgcatctgcattggcttctcttaccaatgagatggctttgttgagtttggctaagagcgatcttgatcttcaagttgatgagctgagcagaaggtcagtggcgcatgaatcagaaaatagtcacttaaaggagtacatcatatgcttggtagagattctcagaactcgattagtcctttcagagtttgatttggacaccaatcaaagtgtctgccaggagttggttgttaaacttgagaattgcatgacacagctggcgcagaaggatggtgagctaatggaagcagaggaggaagttcaactattgcaagaaaagaaccaggaactctgtggagttgttagatctctacaagttgcaactgaaggtgctaaagtggtggaaggagaactggagaagaaaatcacaagactgattgaacagtgttcttgcaaggatgtcgaaattttacttcttcaccaagacaatgaggcattgcaatcagaagttgagcaatgtgagagggaatttgttgttctgatggatgatgcaattacctcttcagtgaattctgcggtgtatgaagaaacagcattcaagcttatgatgaatggtaaagctacagagaatagagcaatatccctaaaggagttgctaatgaaggaggtctcttcccgagatgctcacattgaggagttgcagaaaaagttggctggcattcaggacgaacatgcagaactaaaagctgagttgaacacacatctagctctcgtagcatcattggctgatcatgtcagtgtgttggaagaagattgccgttctctgtcaaaaccctgtagtacagaagacaaagaggaaaccgcatgtgtacatcatgttcaagagggcaatgatgggctggaatctcattgcttacccaaaggaactccagagttacaagggttgattgcaagaatagaagcacttcaagtagttgtatcaaatgctaaagatcgtcaagatcaggagtcagctgagtctgcagctaaattggcggcagtaagtgcagaaattcaagaccttaaagcaagaggtggctcacgcatggagggaaaagaaatatattctgatcatgagaaacaagatgttgagatctccaaagggaagcaagtccagatcatgaaggatattgagctggaccaaatatccacttgtccaccatatggtgctcgagctgccctctatccgcttggaactggtgcaaatgccgaactcgatgacgatatgcttcagctgtgggaggctgcagagaggagctgcaagaaccaaacggccaagtcctcgtcatctgagcacgacatacaagccgtcgaggatctgaagagtgagcacccttcgtctgagctagcaaggggaagagaccttggaatcaataagctagaagcgtcgaagggagctgcagagcctcatgaggcgtggagcaagaacgtacttgagaggctcacttctgatgctcagaggctgttgagcatccaagcgagcattgaagagctgaagcagaaaatggaggggcagtcaaagggaaaatcccctatgaactctgagtacagcagtgtgagcgctcaggtgcatgagacagagggccatgtcttggaacagatcaatctgaacaacaaattgactaggacggctgagaactaccccacactgtcagataatatgagcaccgagcgagaagggtattccagcaggaggaagatctccgagcaggtgcagaaagggtcggagaatgtggcaaggttggaactggagcttcagaagattcagtatgtcttgctgaagcttgaggaagagcacgagtacagaaggctcaaagtctctgataagcgcactcgcgtgcttttgagggactatctgtatgggaggaaggaccgcggtggcgggcagaagaaaaagaagagggtcccgttctgtggttgtgttcgtccgaaatcaagaacagagccgtagcctttctttttgttcgacctgcacctccaagtggtagccgtagtccgaaatcaagaaataaaacaaaatcgacctgcacctccaagtggttggctaagtgtcgcctgtgcattggaagaggaggtggtgttcctaggatccctttgtaattgagttagcattttagtatcttttttcttttatttttgaaactagcattatagtatcctgatgaagaagcttatgtactaaattttttgttttcctgtctaaatgaggccattctggctagtttaatgcgttaatactgtcgtatatcaaggcgttctctttccatctataatagcttcgtgtttacagccc

SEQ ID NO: 130452 - DNA, 6999 bp, Zea Mays
gagagagagagagagagagagagagagagagagagagagcacgggatgggttgaggaacgagatggagggagaaagtgggcagcctgctggatcttggcatctcgccgccgccgctcacttccgctccacctgtttggtgcagtgtgggctagttatctactagacttgccactgtttcaagtcgtttctgtttgtaataactatgcaggtgcagattccgttgatcccacatctgaaaagcaggggagtcgacgaccctcatggttttgaggataatatattgcatctctgcactgttctaagcgtgaggaagtaaagcattatttattggttggagtagtttctgttgctatccggcaccaatggcgactttggttcgtcatgattcaaggcagtactcttggtggtgggttagccatatcagccccaagaactcgaaatggctccaggaaaatctcagcgacatggacacaaaggttaaagcaatgatcaaacttatcaatgaagatgctgattcttttgcaaggagagcagagatgtactacaagaaacgtccagagctaatgaaatttgtggaggaattctatcgagcataccgtgcgctggcagaaagatacgatcaggccactggggcacttcgtcaggctcacagaacaatttctgaagcatttccaaatcaaatgccgtcaatgtcagacgagtcaccctcttctttcagccaagagatggagcctcatactccagatatgtctacttttacacgtgcggcatttgattctgatgatcttcagaaggatggagttggtatgtcaccacagcgtttcacctccaagagaaatggtacacaccctgaggaaacaagtgcattgtcaagtagaaaaggtctaaagctgttcaatgatttgtcatcgagtagtgaaaatgctcctcgtgctggttttgatgggaaagtacggaaaggcctaacctttgaaagcccagaagttaaagggaaagatggtatcagcaatgagatggcaaatttgcagcaagaagttgcaagactattatccgagagccagaatctgaaacagcagatgctgtcagaatccgagcgggcaaacaaagctgaaaatgagatgcaaatgctcaaggcaacagtattgcaattaagtgctgataaagacacatcacttacgcaatataatcattcctctgagcgaatatctacgttggagtccgagctcttgaaggcgcaggctgacctcaagaagttaactgatgaaatggctgcagatgtccagaagctaattaatgctgaaacactcaatattgctatactgtctgaggctgagggtttggatcagaagatgaagatgcaacaacaagaactagaacaaaagcttaaggaattggagagtttccgctcaagcttccaggaggagcatgaaaagcgtatgcaggctgaaagtgctctactttcccaggggaaggaacttgctcaatctcatgaagaagtacagaggttgactatagaaataaagatggcgaatgaaaagttgaatgagctcaagcagaccaaggaggaccttcatgacactgtttgtgagctgaagagggatgttgagcgccttacagaacaaaaccagtcatctgaggtgcttatacgggaacttggtgacgagataaatacactcaaggattcaaaaaatgaactccaaagtgaaataaaaagccttaagagcaccatttcacagctaaacactgagaagaatgcagctgcgcttcaacaccagcagtctgtggagcaggtttcggtaatcgaatctcagctgtcaaagctacagtcagagctagatgagactgagcagaaagtacagttgctgacacaagatcttgaaaagaaaaaagaagaagcggagaatatccatttcaagctgcaagatgaatgccataggcgtatgcaaattgaagcaactcttctcatgacagagggtctacattcccagttgcaagaagaaatgaaaacactgacacaagattttgacggatcaacaaagaagcttagtgagttagaaaataataagttagacctggagagcacactgaaagaactgaataacaccattttaggtttgaactcggagaaggatgcagcactccttcaacaacagcagtctttagacaaagtatctgatttggaattagaactctcaaagatgcagttggaaatggagaagtctgagcaaaaaattctcttactggagcaagaaattgcacggaagactgaaagtgtcgacagcttggagataagttttaaagatgaatgtgagaagaggctacaagcccaaacatcgcttgtgtcattggagaaaatgtattgccagtcacaagaagatgttagaaggttgcagatagagattgagaagcagaatgacaagttgaatgagttggagaacttgtcatctgaacttaacaacaccatcctacttgtaaacactgagaaagatgcaaccctccatgagaaccagcagtccttagcgagaatattggatcttgaatctgaactcatggtcttgaaaactgaactggagaatgttgaaaggaaagttcacatgatagagcaagaactcatatataagaaagaagaagcggataacctccaaattagcctacaagatgaaactcaaaaacgggttgatggtgaaacatctcttcttatgatgaaaaatcttcattcggagtcacaaaatgaagtgagagggttggcactggaactcgagaagctgaatggtaatttaagacaggtggagaacagtaaggttgatcttgaaaacattgtaaccaagcatacggaggaaatccatatccttcgtgaacagaatctttctactgagcttatgataaaggacctccatcttgaattggatgtattgaaggatttgaatgtgaaacttcaagcagaaatggatttacacaaaggtgaaaaagaagtacttcagagagagtttacttctcaaagggaagagaaggaaaatctagaggggatacaccacactctggtggatgagatggataccctaaaaactactacaacaatgaaccagaagttgattgaggaattgcaaatcacaaacttaaaactgaaggaagtgtgtgcaaggagtgaagttgagaaggcacttctctcagaaaaactccaagaggtggagaagctatctgaagaatattcactcttggagaactcactttcagatgcaaatgctgaaatggatgcattgagggagaagataaaagcacttgaagcttcagaaagctctctcaaggatataatttcctgtcatgtttctgagaaggctgttcttgtatcagagctagagatccttggtaaaagattatctgatgctttagagaacaaatctatcttggatatctcattatctgatatgaaactagacctagaagatttgagaacaaagctgaaagattctgaagaatcctgtcagtatctccttgcaaataactcagcactttctggtgaactggatgcattgagggagaagataaaagcactacaggcctcagaaaggtctctgaaggatgaaatttcctgttatgtttctgaaaaggttgttcttgcatcagaggtagagatccttggtaaaagtttatctgaggtttcagagaagaattctatcttggatacctcattatgtgatatgaaaactgagttagatgaattgagaacaaagctgaacgattctgaagaatcctgccagactcaccttacaaataattcagctctttctgctgaaaagaacaatctgttctctcaggtacatattaatgtaaacctccatacaaagttttttttgttgaagtagaaattaatattattacactgtcataatttttgaactggcctcatctcatgttctctctgtacatttttttttcatataatgtattgtgtaaattttttctttcagctggagagcattacattggccatgaaagcactagaaggtatgcacaccaatctggaacagatgcactcctctgtatcaagagagaaggattttgcatatgatcaagtaagggaactgcaggatcagttgagaattaagaatgaggaatttgaagtgttagcaaagtcacatcaattgcaagcaaacagctatgagatacaaatttcttctctgcaagagaaaaaccattatatggaggaggtgcttgaacaggaacagcagaaaaacgtaaatgcttctattagtacagttattttggagaactgtttggtcgatgagcaagacaagaaggctgctcttttcactgaatgccaaaagtatgctgtggaaaatcattcagccaatatgttggtttcacagttgatgggggaagctagatatcatggggaggagagaaaaacattgctaaagcacaatgaaaaactgaggcaagggatttcaaagcaaatgaaggttctgaatatctgcaaagatctagcacctgctgatttagctgaggacgaagttctgttgcagactgttttagatgaaaccattaacactctgagacttaaggatgaaactgaagatgtgaataggctcatgaacactgagttctcagttctctcagtagttttgttgcaattagggatggagctcagagatctgcacttacagaagtgtgccattgagaaagaagtggagagtggagaaacagagttgctttgtttgcaaaacaaaaaccaacagatgttggaacagaatgaacaactaaggaatggattacaggaaagcagtgaaagggaggaggtgctgaaaactgaagtattcatcacacaagagaaactatcttgcttgagagagtcctaccagacatcacaagatgtaattttcaacctgaccgaaaaaaatgagtccttgtctaaggaataccagtccttgagtgagaagtacaattccttggaagatgagaatgatactgttcttgaagaatgcatgatgctcgagaacctgtgcctgttctttaggggacataataatgagattgcatctgcattggcttctcttaccaatgagatggctttgttgagtttggctaagagcgatcttgatcttcaagttgatgagctgagcagaaggtcagtggcgcatgaatcagaaaatagtcacttaaaggagtacatcatatgcttggtagagattctcagaactcgattagtcctttcagagtttgatttggacaccaatcaaagtgtctgccaggagttggttgttaaacttgagaattgcatgacacagctggcgcagaaggatggtgagctaatggaagcagaggaggaagttcaactattgcaagaaaagaaccaggaactctgtggagttgttagatctctacaagttgcaactgaaggtgctaaagtggtggaaggagaactggagaagaaaatcacaagactgattgaacagtgttcttgcaaggatgtcgaaattttacttcttcaccaagacaatgaggcattgcaatcagaagttgagcaatgtgagagggaatttgttgttctgatggatgatgcaattacctcttcagtgaattctgcggtgtatgaagaaacagcattcaagcttatgatgaatggtaaagctacagagaatagagcaatatccctaaaggagttgctaatgaaggaggtctcttcccgagatgctcacattgaggagttgcagaaaaagttggctggcattcaggacgaacatgcagaactaaaagctgagttgaacacacatctagctctcgtagcatcattggctgatcatgtcagtgtgttggaagaagattgccgttctctgtcaaaaccctgtagtacagaagacaaagaggaaaccgcatgtgtacatcatgttcaagagggcaatgatgggctggaatctcattgcttacccaaaggaactccagagttacaagggttgattgcaagaatagaagcacttcaagtagttgtatcaaatgctaaagatcgtcaagatcaggagtcagctgagtctgcagctaaattggcggcagtaagtgcagaaattcaagaccttaaagcaagaggtggctcacgcatggagggaaaagaaatatattctgatcatgagaaacaagatgttgagatctccaaagggaagcaagtccagatcatgaaggatattgagctggaccaaatatccacttgtccaccatatggtgctcgagctgccctctatccgcttggaactggtgcaaatgccgaactcgatgacgatatgcttcagctgtgggaggctgcagagaggagctgcaagaaccaaacggccaagtcctcgtcatctgagcacgacatacaagccgtcgaggatctgaagagtgagcacccttcgtctgagctagcaaggggaagagaccttggaatcaataagctagaagcgtcgaagggagctgcagagcctcatgaggcgtggagcaagaacgtacttgagaggctcacttctgatgctcagaggctgttgagcatccaagcgagcattgaagagctgaagcagaaaatggaggggcagtcaaagggaaaatcccctatgaactctgagtacagcagtgtgagcgctcaggtgcatgagacagagggccatgtcttggaacagatcaatctgaacaacaaattgactaggacggctgagaactaccccacactgtcagataatatgagcaccgagcgagaagggtattccagcaggaggaagatctccgagcaggtgcagaaagggtcggagaatgtggcaaggttggaactggagcttcagaagattcagtatgtcttgctgaagcttgaggaagagcacgagtacagaaggctcaaagtctctgataagcgcactcgcgtgcttttgagggactatctgtatgggaggaaggaccgcggtggcgggcagaagaaaaagaagagggtcccgttctgtggttgtgttcgtccgaaatcaagaacagagccgtag

SEQ ID NO: 130453 - DNA, 240 bp, Zea Mays
atgggacaaccggacaagtacagcgtcaggcagggcagatgggagatgtcggcagatcacaaacctcagtacctcacgacggcagacgggctggctgacggcgcgacctcagagctggcggcggcggacgcggccacggatcggcgacggctggcggcgcgcagggaagcgcggctgagcgggtctccaagcggtgacgggctggcggcgcgcaggtttccaaggatctccaatcggtga

SEQ ID NO: 130454 - DNA, 3405 bp, Zea Mays
atgccaatctgttcgtgggctctagtgcacgaaaccagccagtggctagaactggagcagagaagcaggcagcagtggcgggtcgggagtgaaactgaccttcgggaggccgctgctactgggaggtgtgccaggcctccgggcagcgaggacggggagatggacgttgcggttgcgacggggttgagcgatgaacctcaacaagctgaaatggaacaagagctagatgagactgagcaggaagtacagttgctgacacaagatcttgaaaagaaaaaagaagcggagaatgtccatttcaagctgcaagatgaatgccataggcgtatgcaaattgaagcaactcttctcatgacagagggtctacattcccagttgcaagaagaaatgaaaacactgacacaagattttgacggatcaaaaaagaagcttagtgagttagaaaataataagttagacctggagagcacactgaaagaactgaagaacatcattttaggtttgaactcggagaaggatgcaacactccttcaacaacagcagtctttagacaaagtatctgatttggaattagaactctcaaagatgcagttggaaatggagaagtctgagcaaaaaattctcttactggagcaagaaattgcacgggagactgaaagtgtcgacagcttggaggtaagttttaaagatgaatgtgagaagaggctacaagcccaaacatcgcttgtgtcattggagaaaatgtattgccagtcacaagaagatgttagaaggttgcagatagagattgagaagcagaatgacaagttgaatgagttggagaacttgtcatccgaacttaacaacaccatcctacttgtaaacactgagaaagatgccaccctccatgagaaccagcagtccttagcgagaatatcggatcttgaatctgaactcatggccttgaaaactgaactggagaatgttgaaaggaaagttcacatgatagagcaagaactcatatataagaaagaagaagcggataacctccaaattagcctacaagatgaaactcaaaaacgggttgatggtgaaacatctcttcttatgatgaaaaatcttcattcggagtcacaaaatgaagtgagagggttggcactggaactcgagaagctgaatggtaatttaagacaggtggagaacagtaaggttgatcttgaaaacattgtaaccaagcatacggaggaaatccatatccttcgtgaacagaatctttctactgagcttatgataaaggacctccatcttgaattggatgtattgaaggatttgaatgtgaaacttcaagcagaaatggatttacacaaaggtgaaaaagaagtacttcagagagagtttacttctcaaagggaagagaaggaaaatctagaggggatacaccacactctggtggatgagatggataccctaaaaactactacaacaatgaaccagaagttgattgaggaattgcaaatcacaaacttaaaactgaaggaagtgtgtgcaaggagtgaagttgagaaggcacttctctcagaaaaaactccaagagatgcaaatgctgaaatggatgcattgagggagaagataaaagcacttgaagcttcagaaagctctctcaaggatataatttcctgtcatgtttctgagaaggctgttcttgtatcagagctagagatccttgttggagagcattactacattggccatgaaagcactagaaggtatcaagagagaaggattttgcatatgatcaattattttggagactgtttggtcgatgagcaagacaagaaggctgctcttttcactgaatgccaaaagtatgctgtggaaaatcattcagccaatatgttggtttcacagttgatgggggaagctagatatcatggggaggagagaaaaacattgctaaagcacaatgaaaaactgtggcaagggatttcaaagcaaatgaaggttctgaatatctgcaaagatctagcacctgctgatttagctgaggacgaagttctgttgcagactgttttagatgaaaccattaacactctgagacttaaggacgaaactgaagatgtgaataggctcatgaacatgaattctgcggtctatgaagaaaaaacatccaagcttatgatgaatggtaaagctacagagactagagcaatatccctaaaggagttgctaatgaaggaggtctcttcccgagatgctcacattgaggagttgcagaaaaagttggctggcattcaggacgaacatgcagaactaaacgctgagttgaacacatatctagctctcgtagcatcattggctgatcatgtcagtgtgttggaagaagattgccgttatctgtcaaaaccctgtagtacagaagacaaagaggaaaccgcatgtgtacatcatgttcaagagggcaatgatgggctggaatctcattgcttacccaaaggaactccagagttacaagggttgattgcaagaatagaagcacttcaagtagttgtatcaaatgctaaagatcgtcaagatcaggagtcagctgagtctgcagctaaattggcggcagtaagtgcagaaattcaagaccttaaagcaagaggtggctcacgcatggagggaaaagaaatatattctgatcatgagaaacaagatgttgagatctccaaagggaagcaagtccagatcatgaaggatattgagctggaccaaatatccacttgtccaccatatggtgctcgagctgccctctatccgcttggaactggtgcaaatgccaaactcgatgacgatatgcttcagctgtgggaggctgcagagaggatctgcaagaaccaaacggccaagtcctcgtcatctgagcacgacatacaagccgtcgaggatctgaagagtgagcacccttcgtctgagctagcaaggggaagagaccttggaatcaataagctagaagcgtcgaagggagctgcagagcctcatgaggcgtggagcaagaacgtgcatgagacagagggccatgtcttggaacagatcaatctgaacaacaaattgactaggacggctgagaactaccccacactgtcagataatatgagcaccgagcgagaagggtattccagcaggaggaagatctccgagcaggtgcagaaagggtcggagaatgtggcaaggttggaactggagcttcagaagattcagtatgtcttgctgaagcttgaggaagagcacgagtacagaaggctcaaagtctctgataagcgcactcgcgtgcttttgagggactatctgtgtgggaggaaggaccgcggtggcgggcagaagaaaaagaagaagagggtcccgttctgttgttgtgttcgtccgaaatcaagaacagagccgtag

SEQ ID NO: 130455 - DNA, 2610 bp, Zea Mays
tccgctccctctcccactcgcgctcggcaggcaggctcggcggcgtcgtcactggctgcccctcctacccgaaaatgctttgtgttggaagaatttgttcaagatattatgcaggacatgctgtatcttcattacttgtgggtatacgatgtttgtttgctcctcaaagcccacaccatgtcggctccaagtatcatgggactcaccaaagtagggacagtagtaccaaaaccttgaaaccagagctaaatattggtagatgtggcgcttgcttttccactgtcacaggaaccattctagtccaagctcatgatccatctcagctagcaatggagatagagaatgcaattgatcagcagagatttgatgatgcatggagggcttatgagaagcatgttcacatggatggacttccaagaaagtctgttttgagcaagctcatcactggcttagcagagagctgtgatcatcactggcttaagcagtcctacaatgtggtcagtcatgcatttgaagagaagcaagaattgttggataaggaacccctaatttacctatccctcattcttgcacactgtgctctgcctaatcttgctttaaatgttgtgaggaagttggtaaagatggaagcatacccacctgttgcagcatggtcggcaattttagctcatatgtgtcaaactaacactggtgcatttctcggtgcagaccttgtaatggagcttggttatcttttccaaaataatagagttgatccacggaagaagagtaaccgtcctttgctatcaatgaaacccaattcatttacattcaacatagttttgaccgcttccctcgtgtttggcactacaagaaaagctgagcagcttctcgaactaatgccgaggataggcgtgaagcctgaagtcaacttgttgattgttatggcccacatatatgaaaggaatggtcgcagagatgagattcggaaattaaagaggcatgttgatgaagcttatggtcttagtgaatcagaggttaggcagttttatgattgcttgctctcctgtcatttgaaatttggggattttgattatgcagttgatatggtactggatatgattaggaaaggtaagaatgcaaagcggtcattggaagcagctaaagcagttcttgaagctgttgaaaatagaaaattttattttccttatgagaaagctgatgctgaaaacccacgctcttgtagtagccaaatgctaagtcacgcttcattcttcaaagacaacagctttgggagacttgaattggacgcaagagaatcagtcaggctattgacagataagctgcaggaacaggttggactggttaaatctgagcatggcattctccatccaactgaaacaatgtatgccaagcttgttaaagcttttctggaagcagataagatcagtgcattggcatcgtttcttgtgaaagcaagcaaagaagattctcctgtatctgttgaaagctcctttgttgttcaagtgataaatgcatgcatttctcttggcttattagagcaagcacatgatcttctggatgaaatgagattttctggaattagggttggttcatccatttattcatcactcctaaaagcctattgcaaagagggacaacatgaagatgacataactgcacttttgaaggatgctcaacaagctggcattcagcttgattcaagctgctatgaggatttgatacaatctagggtgaatcacagtaacaccacaggtgctctccatctttttaaagaattgaagaatttgaatgttctgaaagctggtcacatggaatttcagagaatagtgcaaggctctgatgacaatgaagctgctttgatgaccaagctagtggaggaagtcaggagtgatcatacagttgatcatgctgttcatgaatggaataatgttatccatttcttctgcaagaagagattgatgcatgatgctcacagagcactgaacaagatgcgagcttccggccatgtgccaaatgcacaaacttttcattctttaataactgcttatgctgccattggtggcaaatatgtggaagtgacagatttgtggggtgaaatgaaacttctggctagtctaagttctatgaaatttgatcaggagctcttagactctctgttgtattgttttgtgagaggtggtttcttccttcgagccatggaagttatagagatgatggagaaaagagagatgtttatagacaaatataaatacaagtccttgtggctcaagtaccacagaacattgtacaaaggtaaggctcccaaggtgcaaacagaagcacaactaaaaagaagagaagcagcaatacgtttcaagaaatggattgggttgacatgagagcaagaagttcaactcaagctatatgaactgatcaggaattctttgattatctgctgtatggatggatctttacaaattctgtaaaatcgtagttgcgaagtttgttagaaggtaatatgctttttttttattttgcatagttcctgcttgaaaattagtaatccaaaaccaaactagattatgtatagttgctctgtttattacaacaaatgcagaaatgcttcag

SEQ ID NO: 130456 - DNA, 446 bp, Zea Mays
ttgggccaagcccaatacactgagggtatgcaagtaattacacaaggactagccctgaaaccctaacaatactcaaacacaaggaaatgcttgatagggctcagggaacacgatggtgggggtttgtgttgtcgccattggcatctatggctggaaaataaggcgtgaaagtttcacaatgatgatgtgcatctttggtgggagttctaaaggatgcaatacaataagagtctgcttgcaaatgtatagaaatggatacctacatggctacatgtaaatttgtggatagagatgtagaagatattttgctgaacctatgattagatataccaaatgttattgctaacccataatgtgtatcctatttttagttctttgagaaaaatatgttttgttgtagaccctacacgtactttcatatgtataataactaggtgagtgcgtgt

SEQ ID NO: 130457 - DNA, 396 bp, Zea Mays
gggacttattgatatccacgctgagataccagcaaggcattcttttattacaggtggccactgacagatttctcagagctactcatacaataacgcaagtacgcaacatgagtttcttcctcgcagcttctcaccagaaaagcctacacagcacagcaacatctcgcgcggtcacttgtactgactggcgagctggccttccttgacgatgtagttctgcaccgggaagtcctcgcccttgaaatacctatccagcatgtaacaaaactcagaacctgacctgcgcatcaattgtagtcctagagatgtgaggggtcatggcatggttaggcatgtagcgccaggggtgatcctttggtgctggctgtgggaaccacacatcaccaccatatcctg

SEQ ID NO: 130458 - DNA, 456 bp, Zea Mays
atggcaaccaactccttcataacagaggggcaattcttgctcaaatgatcgaagctttcacttgccacggctaccttcaaattctccggggagctaaggaaacgaaagcatgccttcttcaatccatggcaatggtgctgctcggctagtgccaatatggttgccaccgttcccacattaatgtacttgcataatttatcttcacatatgagcttcaatcttggcaagttatacctgtctgctgcaacaagcaggtgctgagccatgacatcgtcttcctcttcctcttcaacttcattcgttttccaaaacaagtcagtatatgtgaaatgaagcaaagccttgaagacccgagcctccatgtcgtgaatgtggaccgcactgccgcttttactctcctccatcgcgccaaagaactctgcagcgaagaccggcgaccgagccgcgagcacgcac

SEQ ID NO: 130459 - DNA, 3293 bp, Zea Mays
cagattacccgcagctgttctcaacttcccgtataagccgtgagcacttgatcagttgtttccgcgaccgggttttgggaatcaataaaccattgcctctcctagcttcatatccgcgcactctatagattcacgagagtttgctttgtccccccaattctcatcggtgtaggcggctcgtcttcattaattcgtgtgaacaaatggagtgcgccgactacctgatcggggtgggcacaatggcgacggcggcggacccgctgcggtggacgaagcagtggaggaaggccaccaacgtcatccggacgtgccacaggctggcccgcctcagtttctcccgcgccatcctgcgccggaccggctcctacgtcgaaatcaagatcgacgacgacggctgcggccccggcgccgccgccagcacgtcgcggtccgacgacgccgctccggcggagttctctgtcgccgcgcacgacgagggcttcaggtgcctggtcaaggacaagcgccacgactgcttccgccgcctcggcggcgccgccgggatcgcgtccgcgctggcgtcggacgcggagaccggcatccgcggcgacgaccgcgacgtgcggctccgccgggaggccttcggcgggaacacgtacccgcggaggaagcccaaggggttctggacccacgtgtgggacgcgctcagcgacgccttcctcctcgtgctgctcgtctgcgccgccgtctcgctgggcttcggcatcaaggagcacggcctcaaggacggctggtacgacggcgtcagcatcttcctcgccgtcttcctcgtcgccgccgtgtccgcggtcagcaaccacggccaggccaggcgcttcgacaggctcgccaccgagtccgacaacatcaccgtcgccgtcgtccggggcggcaggaggcaggagctctccatcttcgacgtcgtcgtgggcgacgtcgtcgtgctcaacatcggcgacgccgtgcccgcggacggcgtcttcatgcagggccacgcgctgcaggtggacgagtccagcatgaccggcgagccgcaccctgtcgacatcgacgccgagaagaacccgttcctcgcctccggcgtcaaggtcatcgacggatgcggccacatgctcgtcaccgccgtcggcacggacaccgcctggggcgagatgatgggcagcatcaccagggagaagaccgaacccacgccgctccaggagcgcctcgaggccctcacctccagcatcggcaaggtcgggattgctgtcgcggttctcgtcttcgccgtgctcaccgcgcgccacttcacgggcagcaccagggatgagcagggcaacccgacgttcgacaggcaccacgtctctttcaacaccgtcttcaccgcgctcgtcggcatcttccagcaggccatcaccatcatcgtggtggccatccccgagggcctcccgctcgcggtcacgctcacgctggccttctcaatgaagcggatggtcaaggagcacgcgctggtgcgcacgctctcggcgtgcgagaccatgggctcggtaaccgccatctgcaccgataagacgggcactctcacgcttaatcagatgaaggtgacggagttctgggtcggcaccgaccgacccaaggcggcggccacggtcgccgccgccgtcgtcagttttctgcgccagggagcagggctcaacaccaccggaagcgtgtacaagccggacaacgtctcgccaccggagatatcgggcagcccgacagagaaggccctgctgtcttgggccgtggcggagctcggcatggacgccgacgcgctcaagaggagctgcaaggtgttgcacgtcgaggcgttcaactccgacaagaagcgcagcggcgtgatgataagggacaacgcgacgggcgcgctgaccgcgcactggaaaggcgccgcggagatggtcttggcgagctgctctgcgtatgtcggttcagacggcgcggcacgcgaactcgacgcgggcaagaggaggaagctccaagagatcatcagcgggatggcggccgccagcctccggtgtatcgccttcgcctacaaacatgtcgacagcgagcactcaaagatcgacgacgaagggctgacactgctgggcttcgtcggtttgaaggacccctgccggccagaggtcaggtctgccattgaggcctgcaccaaggcgggcgtcgctgtgaagatggtcacgggcgacaacgtcctcacggcccgtgccatcgccaaggagtgcggaatcatctcaaacagcgaccacgacgccatcgtaatcgaggggcaagagttccgcgccatgtcaccggaggagcagctggagatcgtggaccgcatccgcgtcatggcgcggtctctgcccatggacaaactggtgctggtgcagcgcctgaagcagaagggacacgtggtcgcggtcaccggcgacggaaccaacgacgcgccggcgctcaaggaggccgacgtgggcctgtccatgggcatccagggcaccgaggtcgccaaggagagctccgacatcgtcatcatgaacgacaacttcgacacggtggtgacggccacccggtggggccgctgcgtcttcaacaacatccagaagttcatccagttccagctcaccgtcaacgtcgccgcgctcatcatcaacttcgtgtcggcgatgacctctggcaagatgccgctcacgaccgtgcagctgctgtgggtgaacctgatcatggacaccatgggcgccctggcgctggcgacggacacgcctaccaaggcgctcatgcgccgcccgcccatcggccgcactgcaccgctcatcagcaacgccatgtggcgcaacctcgccgcgcaggcggcgttccaggtcgccgtccttctggcgctgcagtaccgcggccgggagatcttcggcatcagcgagaaggccaacggcaccatgatcttcaacgccttcgtgctctgccaggtgttcaacgagttcaacgcgcgggagatcgagcgcaggaacgtcttcgccggcgtgctccggaacaagatgttcctgggcatcatcgccgtgacgatcgccatgcaggtgctgatggtggagctgctcacgaggtttgctggcacccagaggcttggcttggcccattggggtgtctgtgtcgccattgccgcggtgtcgtggcccattggatgggccgtcaagttcatccccgtgcctgaccggccgctacgtgagatcttagcaacgaggatgaaaacaatatctaggataatgacacaataatgttatttt

SEQ ID NO: 130460 - DNA, 1748 bp, Zea Mays
cttgatggccctgcaatagctcggaccacacgcccttcaagtgcatgtgcgcaggcatctcccaatcttaacgctcaccaaataaaggacaagaagcagatgaatcgtggaaatcaataattcttggcgcgtgagttcatagagctctacgtacaccacatgcaaatgcaatgtggatgcaaatgacggcaaacagagtaaccaaatcaagccctaataactaatactcctactaacggcgctgctgctagctgctgcttcttcttcttcattatctcgattataagttacatgatgagaaatcaatcatgtaaatatgtattatttcaggcatgggagacagagaccttgtacgtggcgccgtcagggaacgtgtatgcggtctcgtcgatgggcgacaccctgggcacgtggatggggagcacgtggacctccggcgtccacgggttgccctcctcgctggcgtccaccgtgcggagcgccttccagacggcgctgttgcacttgaagccggagccgaaggcgatctgccagacgcggtcgcccttccggatgcggcccttggcctcgcagtaggcgagctcgtaccagagcgagctgctggaggtgttgccgaagcggcagagcgtcatccgcgagggctccatgtgccaggcgctgagcttgaggctgcgctccagctcgtccagcacgccgcggccgccggcgtggatgcagaagtggtcgaaggcgagcctgaagtcgggcaggtaggcgcgcacgttggcgcggaagacgcggttgaggacgacggtggcgaggaagcgcagctgctcggacatgggcaggacgagcgggcccagcgtggtgatgttggtgcgcagggcctcgccggccaccaccatcagctccttggagagcgagacgccgacgcagcccgcgtcgtcctcctcctgcgtcacgcagccgaagctctggtcgtgcgcgccgcggtgggtgcgcaccgtgtggatcagctggtacttggcgcgccggcggtcggcgccgcggttggagagcaggatggccgcgccgcccacgcggaagagcgtgttggtcaccagcatggggcggttgttgcccatgtacgcgttgagggtgatgttctccgtgctcaccaccagcgcgtacatcgagttgtgtacctggagcaggcgcttggcgaggtcgatggcgatgatgcctgcgctgcaccccatcccgctgaggttgtggctgaccacgtcgcgccgcatcccgtagcggttggcgatgagcgacgtgaaggacggcgtggggctgagcaggctggagttgaagatgagcacgccgacgtcggcggccgccacgcgcgccctgcggaggacctcgtccacgacgccgaagatgacggcgtgcgactcctcccgcgccgtgcggaggcacatgtccacgggcacgctgatgagcgacgccgggaagtgggtctgctccccgagccccgaccgctccagcatccgcttctggaacgccatgctctcgtcgctgaaccgcccgcaccgcccgaagtgggcgatcgtcttggcgcgggaggcctcgtgcgaaggcccgcccacgtacccggacaggtccaccaggtacacgggacgcgggcgggacaccgcgtacgcccacgccgccaccgcacccgcccagcaggccaccgccaccgcagccgggctcagccccagcagcttctccttcgcggatagcagcgaggccaaaaggacgac

SEQ ID NO: 130461 - DNA, 211 bp, Zea Mays
gatctcgactgtaattctgcagatgaagcataccaataaaaaagatgaactcatccctctgcttgatgtcctagcaaacaaagtgaaggctatcaggaggcttagggaactcttgacaaccaaacttcctacaggcacatttccagtcaagggagatgagctcaccttggcaatggtagttaatcttattaatgcaaacaaggatgattaa

SEQ ID NO: 130462 - DNA, 1299 bp, Zea Mays
gtttcatgggacatggctctcgtagccatggctatgcgattcctagctgaggtagcagtacatcatcccatggcaagaccttctcatcctctcatacatggcttctcgaaaggtgaaaaaaatctttgtgctcatgattgttctagtacaagaaggaaaaaagaaggtgatgaatgcaatatgatattgggtgtgtcaaaaggtgaaaggctttctcatagaggatgggactttgaaagcaaatatattgcaattgaaacttaaagaacgttataaggtgcacatcccctacaagagagtatatatgggtagagagttagcattgaatcaactttatggtggttgggataacagctttaataattggtatgttcaaagcacaagttgagagttgttgtcctggtagcttagtaactattgataatcacacagtaaatggaaagatcatatttataagattgttctttgccttaaaaccttgaatagagggcttccttaatggtcacagaccttacttggtagtagatatcacattcttagcatgcatgttcaagggacagtttactagtgcttccattgtttatggacacaattggttgtatcttgtttgctttggggtattgaaagggaaatgtgtcattgggccatttctaagtattttggtgattaagtgaccaacacaaatggttatgtgttaaactatgccaaatggtggacaaagtgcaaatcaatacaaaggtatgattctagacttagtacattgatttttgtgtactaacatatttgtctaagtgctagaatcagagaaaagacaaatggaaaagacttggctcgagcagccaagactctactcagtctgggtgcaccggactgtccggtggtgcaccggacagtgtccggtgcgctaggctggctctggtgaaaaggctgctctcaggaattcgtcggtggcgtacgactataattcactgtactgtccggtggtgcaccggactgtccggtgagccaacggtcggtcgcgcaatccgcgcgtgacgcgtggccgggccaacagtctgatgggggcaccatactgtccggtgtgcaccgaacagtgtccggtgcgccaacggctccaaatcatcaacggtcggctgcgccagaataggaaagagatctactgagagcacctagaggggggtgaataggtgatcctgtaaaactttaaacttaagccacaaaaacttggttgggtgttagcacaataaccgccaagtggctagagaggagtctcaacaatacaataaccacgaagatatc

SEQ ID NO: 130463 - DNA, 3040 bp, Zea Mays
accttccgttcgattcccttcgcgtctttcttcctctgctggactcaagtactgcaaattagagcagaaaatcctgtgtctagatcaagatgagcccatgtctacttcgatcagtttagcctagtcagtgtagaactgtttggcttccgagttcagatatttagctagcatagccaagtgaattttgttcctccagtgggtcatcaaggtgtgcatgtgtcctgggagagagagaagaaaatccagtctgcaggatggatgcaatggcacctgaagaatatgcctcgcaatccaagctactgcaagaattcaccaacgtcccaagcatcgacagtgcttccatcctcaaaaccaacgatgaggacagatccagagcgatgttctccattagccagccagacttactggcgaacaccaacaggaaatacgttttgtattctcatattacgacgagagccggcaccggcaccacctctccggatttccagtggtctcctttccccactgaaacaaccggagtgtccgccaccgttccgtccccttccgggtcgaagctcctcgtagtgcgaaacggggagagaggatgccccaccaagctcgaaatcgtttgtcagtcacatgtggagaaggagatacacgtagcaggttctgtgcacggtcctctctacacggatgaatggtttcatggtgtttcttggaatcaagaagagaccttggtagcatacgtcgctgaagctccagccacaccaagaccagctttcaatcgttccggatacacgagggaagaaggttgttccgagggagactgcagtgcctggaaagggcagggcgtgtgggaggaggactggggtgaaacgtactccaagaaaggaagaccctcactgtttgttcttgacattcccagaggagaagtggtagcggctaaaggtgtcccaacatcgttgagcgttgggcaggttgtttgggctccggaatcaccaggtggcaggcacaagtatctggttttcgttggatggtcagagcgcaacgggttcttccagaacactgctagaaaactcggcatcaagtactgctccaacaggccatgtgctctctatgcagccccttgccctatccaaggaccagagccgcctggcaatccaccggctacgaccagtgatggtaaatcaggctccggcggtgcggtggcgcgcaacctaaccccaggcttcagcagtgcattgtttccacggttcagccgggatggaaggcttctggtcttcctgtcttcaaaacaagccgtggacagcggtgcacacaacgcaacggattccctgcatgtgatcaactggccttcggactggaaaatggatgaacaactcgatgttactcaagtggtacctgttgtaatgtgccctgaagacgacgacggcggctgttttccaggcctctactgttcatccgtgctacccgatccttggctctccgacggacgtacagtgatattgacatcttcctggagaagtgccgaagtgatactatcggttgatgtgttaagtggcaaagtggcaagaataactccggaagactcgtgctactcgtggcgtgctcttgcgttagatggcaccaatgttcttgctgtgtcaagtagtcccatcgaccctccttccatcagctatggacgacgtctcgccgtgacaccagctgagggtgaagcacgtagatggacctgggatgaagttactagtccattcatggcatccaacagcaaggttaagtccttgttgctgcatcacagcgtcagcatacttaaaatccctgtccctagcccatctgctgacctctctgacggtggcaagcttccactcgaggccatattcgtgtcctgcagctgcaagggtagctcgcgcagtccaactgttgtggtccttcacggcggcccacactcggtgtccgtatcaagctactcaaaatcctcggcgttccttgcttcgcttggattcaacctgcttgttgtaaactaccgaggcacgccaggttatggagaggaagccttgcagtcgctccctggaaaagttggatcccaggatgttgaggactgccttgcagcgctagacttcgccgtcgaggaagagctggtagatgcgtctagagtagctgttgtcgggatctcgcatggtgggttcctgacaacacatctcatcggtcaggctccggacaggttcgccgtggcagctgctcggaaccctgtctgcaacctgtcgctgatggccggcaccaccgacatcccggactggtgttacgtagtggcctgcggaacccaagcgaagcgatacgcctctgaagcgccttcgcccggccatcttcgtctcttctaccagagatcgccgatcgcccatgtctctaaagtcaaagcgccccttcttatgcttcttggcggagctgaccttcgagtgcctgcttctaatggcctacagtacgcaaggagcctgatagaaagaggaggcgatgtcaaaatcatgatgttcccagaggacatacacgaaatcaatttaccgcggtccgatttcgaaagcttcctcaacattggggtatggttcaagaaacatctgaatgcagtggcatgaagcagatccggcttggtggttcatctaggcgaccatgtacagcattgctactttaagtttgtcaagaattcaaacttttttgtgaaaaaataaatgctcattcatactggtttcatacgacgttctagtgagtgttccaaagacatcgcctagccgtccagtcatatctagctgactagcttgtcttggagaacaatggcgccttgtagcctaacctgacatgtacaatgatgtttaatatagggtctcttaagttgtttaaaatggacattccgtgaagagacgtctctgactcgcaacccaagtaacaacagatgtctcacttttcgctgtacgaattcgtcgtctgatctattgatccgatgttgtacatgtacatttacttttgtatttattaatagactacgattatagacacttcgttatataataga

SEQ ID NO: 130464 - DNA, 2804 bp, Zea Mays
accttccgttcgattcccttcgcgtctttcttcctctgctggactcaagtactgcaaattagagcagaaaatcctgtgtctagatcaagatgagcccatgtctacttcgatcagtttagcctagtcagtgtagaactgtttggcttccgagttcagatatttagctagcatagccaagtgaattttgttcctccagtgggtcatcaaggtgtgcatgtgtcctgggagagagagaagaaaatccagtctgcaggatggatgcaatggcacctgaagaatatgcctcgcaatccaagctactgcaagaattcaccaacgtcccaagcatcgacagtgcttccatcctcaaaaccaacgatgaggacagatccagagcgatgttctccattagccagccagacttactggcgaacaccaacaggaaatacgttttgtattctcatattacgacgagagccggcaccggcaccacctctccggatttccagtggtctcctttccccactgaaacaaccggagtgtccgccaccgttccgtccccttccgggtcgaagctcctcgtagtgcgaaacggggagagaggatgccccaccaagctcgaaatcgtttgtcagtcacatgtggagaaggagatacacgtagcaggttctgtgcacggtcctctctacacggatgaatggtttcatggtgtttcttggaatcaagaagagaccttggtagcatacgtcgctgaagctccagccacaccaagaccagctttcaatcgttccggatacacgagggaagaaggttgttccgagggagactgcagtgcctggaaagggcagggcgtgtgggaggaggactggggtgaaacgtactccaagaaaggaagaccctcactgtttgttcttgacattcccagaggagaagtggtagcggctaaaggtgtcccaacatcgttgagcgttgggcaggttgtttgggctccggaatcaccaggtggcaggcacaagtatctggttttcgttggatggtcagagcgcaacgggttcttccagaacactgctagaaaactcggcatcaagtactgctccaacaggccatgtgctctctatgcagccccttgccctatccaaggaccagagccgcctggcaatccaccggctacgaccagtgatggtaaatcaggctccggcggtgcggtggcgcgcaacctaaccccaggcttcagcagtgcattgtttccacggttcagccgggatggaaggcttctggtcttcctgtcttcaaaacaagccgtggacagcggtgcacacaacgcaacggattccctgcatgtgatcaactggccttcggactggaaaatggatgaacaactcgatgttactcaagtggtacctgttgtaatgtgccctgaagacgacgacggcggctgttttccaggcctctactgttcatccgtgctacccgatccttggctctccgacggacgtacagtgatattgacatcttcctggagaagtgccgaagtgatactatcggttgatgtgttaagtggcaaagtggcaagaataactccggaagactcgtgctactcgtggcgtgctcttgcgttagatggcaccaatgttcttgctgtgtcaagtagtcccatcgaccctccttccatcagctatggacgacgtctcgccgtgacaccagctgagggtgaagcacgtagatggacctgggatgaagttactagtccattcatggcatccaacagcaaggttaagtccttgttgctgcatcacagcgtcagcatacttaaaatccctgtccctagcccatctgctgacctctctgacggtggcaagcttccactcgaggccatattcgtgtcctgcagctgcaagggtagctcgcgcagtccaactgttgtggtccttcacggcggcccacactcggtgtccgtatcaagctactcaaaatcctcggcgttccttgcttcgcttggattcaacctgcttgttgtaaactaccgaggcacgccaggttatggagaggaagccttgcagtcgctccctggaaaagttggatcccaggatgttgaggactgccttgcagcgctagacttcgccgtcgaggaagagctggtagatgcgtctagagtagctgttgtcgggatctcgcatggtgggttcctgacaacacatctcatcggtcaggctccggacaggttcgccgtggcagctgctcggaaccctgtctgcaacctgtcgctgatggccggcaccaccgacatcccggactggtgttacgtagtggcctgcggaacccaagcgaagcgatacgcctctgaagcgccttcgcccggccatcttcgtctcttctaccagagatcgccgatcgcccatgtctctaaatacgcaaggagcctgatagaaagaggaggcgatgtcaaaatcatgatgttcccagaggacatacacgaaatcaatttaccgcggtccgatttcgaaagcttcctcaacattggggtatggttcaagaaacatctgaatgcagtggcatgaagcagatccggcttggtggttcatctaggcgaccatgtacagcattgctactttaagtttgtcaagaattcaaacttttttgtgaaaaaataaatgctcattcatactggtttcatacgacgttctagtgagtgttccaaagacatcgcctagccgtccagtcatatctagctgactagcttgtcttggagaacaatggcgccttgtagcctaacctgacatgtacaatgatgtttaatatagggtctcttaagttgtttaaaatgg

SEQ ID NO: 130465 - DNA, 2483 bp, Zea Mays
accttccgttcgattcccttcgcgtctttcttcctctgctggactcaagtactgcaaattagagcagaaaatcctgtgtctagatcaagatgagcccatgtctacttcgatcagtttagcctagtcagtgtagaactgtttggcttccgagttcagatatttagctagcatagccaagtgaattttgttcctccagtgggtcatcaaggtgtgcatgtgtcctgggagagagagaagaaaatccagtctgcaggatggatgcaatggcacctgaagaatatgcctcgcaatccaagctactgcaagaattcaccaacgtcccaagcatcgacagtgcttccatcctcaaaaccaacgatgaggacagatccagagcgatgttctccattagccagccagacttactggcgaacaccaacaggaaatacgttttgtattctcatattacgacgagagccggcaccggcaccacctctccggatttccagtggtctcctttccccactgaaacaaccggagtgtccgccaccgttccgtccccttccgggtcgaagctcctcgtagtgcgaaacggggagagaggatgccccaccaagctcgaaatcgtttgtcagtcacatgtggagaaggagatacacgtagcaggttctgtgcacggtcctctctacacggatgaatggtttcatggtgtttcttggaatcaagaagagaccttggtagcatacgtcgctgaagctccagccacaccaagaccagctttcaatcgttccggatacacgagggaagaaggttgttccgagggagactgcagtgcctggaaagggcagggcgtgtgggaggaggactggggtgaaacgtactccaagaaaggaagaccctcactgtttgttcttgacattcccagaggagaagtggtagcggctaaaggtgtcccaacatcgttgagcgttgggcaggttgtttgggctccggaatcaccaggtggcaggcacaagtatctggttttcgttggatggtcagagcgcaacgggttcttccagaacactgctagaaaactcggcatcaagtactgctccaacaggccatgtgctctctatgcagccccttgccctatccaaggaccagagccgcctggcaatccaccggctacgaccagtgatggtaaatcaggctccggcggtgcggtggcgcgcaacctaaccccaggcttcagcagtgcattgtttccacggttcagccgggatggaaggcttctggtcttcctgtcttcaaaacaagccgtggacagcggtgcacacaacgcaacggattccctgcatgtgatcaactggccttcggactggaaaatggatgaacaactcgatgttactcaagtggtacctgttgtaatgtgccctgaagacgacgacggcggctgttttccaggcctctactgttcatccgtgctacccgatccttggctctccgacggacgtacagtgatattgacatcttcctggagaagtgccgaagtgatactatcggttgatgtgttaagtggcaaagtggcaagaataactccggaagactcgtgctactcgtggcgtgctcttgcgttagatggcaccaatgttcttgctgtgtcaagtagtcccatcgaccctccttccatcagctatggacgacgtctcgccgtgacaccagctgagggtgaagcacgtagatggacctgggatgaagttactagtccattcatggcatccaacagcaaggttaagtccttgttgctgcatcacagcgtcagcatacttaaaatccctgtccctagcccatctgctgacctctctgacggtggcaagcttccactcgaggccatattcgtgtcctgcagctgcaagggtagctcgcgcagtccaactgttgtggtccttcacggcggcccacactcggtgtccgtatcaagctactcaaaatcctcggcgttccttgcttcgcttggattcaacctgcttgttgtaaactaccgaggcacgccaggttatggagaggaagccttgcagtcgctccctggaaaagttggatcccagtacgcaaggagcctgatagaaagaggaggcgatgtcaaaatcatgatgttcccagaggacatacacgaaatcaatttaccgcggtccgatttcgaaagcttcctcaacattggggtatggttcaagaaacatctgaatgcagtggcatgaagcagatccggcttggtggttcatctaggcgaccatgtacagcattgctactttaagtttgtcaagaattcaaacttttttgtgaaaaaataaatgctcattcatactggtttcatacgacgttctagtgagtgttccaaagacatcgcctagccgtccagtcatatctagctgactagcttgtcttggagaacaatggcgccttgtagcctaacctgacatgtacaatgatgtttaatatagggtctcttaagttgtttaaaatgg

SEQ ID NO: 130466 - DNA, 2928 bp, Zea Mays
gtcagttacagatctgacgctaccttccgttcgattcccttcgcgtctttcttcctctgctggactcaagtactgcaaattagagcagaaaatcctgtgtaagcaatttccattcgcgctgtcatctcttcctcgatcgaaggtctagatcaagatgagcccatgtctacttcgatcagtttagcctagtcagtgtagaactgtttggcttccgagttcagatatttagctagcatagccaagtgaattttgttcctccagtgggtcatcaaggtgtgcatgtgtcctgggagagagagaagaaaatccagtctgcaggatggatgcaatggcacctgaagaatatgcctcgcaatccaagctactgcaagaattcaccaacgtcccaagcatcgacagtgcttccatcctcaaaaccaacgatgaggacagatccagagcgatgttctccattagccagccagacttactggcgaacaccaacaggaaatacgttttgtattctcatattacgacgagagccggcaccggcaccacctctccggatttccagtggtctcctttccccactgaaacaaccggagtgtccgccaccgttccgtccccttccgggtcgaagctcctcgtagtgcgaaacggggagagaggatgccccaccaagctcgaaatcgtttgtcagtcacatgtggagaaggagatacacgtagcaggttctgtgcacggtcctctctacacggatgaatggtttcatggtgtttcttggaatcaagaagagaccttggtagcatacgtcgctgaagctccagccacaccaagaccagctttcaatcgttccggatacacgagggaagaaggttgttccgagggagactgcagtgcctggaaagggcagggcgtgtgggaggaggactggggtgaaacgtactccaagaaaggaagaccctcactgtttgttcttgacattcccagaggagaagtggtagcggctaaaggtgtcccaacatcgttgagcgttgggcaggttgtttgggctccggaatcaccaggtggcaggcacaagtatctggttttcgttggatggtcagagcgcaacgggttcttccagaacactgctagaaaactcggcatcaagtactgctccaacaggccatgtgctctctatgcagccccttgccctatccaaggaccagagccgcctggcaatccaccggctacgactgatggtaaatcaggctccggcggtgcggtggcgcgcaacctaaccccaggcttcagcagtgcattgtttccacggttcagccgggatggaaggcttctggtcttcctgtcttcaaaacaagccgtggacagcggtgcacacaacgcaacggattccctgcatgtgatcaactggccttcggactggaaaatggatgaacaactcgatgttactcaagtggtacctgttgtaatgtgccctgaagacgacgacggcggctgttttccaggcctctactgttcatccgtgctacccgatccttggctctccgacggacgtacagtgatattgacatcttcctggagaagtgccgaagtgatactatcggttgatgtgttaagtggcaaagtggcaagaataactccggaagactcgtgctactcgtggcgtgctcttgcgttagatggcaccaatgttcttgctgtgtcaagtagtcccatcgaccctccttccatcagctatggacgacgtctcgccgtgacaccagctgagggtgaagcacgtagatggacctgggatgaagttactagtccattcatggcatccaacagcaaggttaagtccttgttgctgcatcacagcgtcagcatacttaaaatccctgtccctagcccatctgctgacctctctgacggtggcaagcttccactcgaggccatattcgtgtcctgcagctgcaagggtagctcgcgcagtccaactgttgtggtccttcacggcggcccacactcggtgtccgtatcaagctactcaaaatcctcggcgttccttgcttcgcttggattcaacctgcttgttgtaaactaccgaggcacgccaggttatggagaggaagccttgcagtcgctccctggaaaagttggatcccaggatgttgaggactgccttgcagcgctagacttcgccgtcgaggaagagctggtagatgcgtctagagtagctgttgtcgggatctcgcatggtgggttcctgacaacacatctcatcggtcaggctccggacaggttcgccgtggcagctgctcggaaccctgtctgcaacctgtcgctgatggccggcaccaccgacatcccggactggtgttacgtagtggcctgcggaacccaagcgaagcgatacgcctctgaagcgccttcgcccggccatcttcgtctcttctaccagagatcgccgatcgcccatgtctctaaagtcaaagcgccccttcttatgcttcttggcggagctgaccttcgagtgcctgcttctaatggcctacagtacgcaaggagcctgatagaaagaggaggcgatgtcaaaatcatgatgttcccagaggacatacacgaaatcaatttaccgcggtccgatttcgaaagcttcctcaacattggggtatggttcaagaaacatctgaatgcagtggcatgaagcagatccggcttggtggttcatctaggcgaccatgtacagcattgctactttaagtttgtcaagaattcaaacttttttgtgaaaaaataaatgctcattcatactggtttcatacgacgttctagtgagtgttccaaagacatcgcctagccgtccagtcatatctagctgactagcttgtcttggagaacaatggcgccttgtagcctaacctgacatgtacaatgatgtttaatatagggtctcttaagttgttt

SEQ ID NO: 130467 - DNA, 2907 bp, Zea Mays
gtcagttacagatctgacgctaccttccgttcgattcccttcgcgtctttcttcctctgctggactcaagtactgcaaattagagcagaaaatcctgtgtctagatcaagatgagcccatgtctacttcgatcagtttagcctagtcagtgtagaactgtttggcttccgagttcagatatttagctagcatagccaagtgaattttgttcctccagtgggtcatcaaggtgtgcatgtgtcctgggagagagagaagaaaatccagtctgcaggatggatgcaatggcacctgaagaatatgcctcgcaatccaagctactgcaagaattcaccaacgtcccaagcatcgacagtgcttccatcctcaaaaccaacgatgaggacagatccagagcgatgttctccattagccagccagacttactggcgaacaccaacaggaaatacgttttgtattctcatattacgacgagagccggcaccggcaccacctctccggatttccagtggtctcctttccccactgaaacaaccggagtgtccgccaccgttccgtccccttccgggtcgaagctcctcgtagtgcgaaacggggagagaggatgccccaccaagctcgaaatcgtttgtcagtcacatgtggagaaggagatacacgtagcaggttctgtgcacggtcctctctacacggatgaatggtttcatggtgtttcttggaatcaagaagagaccttggtagcatacgtcgctgaagctccagccacaccaagaccagctttcaatcgttccggatacacgagggaagaaggttgttccgagggagactgcagtgcctggaaagggcagggcgtgtgggaggaggactggggtgaaacgtactccaagaaaggaagaccctcactgtttgttcttgacattcccagaggagaagtggtagcggctaaaggtgtcccaacatcgttgagcgttgggcaggttgtttgggctccggaatcaccaggtggcaggcacaagtatctggttttcgttggatggtcagagcgcaacgggttcttccagaacactgctagaaaactcggcatcaagtactgctccaacaggccatgtgctctctatgcagccccttgccctatccaaggaccagagccgcctggcaatccaccggctacgaccagtgatggtaaatcaggctccggcggtgcggtggcgcgcaacctaaccccaggcttcagcagtgcattgtttccacggttcagccgggatggaaggcttctggtcttcctgtcttcaaaacaagccgtggacagcggtgcacacaacgcaacggattccctgcatgtgatcaactggccttcggactggaaaatggatgaacaactcgatgttactcaagtgcttgatctgaactgtcccaggtacctgttgtaatgtgccctgaagacgacgacggcggctgttttccaggcctctactgttcatccgtgctacccgatccttggctctccgacggacgtacagtgatattgacatcttcctggagaagtgccgaagtgatactatcggttgatgtgttaagtggcaaagtggcaagaataactccggaagactcgtgctactcgtggcgtgctcttgcgttagatggcaccaatgttcttgctgtgtcaagtagtcccatcgaccctccttccatcagctatggacgacgtctcgccgtgacaccagctgagggtgaagcacgtagatggacctgggatgaagttactagtccattcatggcatccaacagcaaggttaagtccttgttgctgcatcacagcgtcagcatacttaaaatccctgtccctagcccatctgctgacctctctgacggtggcaagcttccactcgaggccatattcgtgtcctgcagctgcaagggtagctcgcgcagtccaactgttgtggtccttcacggcggcccacactcggtgtccgtatcaagctactcaaaatcctcggcgttccttgcttcgcttggattcaacctgcttgttgtaaactaccgaggcacgccaggttatggagaggaagccttgcagtcgctccctggaaaagttggatcccaggatgttgaggactgccttgcagcgctagacttcgccgtcgaggaagagctggtagatgcgtctagagtagctgttgtcgggatctcgcatggtgggttcctgacaacacatctcatcggtcaggctccggacaggttcgccgtggcagctgctcggaaccctgtctgcaacctgtcgctgatggccggcaccaccgacatcccggactggtgttacgtagtggcctgcggaacccaagcgaagcgatacgcctctgaagcgccttcgcccggccatcttcgtctcttctaccagagatcgccgatcgcccatgtctctaaagtcaaagcgccccttcttatgcttcttggcggagctgaccttcgagtgcctgcttctaatggcctacagtacgcaaggagcctgatagaaagaggaggcgatgtcaaaatcatgatgttcccagaggacatacacgaaatcaatttaccgcggtccgatttcgaaagcttcctcaacattggggtatggttcaagaaacatctgaatgcagtggcatgaagcagatccggcttggtggttcatctaggcgaccatgtacagcattgctactttaagtttgtcaagaattcaaacttttttgtgaaaaaataaatgctcattcatactggtttcatacgacgttctagtgagtgttccaaagacatcgcctagccgtccagtcatatctagctgactagcttgtcttggagaacaatggcgccttgtagcctaacctgacatgtacaatgatgtttaatatagggtctcttaagttgttt

SEQ ID NO: 130468 - DNA, 2841 bp, Zea Mays
gtcagttacagatctgacgctaccttccgttcgattcccttcgcgtctttcttcctctgctggactcaagtactgcaaattagagcagaaaatcctgtgtaagcaatttccattcgcgctgtcatctcttcctcgatcgaaggtttgctgtgaatttgtagattgcggttttgatgttgtggacaattttgtggctacatacggttgcttcgtccatctgtacttggcttaattaacccaatcatctgctaggtctagatcaagatgagcccatgtctacttcgatcagtttagcctagtcagtgtagaactgtttggcttccgagttcagatatttagctagcatagccaagtgaattttgttcctccagtgggtcatcaaggtgtgcatgtgtcctgggagagagagaagaaaatccagtctgcaggatggatgcaatggcacctgaagaatatgcctcgcaatccaagctactgcaagaattcaccaacgtcccaagcatcgacagtgcttccatcctcaaaaccaacgatgaggacagatccagagcgatgttctccattagccagccagacttactggcgaacaccaacaggaaatacgttttgtattctcatattacgacgagagccggcaccggcaccacctctccggatttccagtggtctcctttccccactgaaacaaccggagtgtccgccaccgttccgtccccttccgggtcgaagctcctcgtagtgcgaaacggggagagaggatgccccaccaagctcgaaatcgtttgtcagtcacatgtggagaaggagatacacgtagcaggttctgtgcacggtcctctctacacggatgaatggtttcatggtgtttcttggaatcaagaagagaccttggtagcatacgtcgctgaagctccagccacaccaagaccagctttcaatcgttccggatacacgagggaagaaggttgttccgagggagactgcagtgcctggaaagggcagggcgtgtgggaggaggactggggtgaaacgtactccaagaaaggaagaccctcactgtttgttcttgacattcccagaggagaagtggtagcggctaaaggtgtcccaacatcgttgagcgttgggcaggttgtttgggctccggaatcaccaggtggcaggcacaagtatctggttttcgttggatggtcagagcgcaacgggttcttccagaacactgctagaaaactcggcatcaagtactgctccaacaggccatgtgctctctatgcagccccttgccctatccaaggaccagagccgcctggcaatccaccggctacgaccagtgatggtaaatcaggctccggcggtgcggtggcgcgcaacctaaccccaggcttcagcagtgcattgtttccacggttcagccgggatggaaggcttctggtcttcctgtcttcaaaacaagccgtggacagcggtgcacacaacgcaacggattccctgcatgtgatcaactggccttcggactggaaaatggatgaacaactcgatgttactcaagtggtacctgttgtaatgtgccctgaagacgacgacggcggctgttttccaggcctctactgttcatccgtgctacccgatccttggctctccgacggacgtacagtgatattgacatcttcctggagaagtgccgaagtgatactatcggttgatgtgttaagtggcaaagtggcaagaataactccggaagactcgtgctactcgtggcgtgctcttgcgttagatggcaccaatgttcttgctgtgtcaagtagtcccatcgaccctccttccatcagctatggacgacgtctcgccgtgacaccagctgagggtgaagcacgtagatggacctgggatgaagttactagtccattcatggcatccaacagcaaggttaagtccttgttgctgcatcacagcgtcagcatacttaaaatccctgtccctagcccatctgctgacctctctgacggtggcaagcttccactcgaggccatattcgtgtcctgcagctgcaagggtagctcgcgcagtccaactgttgtggtccttcacggcggcccacactcggtgtccgtatcaagctactcaaaatcctcggcgttccttgcttcgcttggattcaacctgcttgttgtaaactaccgaggcacgccaggttatggagaggaagccttgcagtcgctccctggaaaagttggatcccaggatgttgaggactgccttgcagcgctagacttcgccgtcgaggaagagctggtagatgcgtctagagtagctgttgtcgggatctcgcatggtgggttcctgacaacacatctcatcggtcaggctccggacaggttcgccgtggcagctgctcggaaccctgtctgcaacctgtcgctgatggccggcaccaccgacatcccggactggtgttacgtagtggcctgcggaacccaagcgaagcgatacgcctctgaagcgccttcgcccggccatcttcgtctcttctaccagagatcgccgatcgcccatgtctctaaagtatgctgcttctctccggcctgcctgctcctctcctaccagctggttgatttgattgtcgttttggtggtacgtacggttgatggagctttgctgagtgagagcgtgcaggtcaaagcgccccttcttatgcttcttggcggagctgaccttcgagtgcctgcttctaatggcctacaggtcttcactcgacgtgtaggactttggcatcctctgaccatccgtggtagggcattggacaatccacagttgggtaccagattgtccgcgatgacgtag

SEQ ID NO: 130469 - DNA, 1840 bp, Zea Mays
gtcagttacagatctgacgctaccttccgttcgattcccttcgcgtctttcttcctctgctggactcaagtactgcaaattagagcagaaaatcctgtgtctagatcaagatgagcccatgtctacttcgatcagtttagcctagtcagtgtagaactgtttggcttccgagttcagatatttagctagcatagccaagtgaattttgttcctccagtgggtcatcaaggtgtgcatgtgtcctgggagagagagaagaaaatccagtctgcaggatggatgcaatggcacctgaagaatatgcctcgcaatccaagctactgcaagaattcaccaacgtcccaagcatcgacagtgcttccatcctcaaaaccaacgatgaggacagatccagagcgatgttctccattagccagccagacttactggcgaacaccaacaggaaatacgttttgtattctcatattacgacgagagccggcaccggcaccacctctccggatttccagtggtctcctttccccactgaaacaaccggagtgtccgccaccgttccgtccccttccgggtcgaagctcctcgtagtgcgaaacggggagagaggatgccccaccaagctcgaaatcgtttgtcagtcacatgtggagaaggagatacacgtagcaggttctgtgcacggtcctctctacacggatgaatggtttcatggtgtttcttggaatcaagaagagaccttggtagcatacgtcgctgaagctccagccacaccaagaccagctttcaatcgttccggatacacgagggaagaaggttgttccgagggagactgcagtgcctggaaagggcagggcgtgtgggaggaggactggggtgaaacgtactccaagaaaggaagaccctcactgtttgttcttgacattcccagaggagaagtggtagcggctaaaggtgtcccaacatcgttgagcgttgggcaggttgtttgggctccggaatcaccaggtggcaggcacaagtatctggttttcgttggatggtcagagcgcaacgggttcttccagaacactgctagaaaactcggcatcaagtactgctccaacaggccatgtgctctctatgcagccccttgccctatccaaggaccagagccgcctggcaatccaccggctacgaccagtgatggtaaatcaggctccggcggtgcggtggcgcgcaacctaaccccaggcttcagcagtgcattgtttccacggttcagccgggatggaaggcttctggtcttcctgtcttcaaaacaagccgtggacagcggtgcacacaacgcaacggattccctgcatgtgatcaactggccttcggactggaaaatggatgaacaactcgatgttactcaagtggtacctgttgtaatgtgccctgaagacgacgacggcggctgttttccaggcctctactgttcatccgtgctacccgatccttggctctccgacggacgtacagtgatattgacatcttcctggagaagtgccgaagtgatactatcggttgatgtgttaaggtaaatcgtataggctctgttaccatgttctagagctcaaaggacgacgacgaccggtttgacatcctctacatcgactcatttgtacagtggcaaagtggcaagaataactccggaagactcgtgctactcgtggcgtgctcttgcgttagatggcaccaatgttcttgctggtaattgtagctgtaaactggcattccaaaatttatagatgcatgtaaaaactggtgctgaactcgtgcttcaaaatttctgaaggcaaacttgtattctctctccctc

SEQ ID NO: 130470 - DNA, 1744 bp, Zea Mays
gtcagttacagatctgacgctaccttccgttcgattcccttcgcgtctttcttcctctgctggactcaagtactgcaaattagagcagaaaatcctgtgtctagatcaagatgagcccatgtctacttcgatcagtttagcctagtcagtgtagaactgtttggcttccgagttcagatatttagctagcatagccaagtgaattttgttcctccagtgggtcatcaaggtgtgcatgtgtcctgggagagagagaagaaaatccagtctgcaggatggatgcaatggcacctgaagaatatgcctcgcaatccaagctactgcaagaattcaccaacgtcccaagcatcgacagtgcttccatcctcaaaaccaacgatgaggacagatccagagcgatgttctccattagccagccagacttactggcgaacaccaacaggaaatacgttttgtattctcatattacgacgagagccggcaccggcaccacctctccggatttccagtggtctcctttccccactgaaacaaccggagtgtccgccaccgttccgtccccttccgggtcgaagctcctcgtagtgcgaaacggggagagaggatgccccaccaagctcgaaatcgtttgtcagtcacatgtggagaaggagatacacgtagcaggttctgtgcacggtcctctctacacggatgaatggtttcatggtgtttcttggaatcaagaagagaccttggtagcatacgtcgctgaagctccagccacaccaagaccagctttcaatcgttccggatacacgagggaagaaggttgttccgagggagactgcagtgcctggaaagggcagggcgtgtgggaggaggactggggtgaaacgtactccaagaaaggaagaccctcactgtttgttcttgacattcccagaggagaagtggtagcggctaaaggtgtcccaacatcgttgagcgttgggcaggttgtttgggctccggaatcaccaggtggcaggcacaagtatctggttttcgttggatggtcagagcgcaacgggttcttccagaacactgctagaaaactcggcatcaagtactgctccaacaggccatgtgctctctatgcagccccttgccctatccaaggaccagagccgcctggcaatccaccggctacgaccagtgatggtaaatcaggctccggcggtgcggtggcgcgcaacctaaccccaggcttcagcagtgcattgtttccacggttcagccgggatggaaggcttctggtcttcctgtcttcaaaacaagccgtggacagcggtgcacacaacgcaacggattccctgcatgtgatcaactggccttcggactggaaaatggatgaacaactcgatgttactcaagtggtacctgttgtaatgtgccctgaagacgacgacggcggctgttttccaggcctctactgttcatccgtgctacccgatccttggctctccgacggacgtacagtgatattgacatcttcctggagaagtgccgaagtgatactatcggttgatgtgttaagtggcaaagtggcaagaataactccggaagactcgtgctactcgtggcgtgctcttgcgttagatggcaccaatgttcttgctggtaattgtagctgtaaactggcattccaaaatttatagatgcatgtaaaaactggtgctgaactcgtgcttcaaaatttctgaaggcaaacttgtattctctc

SEQ ID NO: 130471 - DNA, 125 bp, Zea Mays
ttttttttttaattttatttacttcactaaccttttttttatcgaggaagaatttctcgaccagattaaattattctgcagcctattcacacagttcaccgatgagtagtagtagcttgatctga

SEQ ID NO: 130472 - DNA, 2738 bp, Zea Mays
tccgctgcaaggcagaggcagacgcattcagctcctcgttttttctctctcctctcttcgtccccgcgtggagaaggagagagagaaacaggggagcgccccccactcctcttcgctgccaagaaaccaccattcctaacggatttctacccagtcttctttaggatttccgattcggttctccggtgagagggtgggaattttattttcctccgctgcaaccggtgcaaacatttcgaatccctccattccattcctctccgtgcaatcggccattcatatgctctttggctgcattgaggcatcggtacgcgaattttgatgtgagctgaccagacatggctgcgaaagacggctcgggatcacaagatctgggggggcacacgttctggcccatgctgtcctacgcttgcggcgagctgtgtgtgatcgtactgctctacgtgtctgccctggcgtcctatgcggccacgaggctggcgcgcgtctgcgggctccggccgccctgcatcctgtgcgggaggctggaccacgccctccacgggaagccatggttctcttcggacttggtctgtgccgcgcatcggtctgagatctcgtctctggctcactgcaagacccatgaccagcttgttgcatgctccggcgatctctctcggcctacgtcggccaggtcaagaaggttgtgttcttgttcggatccactcaagaatgctcgcggcgcgcagaagcattctgaagcagccaatgctgtggagtcttgggatagcagtgtacctgcagatcatccaaatgagaagacttttgtggtgggcattgaggaagtccatgaatcagatggttcgccaggctcgcatggacaatctacaaaggacagcgccccttctgcgaacggtggtggggcagcaaagagcaactacatatcgcccgcaccaacacgcatcgctgtcgaccgcaacggcagtgtgaagaatgcttccgtcgctagggccaacttgacatctcctcggccatcagagatcatctctgccagggacagcaattccacgacccagcaagaagtgaaggcgctcctctctcagatgtcatctgtgcggggcctcgatggttcttccagtgaaggatctcctagccccggtaccagcgctccgaacgaagagagcaaccctgcggcagcgagcaagaggccgtatctcgagaggaactactccgtgctggaaccttcagaagggagccagctcgccgacgacgtggaaggggaaagctctctcgagaacgtgaagaaacagcttgagctcaacaagaaggcaatggccgctctttacaaggagcttgaggaagaacggagcgcttcggcggtcgcggctagccagacgatggccatgatcaataggctgcaggaggagaaggctgcaatgcagatggaggctctgcagtacctgaggatgatggaacagcaggctgaccacgaccacctggcgattcaggacctgcacgatttgcttacggagagggagaaagagttgcttgacttggacgctgagctcgcgcactgcaggaggctcctgcagaacgatccgttcaacggcgacggacgtaataatggcgctgacacagtgaacacaacgattgacggcagaaatccggcggcgatcgaatgcttggatggcgcggaccttgtggggagcgccatgtcgcttttcgaagacgagaaggcgttcattttggagtccttgagcagactggaggaaaaccttggcattttcacaaacaggcttgcttccggtgacgccagaggtagtcaagaagacgtgctgtttgaagagcatgagcatacaacagctgatgggtctccttccaacggtgacaagttgagcggcgtagcgaatcttaaggctgggatttctctgctcaatataagactgagggcacttgaagacgaccaggagtttctcaagcaggtgttgagttccctccaatgcggtagtgatggactgcagtgtatacaggagataagcggccatctagcagagttgcgaagagttgtaactcgctaaggaaaatggttttgccccgagtccacactgttaggtcatcgtgaggtcttctcatgcagcagactaacgagggtgcttccagtgagtgcccacaatcccatctatctgaagatggatgccgttgcaggaaatacccatgctcttcacttctgatcgggctcaacagcagaccaaaattttccatctcttgcacttgagttcctcatcgacatttgcagactactgaagcagatggaactctaaaagaagtgctgaaagagacgaaccatctcttgtatgtgatatggtggttgttgagaaagtaggagcaagcctgtaactgtagatgtaaccaaccttgatggttcctgccaaggaggagttaaattgtacatgatatatgcagttgacgtaaagtcagcgaatatctccttattctgggatgcaaggtgtcatgacaatcaaatttccttgtctccaaccttccaattttccaccggctggcgttctgtagcttaacactccttgtggactaaacatcacctttcactcacatgaaatatatcagtccactaatgttgcaactcaactaccgaaacacaaatgggggtctaaatgcttcgagctttacacctacacgtagaggtggtaatggattgatcccttaattaattttagtttaaaaaaaaatagaaaaataga

SEQ ID NO: 130473 - DNA, 2274 bp, Zea Mays
cccagtcttcctttctccacttgatccctcacgtgctcctctgctccgcggctcatagtcgccgccgccgccgccgccattgccgcctcccgcttgtacgcctccccagtccccaccggacccctccctgcggagtactagtgaccatggctcacatgcagtcaagtccgaaggggcaagaggttcatgaggtcaccaggaaatccaatgaccagattgttctgaaacaagacactgttgatgatgaagactctggtgataccacctcctctgctggtgaaagcaagtatcctggttggcctggaactactgtgttcaggatgctgattcctgcacagaaggtcggtgcaataatcggccacaaaggtgagagggtcagaagactgtgtgaggaaacaagagcctgtgttcgtattattggcggtcatctttgtgctgcagagcaagctgtaatcatttttggaagggagcagcttgatgagccattacctccagccatggatgccctactaagagtatatcagcaaacaattaacaatgactctttagatgtgggacccgataatgtgattgtgaggcggattcttgcaccaagtgagcaagcagcaagccttattggcgagcatggtgtgatgattaattcaatcatggaagcttctcaaaccgacatccgtgtccttgatgatgatctacctcctgttgcactggaagaagatagggttattgaaatatggggatcgcctgcaggagtgtataaggctttggaacttgttgcttctcatctgagaaagtacctggttgatcgaagtgtgatcccattgtttgaccgttatgttcccatgccaatcttgcacatggacatgcctccatgtcactacattgactatcctgagggccctgtgcatccagttagtccaggctatcactctgtatctactgaaaatctccaacatgaacgatggattggcactagctatttgaggggtaggcatcctatgggaaatctacgacatgctgatacatttgaatacagatgggaagcacctacacctttcaggagatatcgatctgttacaccaccaaatcatgctataagtgcatatgggccagaagcatcttcacctacggaagcatatctatcagctccaatgaaatcacgttcacaccacagccttataaatggttggcatgcatctccagttagttcaacagattctgatgaaagaatatgctcccttatatctgtgtatggacaacaagcacagctacagaaacagacatgtcaatcagctaaattgggtaaaaatccacagttcggaatatctttacatggaagtgaaagtgaagcccatccaacaagggtatctccatcagattctaccgaacaacctccatctccatgcttcagaattcatccaccaactactgtggaaaatcttctacactgtcgtgtatctgcatgtggaccagaagcatcactaccactacatctggctgtaacatcatcaactagtcgatcaacagtagttgcttctcaggttaagaaaaagatgcaagtaccaatattctatgctgaagctgtcattggcccaactggtgaaagaattgaatacattcgtcgtaccagcaggtcgagcattttgataagcaattctgagggcacaatgtatattgagatcactggaagtgctgcaacagatgttctaactgcagagcagctgattaagaactttatggccgaagcagctgccgcctcccctggtcacagttacgacttcattccatcatatttgccagcacccagatctgcccaagctgatatttttgcttcccctgagacaagtgaagtgtccagtttgccagaacggcgcctgcaaatgatttactgaatatccccaacagttttgtttctgcacataccaccaaagatagccaagcaccaataccggcaacacaggaatataccagagagtaaattgagaagatgttttgatatccaccctgagactatgcaagctttacaatttcaaccctttcatctggattacttctagactctttgttttgttgtagccttgattcattccatggattgaaccttagaaactagagcctgagcatatgcttctgtatatggattatggaagcaaagttttggttgattcagcgaaggggtagcacgatatgtgtgccgggatgattgaacggttgcatttcaccgaaacaaattcgtaaacctttgctccatgagatacctattgtttgttgtctgtt

SEQ ID NO: 130474 - DNA, 1338 bp, Zea Mays
caccctctccattcttcgttcggatccacgtattgccggacccgctgtcagagtctgacatcgcttgggcgtctggacggtcaacgttaaccccacgcacgcttcttctcccccagttcaagtgccacaccggccgctcgtcgccttcccatctcgccgcgccatggatttctgcagccacctccgtctcgcggctgtgctcgcgctcctcaccggatgcgcttctgcggcgagccggggcgctggttccttcgacccatcccgcgtggttcaactctcttggcgccccagggcgttcttgcacaagggtttcctgttggatgcggagtgcgaccacctcatcgcgctggccaaggacaagctggagaagtctatggtggcggacaacaagtccggtaagagtgtccagagtgaggtgcgcaccagttccggcatgttcctcgagaagaagcaggatgaagtagtaacgaggatagaggagaggatatctgcttggacatttcttccaccagagaatggtgaagccattcagatattacactaccagaatggtgagaaatatgaaccccactacgactacttccatgacaaaaataatcaggccctgggcggccatcgcattgccactgtgctgatgtacctatcaaatgtcgagaagggtggagagaccatcttccccaatgcagaggggaagctattgcaacccaaggacgacacttggtctgattgtgcaagaaacggatatgcagttaaaccggtaaagggtgatgccctgctgttcttcagtctccaccctgattcaacaacagactctgacagcttgcacggtagctgccccgccatcgaaggccagaagtggtccgcgactaaatggatccatgtgaggtcatttgacctcaccgtcaagcagccgggtccctctgatggatgtgaggacgacaatgtcctctgcccccagtgggcggccgtgggcgagtgcgccaagaaccctaactacatggtggggaccaaggaagcacctggcttctgccggaagagctgcaaagtatgcgcagagtaaggtatcggtcctctgcgtctgatgagtaatcgtggcgtacgtgttacgtagttgctgtcaccattttaccagggtttaggtacgaccgagtacagcatgtataagacagtacaaacccggaagaaggaatcgtaagagttaggggacgagttaccagggtttaccgagttaaagctgagcaatctaatcaatggcaacagttcgagcaaatcttgtttccttcatttgtcatggtaacttgtcctgtgggaaatgaaaagcttgttggcgagggcggt

SEQ ID NO: 130475 - DNA, 1468 bp, Zea Mays
caccctctccattcttcgttcggatccacgtattgccggacccgctgtcagagtctgacatcgcttgggcgtctggacggtcaacgttaaccccacgcacgcttcttctcccccagttcaagtgccacaccggccgctcgtcgccttcccatctcgccgcgccatggatttctgcagccacctccgtctcgcggctgtgctcgcgctcctcaccggatgcgcttctgcggcgagccggggcgctggttccttcgacccatcccgcgtggttcaactctcttggcgccccagggcgttcttgcacaagggtttcctgttggatgcggagtgcgaccacctcatcgcgctggccaaggacaagctggagaagtctatggtggcggacaacaagtccggtaagagtgtccagagtgaggtgcgcaccagttccggcatgttcctcgagaagaagcagggaaaaagactgggaaggccccatggtcctaggttcaaaatgaagcctcaacatttcatggcttatgtggaatgagtaatgtagtgtagaagatctatctcttggctggcaacaattatctatgtacagactacaaaacgtaacattgatatgacgatatgttaactgagatactcacctgtcaggatgaagtagtaacgaggatagaggagaggatatctgcttggacatttcttccaccagagaatggtgaagccattcagatattacactaccagaatggtgagaaatatgaaccccactacgactacttccatgacaaaaataatcaggccctgggcggccatcgcattgccactgtgctgatgtacctatcaaatgtcgagaagggtggagagaccatcttccccaatgcagaggggaagctattgcaacccaaggacgacacttggtctgattgtgcaagaaacggatatgcagttaaaccggtaaagggtgatgccctgctgttcttcagtctccaccctgattcaacaacagactctgacagcttgcacggtagctgccccgccatcgaaggccagaagtggtccgcgactaaatggatccatgtgaggtcatttgacctcaccgtcaagcagccgggtccctctgatggatgtgaggacgacaatgtcctctgcccccagtgggcggccgtgggcgagtgcgccaagaaccctaactacatggtggggaccaaggaagcacctggcttctgccggaagagctgcaaagtatgcgcagagtaaggtatcggtcctctgcgtctgatgagtaatcgtggcgtacgtgttacgtagttgctgtcaccattttaccagggtttaggtacgaccgagtacagcatgtataagacagtacaaacccggaagaaggaatcgtaagagttaggggacgagttaccagggtttaccgagttaaagctgagcaatctaatcaatggcaacagttcgagcaaatcttgtttccttc

SEQ ID NO: 130476 - DNA, 208 bp, Zea Mays
aacaaaatttcccagagttattcagtacttgcaatcacatcagagcaactcagcagttgcatccacaccacaccagtagttgcaattacaacacaccagcagttgcaatcattttgtttacattttttaacagatatttgggtagaattatacaacagttgcaatcacacctaatgcggggttgcaatcacaccacaccagcagttgc

SEQ ID NO: 130477 - DNA, 252 bp, Zea Mays
atgtgcgaagagataattttctcctttatgttcaagagaatatgtccctgcgacatttttcactcgaatgtcaagtgctggaaaaataacctgcaaacatcaacagaaaaatcttataccacaaatgttctgtgcatcacgacgggcttacagttggccaataaatttccacaaatataccaatatatgggcatttcagaaattaatatatctatgataaaaacatgtagctatacaaggtccatgctttga

SEQ ID NO: 130478 - DNA, 1997 bp, Zea Mays
ctattccaattccacctccccgtccaactgaaacccccatcgccacgccaccacacacctgacacctccgccgcgcccgcgccgtctaccattccggcgtccagcacctccctagtcggctagtccctccccgccgccgctaccgtcacgcctcctcccttgcccccaccacgcaagtcccaaccatctcctccgtcctatatatctgccacctcgccccaggcacacacctgacaccacaaactacctgccgacaagatggcctccgcctccccgtccgcgtctgcgtcgtccgagcctgctgcggcgcccgaggttgatgctccagctgccgccctgccggccgagggccccacggagatcgccttcttcgacgtcgagacctcggtgccgcagcgcgcgggccagggctacgcgctgctcgagttcggcgccatcctcgtctgcccgcgcaggctcgtcgaggtcgcctcctacgccacgctcgtccgccccgccgacccggcctctgccgtctcggcggcctccgtgcgctgcaacggcatcacacgggacgccgtgtccgcggcgccgcccttccgcgacgtcgccgatgccgtctacgacctcctcaacgggcgggtctgggcagggcacaacattgtgaggtttgattctgcaagaataagggaggcgttcactgagattggtcgctcacctcctcagcccaaggggatgattgacaccttgcctctgcttacccaacgctttgggaggagggcaggggacatgaagatggcaagcttggcaaattactttggactagggaagcaaagacacaggagtcttgatgatgttagaatgaaccttgaagttctcaaatactgtgctacagttctgttcctggaggcaagtcttccagaggtgcttactgttgagaatctggttgaacgtgcaatgacaaggagccgagctaatggaactgcatcccctgatttgccaaaacctgaagcgaactctccaccggattcctcaaaaaggcaacggacagtctctccagttgactgtgtgatgcctgcggaaggtaatcaaggaacaagtgatccttctaccaacagggaatctgttgagttggtatcccacattgaagaaatgaagctaaataccaccacacatgtggatgcaagttctagtggttatcctggatttcttgagccagacgatgtttccattgagtgtattaaaatttcagttgctccattacaccaatttggcagaaggtcatctatccagcacagagattgtccactgcagctttgttgtgcaggcttgaaagtacagtttggtgtcagcacgaagtttctagataatgcagggcggccaaagatgagcatagtggttgagatccctgagaacctctgtaaagttttggaattctgcgatgttcttgctagaaagctgtcccaggaatctggtagcagttctgaatggagacccctgattaagaagtatggatacattaatcgtccaactatccgtctgaacatccctcctatttccaacagcgatgcggtggccttctcaactgatatatgccagagagagcctagtggtaacattcagaagcttgctttcggcaatgtgggcgccacggaattggactctctgttcgttaaagggagcaaggtggacgcatttttttcactggagttatacgattaccagcaaaatgctggcattcggctggttgcaaagaggctggttatacactcgaattagcaccaggctcatttattaaaatactagtactagaaactaacccttgcactgattcaggggcctttagaccaccatatgtatttaaccaattgtagtttgtagattatgccgagtgcgtaagatctcgccacaaggaggtattgagctgttgatggtaaattaaaattgaaatgttgcaaaatgttttaacaatctgtgctatttatttgtgaatagaatgcacatttgttgctactaca

SEQ ID NO: 130479 - DNA, 715 bp, Zea Mays
gctgccaagtacatctttagaattatgtatggttctggagacttgaaaaccttcactggatataaacattgttcacttgtacattcgtaggttgatgtggatatagcaacccacatagatatctatgatgatggccctgaaagaagcttacttgtggtggaaacagcggatcgtccagggttactggttgaccttgttaagatcatctcggacatcagcattaatgtccaatctggagagtttgacactgaggggctcctggctaaagcaaaattccatgtcagctacaggggcagaacactgaccgaggctttacaacaggttctttgtaatagcttgcgctatttcttgaggcggccgacaacagaggacgccagcttctagccagatagatgatcatgaagcctcccaactttcttatgtggtggtattcacatgaattgaataccatcgtcaaagcatttgaaacacgcacaataatttgttaagatggggggaattgtacttgatgttatggcaccacaccaattcgaagtattttttgttccaaggcacgggaatctgttgtatccaagtgcagaagattgctattcttaatcatgtaataacacattattattttgctacttgggatacaccgtttggtggtaaataagatggaatattgtgggggcccatcatcccgtgtatcatgcaaataccgtctattgtcaga

SEQ ID NO: 130480 - DNA, 1086 bp, Zea Mays
ttttttcagtttggagtgtttgtaactgatcttttcctatctccagattgttctctccagctgtgagggttccaagggctacttcccctgcggcggttgaggatgggagcaacactgatatagtccctatcccgaaagttataatagaccaagactcagatccggatgcaaccattgtagaaataaccttgggtgatcgtcttggcgatctccttgatacgatgagtgcgctaaagaacttggggctaaatgttgttaaagctagtgtctgtctcgattctactggcaagcatatcaagtttgctataactagagcgttcactggccgtaaaattgatgatccagagttgttagaagcagttcgactgacgatcattaacaacatgatacagtatcatccagagtccagcagtcaattggctatgggggcaacttttgggccagaagcccctacggaagaggttgatgtggatatagcaacccacatagatatctatgatgatggccctgaaagaagcttacttgtggtggaaacagcggatcgtccagggttactggttgaccttgttaagatcatctcggacatcagcattaatgtccaatctggagagtttgacactgaggggctcctggctaaagcaaaattccatgtcagctacaggggcagaacactgaccgaggctttacaacaggttctttgtaatagcttgcgctatttcttgaggcggccgacaacagaggacgccagcttctagccagatagatgatcatgaagcctcccaactttcttatgtggtggtattcacatgaattgaataccatcgtcaaagcatttgaaacacgcacaataatttgttaagatggggggaattgtacttgatgttatggcaccacaccaattcgaagtattttttgttccaaggcacgggaatctgttgtatccaagtgcagaagattgctattcttaatcatgtaataacacattattattttgctacttgggatacaccgtttggtggtaaataagatggaatattgtgggggcccatcatcccgtgtatcatgcaaataccgtctattgtcaga

SEQ ID NO: 130481 - DNA, 1484 bp, Zea Mays
atcctacccatcccattcccactccgccactcggccactcgacaccaccctccgcgctccgcatccgctcctccctctgctgccgtgccggtgccgctagccatccccacttctcacccgccccctctcctctactgccgccagccgcaacaaagatatggatagagcggccgcgacagccgcagacattatcgtcatgatcccatcgctctcgccttcgcctttgtagcactacctcctcgtccatccgcccccctatttcgtcccactcgggttgctagatcggactggatctctctgcccgtttcttggagcagagatggccgaaatgaccgtgactgtcgcggccgccaaaagcaccctccggacgtgccccggcgcccgccgtgctgcggttcttggtcggtggatgcctcttgcaccagcggcgcccgccaacttgaaattgttctctccagctgtgagggttccaagggctacttcccctgcggcggttgaggatgggagcaacactgatatagtccctatcccgaaagttataatagaccaagactcagatccggatgcaaccattgtagaaataaccttgggtgatcgtcttggcgatctccttgatacgatgagtgcgctaaagaacttggggctaaatgttgttaaagctagtgtctgtctcgattctactggcaagcatatcaagtttgctataactagagcgttcactggccgtaaaattgatgatccagagttgttagaagcagttcgactgacgatcattaacaacatgatacagtatcatccagagtccagcagtcaattggctatgggggcaacttttgggccagaagcccctacggaagaggttgatgtggatatagcaacccacatagatatctatgatgatggccctgaaagaagcttacttgtggtggaaacagcggatcgtccagggttactggttgaccttgttaagatcatctcggacatcagcattaatgtccaatctggagagtttgacactgaggggctcctggctaaagcaaaattccatgtcagctacaggggcagaacactgaccgaggctttacaacaggttctttgtaatagcttgcgctatttcttgaggcggccgacaacagaggacgccagcttctagccagatagatgatcatgaagcctcccaactttcttatgtggtggtattcacatgaattgaataccatcgtcaaagcatttgaaacacgcacaataatttgttaagatggggggaattgtacttgatgttatggcaccacaccaattcgaagtattttttgttccaaggcacgggaatctgttgtatccaagtgcagaagattgctattcttaatcatgtaataacacattattattttgctacttgggatacaccgtttggtggtaaataagatggaatattgtgggggcccatcatcccgtgtatcatgcaaataccgtctattgtcaga

SEQ ID NO: 130482 - DNA, 1504 bp, Zea Mays
atggtgtcaaggcagcagctaccgtgtcaattcttggatcataaaacgttgcgaaaaagaaacctatggccatcggtgctccagcagtgctgtctggtgcagttcttccttcgtgctgacaaattggcagtgcgcctattcacaacatctccttttgtgtgtgttagttgcgcgcgccatggagatggcgcgaccgggaaatggtggaggaaccttcgacgacgccgtgacctggaggcgctggaacggcttcctgtcgtcgtaccctgacatgggccgggactccgacggtggccgggcggcgctgcagccgttgccggcgcatggcgtgggcagccggcggcgcacgtacgccgacggcgagctcgacgtgttctctgccgagcggtacttcagaggcgcaatggactacggcaacggggaccgcaaggaaggtgtctttgtcaccgcccccgcggtagcggggcaggtgccgcagcccttggtggagacggccgctgcgaggccggcggcggaggccgtggtaatggctaagccgtcctggactcgcgcgtcgaccgtgagcttcaccgcgagctcggcgtccagcgccaacagccaggcagcgctcttccgcggcgggccccgtcgacggcgcagctcctgccgcgacagcaagtgctgcgtgcgggtcggcgtgctcatgcgcacgtgctccgggaagcggtcggtgagcgtggacggctgcgcggccaaggaagcccccggcgccgccgaggcagcggcgaccgggatcgactggtacagggagctgaggatgcacaaggccgccctcggactctctgggcatggcaataggcatgacctggtgcccgccggtctcccgccaagcttgaatcttgggacggcgaaagtggcagccatcgggagtgaggtgacagcaggcgaggagtctgctgagctcgccttctcaagatctatgagaaggagaagcaactttactctggtggctccggtcagagccaacgtgccggtgagcggccgcgtcggcgagcccgccggagccggtaaaggtggcggtggcaagcacgacgatgacgacgccgggagcgagtcgagctccgacctgttcgagatcaagagcctgatgatcagcgattgcccctacgagccgagcgaggcgagcatccagtggagcgtggtgaccgcgagcgccgcggacgcgtcggagcgcggtgaccgcgtccccgccagcggcggcggcgggaggggtcctgtctccggaaggcagctacgggggtaccgcccgcgcccgaccgggattctggcggggtgcgccagcaacagggccatagatgtgtccgcggcggcgatgcagcggcgcagtgaagcatttcagaaggctcggaatggagcctgaagattctctattttgtggcctccttgtgaatattcgttcatgccattgtaactatcttggacgctgtgtcagatgagagttttatggaacacacacaatagcata

SEQ ID NO: 130483 - DNA, 1021 bp, Zea Mays
aaatccattcatcccgctgtgtctgtgtattgtagtatcagccaaaaaaaaaagaagaataccccgaacacgaccagaaggcctactaaaccctgccgccgccgccgccgcgccatggccgacgagctcgacgagctgatcggcttcctctccgaccgcaacccccaggtgcggggcgcggcggcggacatcgtgcgcgggctgacgggtggggaggacggcctccgggcgctcacggcgcgcgccgatagcgcccttccggcgttgctccgcctgctggcctccgcgggcggaagtggctcgggagaggccgcggcggactcgctcgtcaacctcagccaggacgcggccctcgcagcgcgccttgtcgcgctcggggccgtcgatgccgccatggacgtcgtggccaagcgaggcggggagcagccagctctcgcgcgcagactcgtcatgctgctcgttaacctaacccacgttgagtccggcgtcgccgcgctcctccaggttggggatgagaaggtgcaaggcttgtatgttgcaaagcttgtgcgatcattctgtaggtcatccagtgattctgaagaggaagacatttttgagtacgttgcctccacacttgtcaatatatctaaggttgaagctggaaggagaatattgttggagcctaagagaggtcttctgaagcagattattcgacaatttgattcaacaaatcaacttagaaagaaaggggttgctggtacaattcgtaactgttgctttgaggctgatactcagcttctgagtttgctttctttagcagaatatctttggccagctctacttttgcctgtagccggaaagaagatatatagtgaagaagacagatcaaaaatgccacttgagctatcgagtgcactctctcatgaacgggaagttgttgaggattctgaaattcggcagcaggcattagaggctatttatatgatcgtattgcaggtgatttttacattccatggcagtgaattttggttcattttgc

SEQ ID NO: 130484 - DNA, 1276 bp, Zea Mays
ccttcatccgctttttatcttaaaataaaccggcgtctcctgccctggctgggacgccgctgctgacagggcacctgatggattgatttcctcgagcagtcagcggcgctaaagagtcacgagcttactggttgtaagcaacgatcgacgaacgaggggtgtagggagtggaaggaagaggctcagcgttcatggagagccgcaaggaggagcaggcggcggtggggtggatgacggtgccggcgttcggggagtgggacgtgaagaacggcgccgtgccggactactccatggacttctccaagatccgcgagatgcgcaagcagaacaggcgcgagctgtcccgggccagcctcggcggcggcgacgacgacgacgacgacctactccagaagaagcagcagcagcagcaggaggagggaagcaaggcccagccgcgcaacaagccctccgccgccgtcgcggacgacgcccaccgtcgagcgctgcacgacgactcccctacggggaggaagaatttcctgagctatttccagtgctgtaccagagcgtgaagaaactcccaagacttcttcttcctctgctgcgcaggtagctgcatgtttgggtttccttctgaactccagcagtgtgcgactccgtatccctaaaacgcgcggccgacacattctctctcctctccgtatccggctccgtttccagcaacactccccatcccactccgcatgcagtctatgacacctggggcccgccagcaggcgcgcgcgcccgcgagagagctgcggagaggagagagaaagcgtggaaatggggagtctgggtacacgccgtgcgttttacggagccggatacggagcctgctggactgatgaatagtgtgctagactccgcaaaatacggatacggagccgcatgcggagtgctgctggagatggtctaatgtatgtaaagcatgtctgcgtagttaaagtgtgtgatcctgtcacccatgccatgcatgagagaggggaggaacgcccatggctcacagcttctagtgcagtgtgttctgagaaaaaggattggatctgatgaagaagggtgtggcttgtgtgtgtgcttttttgtatgagattggatgcacttgagatgatgtattgacgattgtccatcttgtttttcctttttcacctctttattcattgtatgcatctcttgatttttttgttgttgtttctatctagaggaacgacgtctctggaatacatgtagctttgccgtagaagcaacaagttct

SEQ ID NO: 130485 - DNA, 1219 bp, Zea Mays
ctgcgcctgctgtcggccacccatgcatgcatggcctctctccttttctctcgtctcatcgtctgtgatgtggtggtggtgccgccgtgccggtgccggtgccatgcagcatgattaaccactcgatctaccaataatcaccggtcccgtcgatcctgtccatcgcgtgcagatcatggcgctcaagggaggcggaggagggaggcaggaggcggcgtcggagctcatcaacctcaacgtcaaggagacggaggcgtcctgcagcaaccgcagcagcgacgagaacagctccgagatcaacctcgacatctccaggccgcctcgggccgccgacgagagccccgccgccatggacagctaccgcggcatcccgttctacgcctgcgcccgcgccgacgacgtcgaccagctccagctcctgcacagcggcggccacccgtccccggcgcccaagatggagcccggccacggcgccgccgctactgcgggcggtggcggaggcggaggcggcacctttggaagcctgctgtgcggtgccgccgccgacgagcagcctccgttctggccgtgggccgacggccaccacgccttccagtgaacaaattaatccttcaattcgtctcgtacggtgcactacgctgcctgctatgacctcgcatcgggcgacgcagattttgttccatggatccaacagcacgtcgaccgaccgacatgcctctccggccggtcatttcctcttggcatcgcatcaagctatgcgccagatcgcgagatcgccgccgacgacgtacgttgccgatgcgttgttgatcaaagaagcagctgggatatgtgaggtggtgagacgatccaatcaggacgtacggagatgatggatatgtcagtcaaggtagattgaggagttgagcagtaagtctctctctgtctttttctattatctccatccttcttgccttcttcttggacatctgtttaactatcttcgttctcgaatatttgtcgttctagttcagttttgaactaaaacacgacaaataaaaaagaacgaatgaagtatattatatataggtgattacatttgtgaggcagtggtgatattgttgtgtataggattatactatataatatggttatggtaccatgtgagtgccaggttatttcgtccgcacttgaaccttgcaaattctacctcttatttttctgcttttcttttactcgt

SEQ ID NO: 130486 - DNA, 1814 bp, Zea Mays
cacacacacacaagactctcgctagctcccaagtcccaaccaacctctagcagctccatcccctctctctctctttccccgtgtcaatctgtggtgtgggaaggaagatcgatatactccctccccatgttcctctcgctcctgcgatgaagccaatggcaaccaatggcatggccccctccttcttcgccgccaacttcctcctccaaatgcagcaggagcagcaggcgcaccaccagcaccagcaccatgagggccacgaccacctcctggctccccctcccccggcgctcgtcagccccttcctccacgacttcggcggcgccatgaccgcgccgccgcctccaatgctggccaccggcattaagcgcatgtaccctgacggcatgtgtgacgacggcagcggccacctgcacgcggagcccaagcagcaccagcaggactgcggcggcggcgcgtcggacgacgaggaggggtccgccgcggcggcgtgcggcgagcggaagcggcggctgagcgtggagcaggtgcgcacgctggagcgcagcttcgaggtggccaacaagctggagccggagcgcaaggcgcagctggcccgcgcgctggggctgcagccccgccaggtggccatctggttccagaaccgccgcgcccggtggaagaccaagcagctggagaaggactacgacgcgctgcgccgccagctggacgccgcccgcgccgagaacgacgccctcctctcccacaacaagaagctccagacagagatcatggcgctcaagggaggcggaggagggaggcaggaggcggcgtcggagctcatcaacctcaacgtcaaggagacggaggcgtcctgcagcaaccgcagcagcgacgagaacagctccgagatcaacctcgacatctccaggccgcctcgggccgccgacgagagccccgccgccatggacagctaccgcggcatcccgttctacgcctgcgcccgcgccgacgacgtcgaccagctccagctcctgcacagcggcggccacccgtccccggcgcccaagatggagcccggccacggcgccgccgctactgcgggcggtggcggaggcggaggcggcacctttggaagcctgctgtgcggtgccgccgccgacgagcagcctccgttctggccgtgggccgacggccaccacgccttccagtgaacaaattaatccttcaattcgtctcgtacggtgcactacgctgcctgctatgacctcgcatcgggcgacgcagattttgttccatggatccaacagcacgtcgaccgaccgacatgcctctccggccggtcatttcctcttggcatcgcatcaagctatgcgccagatcgcgagatcgccgccgacgacgtacgttgccgatgcgttgttgatcaaagaagcagctgggatatgtgaggtggtgagacgatccaatcaggacgtacggagatgatggatatgtcagtcaaggtagattgaggagttgagcagtaagtctctctctgtctttttctattatctccatccttcttgccttcttcttggacatctgtttaactatcttcgttctcgaatatttgtcgttctagttcagttttgaactaaaacacgacaaataaaaaagaacgaatgaagtatattatatataggtgattacatttgtgaggcagtggtgatattgttgtgtataggattatactatataatatggttatggtaccatgtgagtgccaggttatttcgtccgcacttgaaccttgcaaattctacctcttatttttctgcttttcttttactcgt

SEQ ID NO: 130487 - DNA, 162 bp, Zea Mays
ctcgaaatttctggtctgctccagaaataggtcgtaacttgtgctaagtaacatgaatatcatttttgcattcacggtttttcatctttcgagcgacttgcagttcaaatctgaattatccgagaaaattcaattaaaagaacaaaatctaatagttatagc

SEQ ID NO: 130488 - DNA, 1690 bp, Zea Mays
gcctggttgggcgtcaggtaccaagggcatagaggcaaagaaggttcctaggctgttgccgtgagctcttcctgggcctcctcgcccccatgccgcctcctgtatgtatgtggagcactggagccctgacatgattatcctgaacccgaaagctgaactaccacacacaacaaataactgacgcaggcgatccatcactccacacaccggtcggaaccgaggccaaccaacgacgccgccgccaatgtcgtcccctgcagcgccggtgcagccgccgccgccgcgcgcggtgcgcttcggcgtcctgggatgcgctgacattgcgcgtaagatctcgcgcgcaatgctgatgctccctccgggcgccgccaccatcgccgccgtaggcagtcgctccgatgacaaggcccgccgcttcatctccgaaatcggcttccccgcggcgcgcgtccacgggtcctacgagtctctcctagaggacccggacgtggaggccgtgtacctcccgctccccaccagtctccacgtgccctgggccacagccgtcgctgcgcgtggcaagcacctgctcctcgagaagcccaccgcgctctgcactgccgaactcgacgccatcctcggcgcctgcgacgcctccggggtccagttcatggacaccaccatgtggatccacaacccgcgcaccgccaagatgcgggagatcgtcagcgacaaggacgcctttggcgacgtcagagtgataaacagtatgtgcagctttcgggcatccgaggaattcctcaagaatgacatcagggtaaagccagaccttgacgccttgggtgtcctcggtgatgttggatggtactgcatccgctcaatcctgtgggctgttgactatgagctgcctgagaccgtgatcgctcaccgccatcctgtcaagaaccaggctggcgtgctccttgcttgcggtgcgaccttgtactgggcagatggcaagactgcaaacttcaactgctcgtttcttgctaacctcgcctttgacgtgaccgtctatggcacaaacggcactctccatgtcactgacctggtcattccgtacgaagagagctctgcggagttcagtgtggcctcgaagtcaagcttcgtcaaacccaccatcggatgggatccattgccagagaagcatgttgttactactgatctgccacaggaggcactcatgatccaggaattcacaaggcttgtgcagaacgtccgcgccggtggcaggcctgagggtaagtggccggctatcacccggaagacgcaggtggtactggatgccgtgaaagcttctattgacaagggatctgaaccagttgaggttgccagctaaatacaacaaatgccagctccttgtgctaggtttgtacttaatggcttctactcgtatttgctgtcgcgcaaatgaaggtagtaattgtaatactgtcacgtaaattgaaactggtaattgtaataatcttaaggaatctggtcaaattgaggagaacatttttacagtttaccgaatcagtgattcgtcacgaataagattgtgtaatagatcaaggttggtcaaagccctgagtggatcggaagtgatcatccagtgatggacgcggctcgatacactgttgttagttgaggagaaggaggttcatgtacctaactacatccctcttttctc

SEQ ID NO: 130489 - DNA, 101 bp, Zea Mays
tttttttttctcctcgccttctactcaatctccagtgggctctaatcgcatgccttctacctgttctgggctacgcaatggcaggttcctaggctgttgcc

SEQ ID NO: 130490 - DNA, 1338 bp, Zea Mays
atatccaccttctattccacatctcaatccagtactcagccgccgccgcctgctgctcgtgtggttcccgacggtcgctgacgccgcgaccccatcccggcgctcggcggcgcgcatcgccgacgccgctgccccgttcctttctcttccaccgtggctgtcgttccctcgccgatgctcagacctcgctgcgctccaacgctccctactccctcggcttccgcccctgaccttggacgccggcagtcaccagctccctcccatggccgtttccagccatctcccatggccgaccccaactcctcccatggacgtcgttccctccctgctccagttttctccatggctgcagcctcgccgaaccacacaacctctgctctccttcccttgtttcaatggcgagctccccctgctcttctgctcacgctgcccctgtgccattttccattcctgcggcaagcaccagcccctccccatgccaacctcccttttctatagacgctgcccctctctggtttctggtggccagccacctctgctgctcccatggtgatctctaaatccctttgttgttttactagttcttgttaataccctgctgatgtgaggttttatgtgtgttgatgtgtgcgatatggagtaaaatccttggagaattaggtggagaagaaggttaagttcaacgctccttaggtgttcgatgatatgctcgaactggtggtcgtcttcgttcttgctgaaatcaagtcggagcatgatgtgattaggttcgagtaagttggagaacatgatcgttgtgttggggtatataaacttccaaacttgcaaccaaggccacaaagacaaaatgctcaacctcaagacgaacaagcgattgttgatttgcagacggtgggagattttctcaccgacaaaatgctcaacctcaagacggtgggagatgcaccatacaaccggcagtggtgttctggacaaagaaagcttgtaccttaaaacaggaggatacaagaagctggagtggttgtctgaaggcttttgaactgcttgaagcattagtgtagcttttgtgcttttgtgactgatcagctctggagcagctagagtgatgtagttgtgggcttttgaacaatagctggagtgatatgaaacattagtgatgtagttgtgggcttttgaactgcttcaagctggagtgatgtcgttgtggtgcttttgtgactgatcatctctggagcttttgtgaatgatctagctagctatctataaatgatctagttgtgaatgatattataactgtgatgcttttgtgaatatataattgttgtgcttttgtgttta

SEQ ID NO: 130491 - DNA, 327 bp, Zea Mays
atgccctccccgccgacgcctccggccgcctcggactggcgctgcgtccggtgcacgttcctcaaccccgacaactccgactcctgcgaggtgtgcgaggcctcacgcccagtggaggtcgacatcgacagccccgtcgtcgtgggcgccgccctcgcgttggcctcgctcaagcggagccggaggaagagggagcgcagtgcgtcccccccaccccagcggtttgggaagaatagggagcgcgatgcgtcgcccgatgtggtcgaagtctgcgatagtgcgggcaaggggtctgccgccaagaaaggttcgctcgctgccctctga

SEQ ID NO: 130492 - DNA, 513 bp, Zea Mays
atgtcgtggaggctggtggcggcgtgggcaagcctgagcttggcagcggccgcctgcgctgccacgttgccctccgcgttggtgacaaggaggcgcggctccaagtcggagaggttctcggatggttcccgtcaagggctgaccatggagaagagcacggtggtggtcagtgtccctgttgttgtcatggccgagactgctgagatcgactacagctcgagcttctcggtgttattgggcgaggcatgcaacgaccttgatggcgagttctgtgatgcgtcgtaccaggccggcatctctagggagctggttgtgagagacctcgatgggaactttgtgttcatcctttataacaccctgtcgaagtccacctttgtcactgttgacattgatggtagcatccctttcttctggggtgttgactccgaaaaccatcttgtgttctctaacgatgctggaatcctcaagacaagctgtgacaacttgtacgtgtcatttccaaaaggtacttaa

SEQ ID NO: 130493 - DNA, 726 bp, Zea Mays
gtaaacgcaatgcggtcgtcgtcgtttgttgtcttcttcctcctcgttctgtttctcctcgtcgccgccggtgcgccatcgcttggtgacgccgtctcggttcaccaacagggggccgacgacgacgacgaccatggtcacggcggctcggcggcagcgcacagcgacgacgcgttctaccagaaggtaggcacgttcgcggtgtgggtgtacagcctgtggaacgatatcaaaccagtgccgaagctggagagggtgctctcggcttccgcgagaccggcggagggcagggcaatggagtaccaactggtgctgcgcgtggccaggctcggcacgttccgggcgctcgtgtggggcgtgccggccgagggatccgaggactggaagctcaagtacttcgagcccgtggacggagcgtgatcactgaaactggaaggtgtgcgccacaggcctcatatatatgcataatatgcatgccctgatgagtgagtgtgcaagcatgacgaaacaggacgtataaatacaagtatagatatgctttatacttattatttatgtgcgcgatctgtggcatgtgtgttttgtgctctgtgttctgatcgatctatacgtctaaatgctatgcatgtactcctatgtaatatgtctcgagattataaaagtgtataacatgatcgatttaacaataaagatacggccacccacgctaaaattggagtgggttgt

SEQ ID NO: 130494 - DNA, 632 bp, Zea Mays
gcaggatgcgcgagatcgaggacgccgccgcgagcgcacaggtgagtcagtagaagagtgaggtggaaaaaaactcaccgtcgctttcatagtttcattccccttcagtcatcgcgaagtaaaatatccagtgaggtcaacgacgagcgcgcgcgtgtaggaagcgctgacgacggcgacaatggtggagctcgcgggcggcggcggcagggacgcgggggccatggaccgggagatgcaggcgaaggcggaggggatgaggcgggtgctggagatggcggacgcgcgggccatggactgggagatgtaggcgaaggcggaggggatgaggcgggtgctggagatggcggacgcgctgcgcctcgagacgatgcgcgaggtggtggcgctgctccgccccgcgcaggccgtgcacttcctcctcgccgccgccgagctccacctcgccgtgcacgacttcgggcgccacaaggacgaccgcgccggcaacttcgccgccaccgcgccgccggagtgacggacgctggcgcgcgtgaaacgataacgggcttgcctgcctgcctggctgctctgcttttgcttgtgtcgtgtagctggggggctccctgttccaagctgtcacggtaagcttc

SEQ ID NO: 130495 - DNA, 381 bp, Zea Mays
atgaagcaatcggcggttgctgctgcgcaagccctccttattgccttggcgatcgccgccctggccatggtggtggtgacggccgacccggcgccgccgccggggtacacgaagcaggaggatgtgggcagcgacttcatcaagcaggtgggcaagttcgcggtgaccgtgtacaagatggctcacatgataccgatgagctacctgaggacgttgcagtgctggtcgtcgccggcgggcggcggcgccaacaactactggatggtgctcacggcgaccaactggaccggcaccgccggcagctacgtctccaccgtgtggggcatcccgggctccgagtccaggacgtggaagctcctcaccttcaatggcaccatgtga

SEQ ID NO: 130496 - DNA, 1366 bp, Zea Mays
aggaatcgaagcatcaaggacagagcagggccgggaccatggagagcaggagagggacacccagacaacaagatcccctcaccccgcacgcccgcactccactcccccgactcacacgcgcgcccgccattgctgccccggcccggcctggccccttcgctttctagctagctcccttgtcccctccatcgctagctagcccgcctatatcatcattgccccgcgcgcactcgctgctctgctcttctcgactacacgtcaacaatggagaggtgggcgccagcgccaccgtcggcggcgcgggagaggccgaggcggcgacctggccaaccatccttctcgtccacgctgctggacgccatctgcgattccttggacgagcaggccggcggccacggagcaacggcggagcgtgccacggcaccgacgcctcggagcgccaaggagcaacaccaggcggccctacattactactactacaagcccttcttggccgccagccaccgggcggcgcgcgcggccccttcgcctgcggacgactgctcctccggccgtggctacttctcgtcgtccgaggtcgagtactccctccgccgcctccgccccatccgaacctcagctggcggcgttgggccggcctcggtggctcccgtggagaagcagaagccggccccgccaggcacggcgaagagggcgcggaagccgtccgccgcccccgccagcggcggctgccgcaggccggcctcccccggcgcgcggctcgccagccttctcaacgccatattctccggcaagcggaattctgcgcggcagcacccggctccggcggacgaggagccggcgtgctcgacggcgccatccaccgcgcgcccctgcctcgccaagacaccgccgtccgcgagggcccgggccagggcgacccggaaccgtagcaggaccgtgcggttcttggacatcgaaggcgaggtggctgtggctgcggccgccgctggttgcaggcgattcccggtggtggaagtggaggacagcgacggcggcgaggagagcagcgacgcgagctccgacttgtttgagctagagaacctcgcagcccttgctcccgcgaacggcgggcccggttgccgtaggacgtgcgagaacgagcttccggtgtacgggacgactggagctggtcttgggaacgacagtagacttgtccgtcgtcgacgcccgtttgggtacgtcagccatggtcggagttgcagagggttgtttgatttcaaataggcagagggggtgaactgtaaagtggtgttccttttttttgttggcatgttgttctcttttcaggactttggtcgttatgtattcgctgctataaattgtg

SEQ ID NO: 130497 - DNA, 783 bp, Zea Mays
ttatattattaatgttgattgcaacgagttagtttaatcaacaaattttgctaaatgttgggcatgtaatttcaggttttgctgcgtattgtagtgtgcaattttatctatgtgatcgatgcaatctcactttttcacaggcatgcaccatgttgcaagaggaggaattagaatctgcaatatccctttgttgtgcgttggaggtccttaatgtgcattcttgtccaaagatcaatgctctggattttggccgactccgtttggtttatcccagtctgaagcgcatccagagcagcctcatttcataatgcggaggctactaccatattaaggagtgcaattcatgcaataagcctctgttcaggtttgatgaaagaagcaagtcgggaaaagctctccttgatgctctttgtacatattacccaagcattgccggtatattgcaagccaggggcaacgtggtcctatttatccagtccattcatggttctgtaataagtactttttttttgcaaatttgttttgttgccggagatagcaaaatatctgttcatgtctgtttgtctttgttccttggagtgtaccaatggagctatcagatgtatatgctggtttatatgcatcaataatcttgttttgatctaggatcttggaatcgctttgctaatgcgatctggggtgtagttttgtacaactttaattgttcgcagattttagcgagtgttatgaagcttaactgatctggggtgtagttttgtacgactatgtttaatttttcgcaga

SEQ ID NO: 130498 - DNA, 1710 bp, Zea Mays
caaatgggaagtaggggcctgttttgggggctattgctggagattctcgaaccaacaaacctgctaaactatcttcctcatttttgcactaatatctgtgtggattggacctaggagagtaatttggtgattttgtggggtacatgatctggttcaagaacactattatgtcacgaggaacttgtgggccttgaatccctaaatctgggaatttgtccaaaattaagtattctgtgcattgaggccccaaatatgtctataatggagctgaagggttgtggtgtgctttccgaggcttccatcaattgccctcgcttgacatctttagatgcctctttctgcaggcagcttgtggatgattcactgacttgtatgaccggggcatgtcctctgattgaacatcttatcctgtcatcatgcctatccattggcatcgatggattgtcttcattgcattgccttcataagttgaccttgcttgacctgtcttatacatttttgatcaacttgaagcctatttttgacagttgtccacagtgaaggtgttaaaactttcagcttgcaagtacctcagtgactcatcattggatgccctttacagagagggtgctcttccattgcttgttgagctagatctgtcctactcacccatcgaacagaatgcaatagaaggtcttcttgcttgttgtagtaatttggttaatgtgaacttcaacggatgtacaaattttcaagaattggtgtgcgaatctggggatagcggttctgtggatatgccagttgactcttgtccacctagttcaccaatcaagaatgaagagatcagtgagcaacctggccgtctgcttgaagttctcaattgtactgggtgccctaatattaagaaagttgttattcctttgatagcaaacttttcacatttgtccaaaattaatcttaatctttcaaccaacttgaaggaagtggatttgacatgctccaatcttttaacgttaaacttgagcaattgtagctcactggaggtgctgaagcttgattgcccaagattgaccaacctccaacttttggcatgcaccatgttgcaagaggaggaattagaatctgcaatatccctttgttgtgcgttggaggtccttaatgtgcattcttgtccaaagatcaatgctctggattttggccgactccgtttggtttatcccagtctgaagcgcatccagagcagcctcatttcataatgcggaggctactaccatattaaggagtgcaattcatgcaataagcctctgttcaggtttgatgaaagaagcaagtcgggaaaagctctccttgatgctctttgtacatattacccaagcattgccggtatattgcaagccaggggcaacgtggtcctatttatccagtccattcatggttctgtaataagtactttttttttgcaaatttgttttgttgccggagatagcaaaatatctgttcatgtctgtttgtctttgttccttggagtgtaccaatggagctatcagatgtatatgctggtttatatgcatcaataatcttgttttgatctaggatcttggaatcgctttgctaatgcgatctggggtgtagttttgtacaactttaattgttcgcagattttagcgagtgttatgaagcttaactgatctggggtgtagttttgtacgactatgtttaatttttcgcaga

SEQ ID NO: 130499 - DNA, 3831 bp, Zea Mays
atccgagccgtccctctcacccttccctgatctacctccctagcctgccgccaccaccgtcgtctctgcgccgcgcagatccgccctgctggtgcggcaccactcgagcatacgtgtacggacgcgacgagacgtagtccccgcccacctcgccgaggactcgttcctgtttcgtgcgcgccagcactaccggtgtccgtgcgtggctgggccaggtcgattcgaccgaatccggtggagttcaccgtaccgtggtgtcaaatcggtgagttccatagtgttacgcgtgggggaggagcgttcgggtctgtctggccggaagtggcgctgggatggctctagggtttggttttgatcttttggcctgagggcatggcgaatgagggccggatgaagggcgtgcagggcgttgggggtggaactggtgacgaggaagatgggaatgaggaggtgcgagaggagctggaactcgcgctatcgctggggtggcgaagctggcacctcccgccgcggcaggagcccgctcccagctcacataactggacggcggttctgccggagtggaaccccgacgccgctggtagctcgcatgatgcgaaaacggccttgggcggacaatctatcccttctctcaggttccgagacatgttgggtggtatcctagacgcctcccatgcgggtggcagtgtggaggttgggtggggcaacctggacgaagaggatgaagacagagacctgcagaataaacggcttagagtacaacactttggcgaagaaggcccactgcattctggtcttctattttgcagagaaagcccacttcattctgaacacgaattggaatttggcttgtcccttttcccaaatgatggtagtgagagcctaagagatgccaataacgagatagtggatgatgcagaaaacccaggtgaaagaaattctgaaggtgttggaataagaatggatctctctgacgatctcctgcatctgatattctctttcttgggccagaaggatttatgcagagcaggtgttacctgcaaacagtggcgatctgctagtgtgcatgatgatttttggaagtgtttgaaatttgaaaacactaggatatcactgcagaactttgttaatatttgccgtcgttacccgagtgtaacagaactcaatttgaatggtgtcataaatgcagaaatgctagttctggaagcaatagtatttttaaggcatctgaagactttgacaatgggcaagggacaactgggaggcccattttttcaagctttatctgagtgcccattattgactgctttaacagtaaacgatgcttctcttgggagtggcatccaagaagcaactattaaacatggtggattgcgtgagcttcatatttttaagtgccgtgcactcagaatatctgtcaggtgttcccaacttcaaatactgtctttgaggcgaactggcatggctcatgtatcactcaattgtcctcagttgcttgagttggacttccaatcctgccataagctttctgataatgcaattcgccaagctgctacagcttgcccgttgttggcgaaactagatatgtcatcttgttcttgtgttactgatgagacactgcgcgacataggtaactcatgtccaagtctgtctgctcttgatgcatcaaactgccccaacatttcatttgagtccgtgaagcttccaatgttagtagacttgagactgctaagttgtgaaggaatcacatctgcttcgatggttgcaatagcttacagccgtctgcttgaggcactacagcttgataattgcagcctgttgacatcagtgtctttggacttaccacatcttaagaatatgagtctcgtgcatttacgcaagtttgctgaattgaatctgcggagccctgtgctttcttacatcaaagtttccagatgttcagtgctccatcgagttagcataacatcgaccacacttcagaaattggtgcttcagaaacaagagagtttatccagcttgtcattgcaatgccacaacttgattgatgtggatcttagcgactgcgagtcattaacaaatgcgatttgtgaagtatttagtgatggaggtggttgccctaagctaagatcattgattcttgacaattgtgagagtttgagcattgtagaactgaatagcagttctttggtttgtctctctcttgctggttgccgctcgatgacatgcttaagactctcgtgcccaaatttgcaacatgtgaatcttgatggatgtgatcaccttaaaaatgcagcattctgtccagtgggccttgaatccctaaatctgggaatttgtccaaaattaagtattctgtgcattgaggccccaaatatgtctataatggagctgaagggttgtggtgtgctttccgaggcttccatcaattgccctcgcttgacatctttagatgcctctttctgcaggcagcttgtggatgattcactgacttgtatgaccggggcatgtcctctgattgaacatcttatcctgtcatcatgcctatccattggcatcgatggattgtcttcattgcattgccttcataagttgaccttgcttgacctgtcttatacatttttgatcaacttgaagcctatttttgacagttgtccacagtgaaggtgttaaaactttcagcttgcaagtacctcagtgactcatcattggatgccctttacagagagggtgctcttccattgcttgttgagctagatctgtcctactcacccatcgaacagaatgcaatagaaggtcttcttgcttgttgtagtaatttggttaatgtgaacttcaacggatgtacaaattttcaagaattggtgtgcgaatctggggatagcggttctgtggatatgccagttgactcttgtccacctagttcaccaatcaagaatgaagagatcagtgagcaacctggccgtctgcttgaagttctcaattgtactgggtgccctaatattaagaaagttgttattcctttgatagcaaacttttcacatttgtccaaaattaatcttaatctttcaaccaacttgaaggaagtggatttgacatgctccaatcttttaacgttaaacttgagcaattgtagctcactggaggtgctgaagcttgattgcccaagattgaccaacctccaacttttggcatgcaccatgttgcaagaggaggaattagaatctgcaatatccctttgttgtgcgttggaggtccttaatgtgcattcttgtccaaagatcaatgctctggattttggccgactccgtttggtttatcccagtctgaagcgcatccagagcagcctcatttcataatgcggaggctactaccatattaaggagtgcaattcatgcaataagcctctgttcaggtttgatgaaagaagcaagtcgggaaaagctctccttgatgctctttgtacatattacccaagcattgccggtatattgcaagccaggggcaacgtggtcctatttatccagtccattcatggttctgtaataagtactttttttttgcaaatttgttttgttgccggagatagcaaaatatctgttcatgtctgtttgtctttgttccttggagtgtaccaatggagctatcagatgtatatgctggtttatatgcatcaataatcttgttttgatctaggatcttggaatcgctttgctaatgcgatctggggtgtagttttgtacaactttaattgttcgcagattttagcgagtgttatgaagcttaactgatctggggtgtagttttgtacgactatgtttaatttttcgcaga

SEQ ID NO: 130500 - DNA, 1030 bp, Zea Mays
atgactatagccgttggtagagttactaaagaataaaacgatctatttgatattatggacgagtggttacaaagggacaatttcgtttttgaaggatggtccggcttattgctttttccttgtgcttatttcgctttagggggttggtttacccatggattggctagttcctatttggaaggttgcaatttcttaaccgtggcagtttccacacctgccaatagtttagcacactctttgttgctactatggggaccagaagcacagggatattttactcgttggtgtcaattacgtggtctttggacttttgtcgctctccatggagcttttgcactaataggtttcatgctacatcaatttgaacttgctcggtctgttcaattgcggccttacaatgccaatttcattctctggtccaatcgctgtttttgatttcgtatcccttatttatccactgggacaatctggttggttctttgcgccgagttttggcgtagtagctatatttcggttcatccttttcttctaaggatttcataattggacgttgaacccatttcatatgatgggagttgcctgagtattaagcgcagctctgctatgcgctatccacgaagctaccgtagaaaacactctatttgaagatggcgatggtgcaaataccttccgtgcttttaacccaactcaagctgaagaaacatattcaatggtcactgctaaccgcttttggtcccaaatctttggtgttgctttttccaataaacgttggttacatttctttatgctatttgtacccgtcaccggtttatggatgagtgctattggcgtagttggtctggctctaaacctacgtgcctatgacttcgtttcctaggaaatccgtgcagcagaagatcctgaatttgagactttctacaccaaaaatattcttttaaacgagggtattcgtgcgtggatggcagctcaggatcaacctcatgaaaatcttatattccctgaggaggttctatcacgtggaaacactctt

SEQ ID NO: 130501 - DNA, 216 bp, Zea Mays
actttctctccaaattcctcaaaaccttgggttcacatttttgtagggctacaatcatggtattatgacaccatgccaagtttcacacctttcggacctcatttggtatttttcttttttttgcactgagagcaagataattcaattaattcataaaaaatggaaaaagggggaagttagattttctcgtgaaacatcaataataattgtatgccc

SEQ ID NO: 130502 - DNA, 605 bp, Zea Mays
actctgggccccgcaagcatgcacctccgaatcaatttgttctgttccccaatctcggcctccgctccggccgccgatctcgcccgtcctgatccagatcaggcacccgccaccgcggctcgatgtgacgtgagaggagccaagcgtgcaaagggtcctggacacaagagcgacaggatcaccgcatcgtgtcgcatccaaccatgtcgtgctggtggctacgccgaggccgacgccagacaaatggggtcgtagcgtatcgttttgccatcctgtgcattggagtctatttaggctccatttagatgtagacattgagagtcatagaattaaaaggttatgttcgctatgaaaacagtaccaacatagcaaaggcacatacctagaagtagcttacacggacattcaaattcaggagcacgagtgctcatgagacggagaacggcagaatccaatcgcagaggagcatgtcatcgatcagcacggtggctcggtccagcgatcatcatgcgacgggaagtagcagcaaccccaatgagtttatgaatcaaggtgaattcatccattttgtttcctctttgccttgttgatccatcctattagtg

SEQ ID NO: 130503 - DNA, 345 bp, Zea Mays
atgggcggccacaaggtgctcaacgtcgacacgtacgacagcatcttcgccaagccaggcggctcattccgcaaccccgatgtgcacgtcgatggctccagcgacttgggcctcattttcatgagcgccatcagcctcgtcgacatgttcatgagctcgagcaagtggacggagttcttccgtgagaagagggcagcgtggcagatggctaggagaaatactgtcacctatagcattttggagcagagagacacatggaaggttcagctcttcaaatccattcatagtggtgctgtttttggctttccgagaatcctgaggaagctgcaagagctaggctcgtga

SEQ ID NO: 130504 - DNA, 774 bp, Zea Mays
atggagcatgcatggggtttgctgctactcacggtggcgagcttgtcactggcggacacgctggaggagcaccctgctctgtggctgtcgcagtttccgctcgacgcgtgcgagttcacgtttgatcgtgtgtccgttccgcggatggagctgctcgtcctaggcatcctcgagtggtgggtggtcgtcgacatccctttcccctacatccgctgcttcgtggcgcagtttcggcaggacgagcggcgggcgatctgcgagcgcgccgtgcagcaccactgcaccagctacctcaagcatagaggaggatcgccaactacggccgcttcactgaagaccggcgtaaagagggccagattcattgcctccatcgtcaagggccgcagtggctcactgttccgcgagaagatgatcgtgggtgttggtgctcgctttgtcgtcatcgtcgacgcgtccaagctcgtgtcgcgcctcggctgcacgggcgccaaccccggcgaggtcatccccttcggcgtgcttcacacgctgggacacatccgcggcctcttcgacggcttgcctggattccacgccaggctgaggtctgttccagcgaccgccgccaaggggaaagaagactcgaaacagtccttcgtcaccgacaacgacaactacatcatcgaggacggcatccgcggcgacctgcacgacatcagtgaccgtctgtttcagatcaccggcgtcgtagaacacgacatgttcctagatcctaggctaattttcccacgctga

SEQ ID NO: 130505 - DNA, 285 bp, Zea Mays
tggaaagcaaacattccacacactcaccttgcaaaagagaagtcagaccagaactggatggttgaagctggtgaaaaaatcaagtttccaggtggtgggacccattttcaccatgaagctgacaaatacatatcaaatattgcaaatatgctaaatttcaaagataacaatataaacaatgaggggatgcttcgtacagttcttgatgttggttgtggagttgctagtttcggaggataccttctttcttctaatgtgatagcaatgtctttggcaccaaacgac

SEQ ID NO: 130506 - DNA, 169 bp, Zea Mays
gatgccagcactttaggctaggatagatgtttatcatgctttcctatatcttggtgtacatgtcattttgtgatcttcttggaagccacattttgtgtttatcatgctttcctatatcttagtgtacatatgatttaatgccaacattttgtgatcttcttggaagcca

SEQ ID NO: 130507 - DNA, 525 bp, Zea Mays
atgagatgccgcgagaagcagcggaaggtggcctcgcgcctgcagactgtgaaccagaagctggctgcaatgaacaagctgttgatggaggagaatgacaggctgcagaagcagccttctgctgcgactacagacacgagctgcgagtctgtggtcacaagtggtcagcaccaccaacagcaaaacccagcagttccgtgtcctcagcgggacgcgaataacccagctagagttactatcgaaagcaacatgaactgctgtcgattgggtgcaaatggttgggatgaagcctggtccggattccattggaatcatcgttgttttgcacaattgcagtggcgtagcaggccaagcagatcaaggtctggttccagaaccgcacctgcatattcgtgggatgtttgctttcatggttatgttgtgtaccttgtccgtgtgaggcgtggtggtaggaagaggcctttgcccaagtgtattatctatggcaatcccaagcatcagggtatcacccaactcaagttctag

SEQ ID NO: 130508 - DNA, 271 bp, Zea Mays
accactcactgcacatgggacctggtagtcacagtattccccgcatcgtgcgcacgtcgctgagctcaacaaaccgcgcatggtttgcggattccgttgcggggaatctggaatcgagctggccaaggctatttagccataacgcgaccggttccctacccaccattgggagctattgcatcgcgccgtggtgtggagcaaggggggattcgccttcaccgtcgatcgccgcgtgcgcctctcggcatatccgccactacactaggtgagc

SEQ ID NO: 130509 - DNA, 673 bp, Zea Mays
gatattatggtgaatgtgggagaaggggaggctacatggaagtcactggcttcaactctgatgtaaagaaacaagtgtacaaagttgtatccctaagctcgtgctccaacatctccggccagatcctcatgagcctagtcatgaacccgccacaggtcggagacgagtcgtacgcctcttaccaggccgaaagagacggcgtcctgtcatctttcgctcgctgcgcagaggccatggtgcgctcattcaacgggctggaaggggtgacctgtagcgaggctgaaggagcagtgttcgtgttcccttcagtccgtctgccaaagaaggcggtcgcagctgccgaggcaagcaacacgcagccagatgcgttctacgccctccgcctcctcgaaaccaccgggatcgtcgttgtgcctggctctgtttttggacagatgcatggaacgtggcatttcagatgcacggtcctgccacacgaagagaagaagacgatgacggtgatcatctccagctttgtggcgtttcatcgagccttcatggaagagtttcgcgactaacagatttcagctcctcttcttctatctctgtattgtaccacaacttaatgctgtacttcggagaaaacctagacctctccaaatgcatgattcctgtatgaaactgtttgagtttt

SEQ ID NO: 130510 - DNA, 1046 bp, Zea Mays
ccgcactgtcgggcagtgcaacagccaagagtgctgaacctaaaccgaactgactgcggcgtcctcttcttgttcccaaacctcaccgcctcaactgcttcgccttcgactgcgggcggcggcggcggcgtacaaagaaccaaaagatgactccttgcgctctcaccgtcgactccctaaacccaaaggtgctggctctcgcggatcacctcggcgacaacgccattgcccgccgcgcgcagtgcatccagaacgagatagaagcagaaccggagtcacaccctttccgcgagataatcgattgcagcctcagcaatccacagtccatgggacagcggccaaacaagttcttccgagaggttcttgccttgtgcgactatccccatcttctagaacagagtggaactaattccttgttcagctctggtgcgatagcaagggcacgggagattctagacctctttcccgggagagcaacaggaggatatagccactctcagggcactgaaggattgcgcgacataatcgccgctggaatagccgctcgagataatttcccctgtaacgcggatgacattttcctgacagatggagcagctccgccggttcacatgatgatgcacctgctgatacgggataaaaaagacggcatcctctgcccagttccatcgcattccttgtacacgagtgctatgcttctccagggcgctactcttgtgccatatttccttgacgagtcaagaggctggggagtgagcatgtcagacctgaagaagcagctggatagtgcccggtcaatgggtgtttttgttagggggcttgtggttataaatccaggcaaccctactggacatgttctcgtggaggaaaatcagcgtgagattgtggatttctgcaggaatgaagatcttgttcttctagcagacgaggtttaccaggaaaatatttacgcagatgagaagggatttcactctttcaagaagatagcacggtccatggggtacggcgaaggagacatatctttagtgtccttccattcagtttct

SEQ ID NO: 130511 - DNA, 980 bp, Zea Mays
ccgcactgtcgggcagtgcaacagccaagagtgctgaacctaaaccgaactgactgcggcgtcctcttcttgttcccaaacctcaccgcctcaactgcttcgccttcgactgcgggcggcggcggcggcgtacaaagaaccaaaagatgactccttgcgctctcaccgtcgactccctaaacccaaaggtgctggctctcgcggatcacctcggcgacaacgccattgcccgccgcgcgcagtgcatccagaacgagatagaagcagaaccggagtcacaccctttccgcgaggttcttgccttgtgcgactatccccatcttctagaacagagtggaactaattccttgttcagctctggtgcgatagcaagggcacgggagattctagacctctttcccgggagagcaacaggaggatatagccactctcagggcactgaaggattgcgcgacataatcgccgctggaatagccgctcgagataatttcccctgtaacgcggatgacattttcctgacagatggagcagctccgccggttcacatgatgatgcacctgctgatacgggataaaaaagacggcatcctctgcccagttccatcgcattccttgtacacgagtgctatgcttctccagggcgctactcttgtgccatatttccttgacgagtcaagaggctggggagtgagcatgtcagacctgaagaagcagctggatagtgcccggtcaatgggtgtttttgttagggggcttgtggttataaatccaggcaaccctactggacatgttctcgtggaggaaaatcagcgtgagattgtggatttctgcaggaatgaagatcttgttcttctagcagacgaggtttaccaggaaaatatttacgcagatgagaagggatttcactctttcaagaagatagcacggtccatggggtacggcgaaggagacatatctttagtgtccttccattcagtttct

SEQ ID NO: 130512 - DNA, 510 bp, Zea Mays
cggtcgtaacgatcgacggtccgctcctttgctggtacttcgcaggttcctggaacatggcacatcagatgcacgatcctgccgcaggaagacaagatccccgcggtgatcagccgcttcagggctttccatgaggcgttcttggccgaataccgcgactaaactgttacgctgtgtgtgagttaagttggaggttcagtagaactgtagaagagctcagtgacagcgcagaaagaggcagtgttagaaaggcttaggtccttcttcacaggagcaacagttgtcttgtctcatcaaggagaaataaaaattttagttttacaacttctcattgacactgttgggttcttgacatggtagagaattgtgtgcactgtgcctggcactgggtcctactagcggcgcaatttaagcgtgaccaggatggcgccatcagccatctctgtcgatattacactgctagctgaaaatgccacttggtccctttcaggtgtttgtggacctaaacct

SEQ ID NO: 130513 - DNA, 980 bp, Zea Mays
agatattctatttcctatgcacaacatactctttataattgagtgtaattacatgaagttcttgctgaagacaaccaatatgatatagtgaaattctggtatatcaagagaacatctatgtggacaacaagaaatttaactctttcaagaagattgtaagatccatggggtatggcgaggatgatctccctctagtatcgttacagtctgtttccaaaggatactatggagagtgtggtaaaagaggagggtacatggagattactggcttcagtgctccagtaagagagcagatctacaagatagcttcagtgaacctatgctccaatatcactggtcaaatccttgcgagcctcgtcatgaatccaccaaaggttggagacgaatcatatgcttcctacaaggcagagaaagatggaatccttgagtctttagctcgtcgtgcaaaggcgttggaggatgcattcaacaagcttgagggattttcatgtaacaaggccgaaggagcaatgtatcttttccctcagattcttctgccacagaaggcaatcgaggctgctaaagctgctaagaaagcgcctgacgctttctacgctctccgtctccttgaatcgactggaatcgtcgtggtccctggatctggatttggtcaagttcctggaacatggcacatcagatgcacgatcctgccgcaggaagacaagatccccgcggtgatcagccgcttcagggctttccatgaggcgttcttggccgaataccgcgactaaactgttacgctgtgtgtgagttaagttggaggttcagtagaactgtagaagagctcagtgacagcgcagaaagaggcagtgttagaaaggcttaggtccttcttcacaggagcaacagttgtcttgtctcatcaaggagaaataaaaattttagttttacaacttctcattgacactgttgggttcttgacatggtagagaattgtgtgc

SEQ ID NO: 130514 - DNA, 1720 bp, Zea Mays
aaaaccgcggctgtggtcggcggccccccggtctccttccactcgctttccggcgggcgactggcctaaaatcgcctcttgtttgtttgcttccgtcgtcccctctccacgtagagcacgcccccggaccaccttttataagcaccaaccatctggccttgccgcgccgattcgccacgaagccgcactgtgagagagggacgcggcctgttgtcccggcttttagacgcaacttccatcgctgcgaagctatccattcgtgttcgtcatggccgccagcgtcaccgtggaaaacctcaaccccaaggtcttaaaatgtgagtatgcagtccgtggggagattgtcatccatgctcagcgcctgcagcaacaactacaaacacaaccagggtctcttccttttgatgagatcctctattgcaacattgggaatccccaatctcttggtcagcaacctgtgacattcttcagggaggttcttgctctttgtgatcatccgtgcctcttggaaaaagaggaaaccaaatcattgttcagtgctgatgcaatttctcgagcaaagcagattcttgcaactattcctggaagggcaacaggtgcatatagtcacagtcagggtatcaaaggactgcgtgatgcaattgctgctggaatcatgtcacgtgatggattccctgcaaatgcagatgacattttcattacagacggagcaagtcctggggtccacatgatgatgcaattactgattaggaatgagaaagatggcattctgtgcccaattcctcagtaccctttgtactcagcctccatagctcttcatggtggagctcttgtcccctattaccttaatgaaaaaactgggtggggtttggagatctctgatcttaagatgcaactggaaaatgctcggtcaaaaggcattgatgttagggccttggtggttatcaatccaggaaatccgactgggcaggttcttgctgaagacaaccaatatgatatagtgaaattctgcaaaaatgagggccttgttcttctagctgatgaggtatatcaagagaacatctatgtggacaacaagaaatttaactctttcaagaagattgtaagatccatggggtatggcgaggatgatctccctctagtatcgttacagtctgtttccaaaggatactatggagagtgtggtaaaagaggagggtacatggagattactggcttcagtgctccagtaagagagcagatctacaagatagcttcagtgaacctatgctccaatatcactggtcaaatccttgcgagcctcgtcatgaatccaccaaaggttggagacgaatcatatgcttcctacaaggcagagaaagatggaatccttgagtctttagctcgtcgtgcaaaggcgttggaggatgcattcaacaagcttgagggattttcatgtaacaaggccgaaggagcaatgtatcttttccctcagattcttctgccacagaaggcaatcgaggctgctaaagctgctaagaaagcgcctgacgctttctacgctctccgtctccttgaatcgactggaatcgtcgtggtccctggatctggatttggtcaagttcctggaacatggcacatcagatgcacgatcctgccgcaggaagacaagatccccgcggtgatcagccgcttcagggctttccatgaggcgttcttggccgaataccgcgactaaact

SEQ ID NO: 130515 - DNA, 183 bp, Zea Mays
cctggtttgccgctcttgcaacaatatctgtctcggtttgagaaattagttatggagctcatgccaaaattgggagaacactttgttgaataaatgataaaccgaagcatgtatggaagccggtggtttatcacagttttctcatgttccttcccatttcatctaactcttagaattttggaa

SEQ ID NO: 130516 - DNA, 756 bp, Zea Mays
atcaagcaagagataaacctcatatttcagataacattcgagaacatctaaaaacattggaccacttttagcactcttgctcccctcagctccacttttgttagagaagtctttcagttcattctattagaagtccggctgatttacaaataaaatagggaaacatatgaatggatatagatatccaaaatgtaaaaatgaaatattatgaatggtcaccagttaccaggttacactctggaaagtaaagtttcattgtgtgacttagttgtggtcactccaagtattcacaaacaagtgcagccagtaacctatctgcaagcaatagaaatcctagaatgtaaaaccattccatgttatgagcagcttgcaaaacacatggctaaacaaaaatactggcatctttacaggtagaaggaatgactacaaatccaaatcttatgactgaagcacaagtaaataataacaagcatgaaagacccccccaacccccctcccaaaaaaacccaataagcagacataaaataatagtcaagtccagcaaggcacgcttggcactgatcataaatggtcaccagctagcaccacccatcagtcaatgaaatcagcatgcctgtttcttccttgaacatactgtatgatccaccagaacaatatgccaaaagagaatcgaccaatattgttgaccatgattgtcaggcgttccaccactactgctgccattctccaagaacacaataaagaacaagtgaccat

SEQ ID NO: 130517 - DNA, 631 bp, Zea Mays
atggatgttccagatttaaaatatgcacgaggcggtcttggtgtgcttatgggactattctttggagctttggaaaatccgataatggcagaggagatgacagcaaggcagcaaatagtatacacaacaaagcagatgggtagtagaagtataagtaatgccaaaacctttgcagtcatgggtctgattttctcagcagctgaatgtaccataaagaaggttcgagcaaagcatgacactaccaatacagcggtagctggttgtgtcactggaggagctttagctgtaaaagttggccctaaagctacatgctttggatgtgtgggggtttgttgcgttctcagtggcaattgagaagttctttgatcggtatacttgaaatgggccatgtttgtttgattccaactgagcatgagcagcgttggcagaagaacctgattgtttgcaacattcagtcatctacaactgatgaaggactgtaacctatttttttacttattcccagtggattcgtaattactgaactaccggaacgcctaagagatctaccctgatcaatatcgatgcacgatgacattgaccagagttgttgttcttgaatgtgttttatgttattctcgacatctgcagc

SEQ ID NO: 130518 - DNA, 911 bp, Zea Mays
atacgccttttctgctgccgctgcatcttccactcgcgtcaagaaacgaaacccagctgcaccagcaacttctgccagcagacccaacgaccgaagctttttttttctttcttttcatcgccgccgctcggggttcaaggttcagcgcgtccccgaatgacgggcacgtacgaggcctccgaccgtcctcctcctcccaactccgccggctaccggaccgacaaagtccggcgaaagcggctgacggcgcagaagaggaaagagatcaaggaggcgttcgacctcttcgacatcgacggctccggcaccatcgatgcaagggagctgaacgtcgcgatgagagcccttggattcgagatgacaccggagcaaatcgggcagatgatcgcggaggtggacaaggacggcagcggcaccatcgacttcgacgagttcgtgcacatgatgacggacaagatgggcgagcgggacgcccgggacgagctccacaaggcgttccgcatcatcgaccaggacgccaacggaaagatctcggacatggacatccagcggctggccatcgagaccggcgagcacttcacgctggacgaggtccgggagatgatagaggccgccgacgaggacggcgacggcgagatcgacctggaggagttcatgaagatgatgaagcggacagactttggctctgggttctagtagtcacagacaagccaatcccaacatacattgatacataccatcggtgaaaaatacatatcacctagctactacgctacatatgactggagtattgggatttatttgagaaataatggcgtacacacaccacacatcattgtgcactaactactctagtacgtcctagctacgggttgtgtatttatttacacgtaatgaaacacatactacta

SEQ ID NO: 130519 - DNA, 1427 bp, Zea Mays
atacgccttttctgctgccgctgcatcttccactcgcgtcaagaaacgaaacccagctgcaccagcaacttctgccagcagacccaacgaccgaagctttttttttctttcttttcatcgccgccgctcggggttcaaggttcagcgcgtccccgaatggtacgtgactctcgctcgccgacggcctgatgggagtgatctcctctgcttttctcaactcttagattagaccctgctttgctctacttgagtttagctattggtttaagtggatcaatcgtgctggtcgttccttccatgagaatctgcttcagttcctcatgagcaagactagttggatgctgcgacgagatgtttggttgccttttgccgctagtccctcccttctcgtgattcctgaagctcaaccatgcatgtcattcaggctccgttatattatatatagataattgatcttattacttgctgggttatcctagagactgggttctagatactcgtgtgtatcatcagtttaagttgcacttcacttgttttctgatgaaaacagaggaacctctcatcattgtggttgtaagcacctgctctgacagaccacaacagaacggcgtaattttgttttcttcagagttgattaccaaatcgtggcaaagccaaagcccgtctgttcttgctctcgatgatttgggacgctgccatacatatgagtcggatcggaagcggcggcaccgtgatttcgtcgtccctgtaaaaaaagaaccattttttctcctctctctctgaaaactgaacgttgttggtgtggcgcagacgggcacgtacgaggcctccgaccgtcctcctcctcccaactccgccggctaccggaccgacaaagtccggcgaaagcggctgacggcgcagaagaggaaagagatcaaggaggcgttcgacctcttcgacatcgacggctccggtcggtgacgtgctagtgatgtagcgtttatatatacaaacacatgcgcatgtgttcgcccatggcggccgctgtgactttcacctttcacctgcttgcatcctccaggcaccatcgatgcaagggagctgaacgtcgcgatgagcaaatcgggcagatgatcgcggaggtggacaaggacggcagcggcaccatcgacttcgacgagttcgtgcacatgatgacggacaagatgggcgagcgggacgcccgggacgagctccacaaggcgttccgcatcatcgaccaggacgccaacggaaagatctcggacatggacatccagcggctggccatcgagaccggcgagcacttcacgctggacgaggtccgggagatgatagaggccgccgacgaggacggcgacggcgagatcgacctggaggagttcatgaagatgatgaagcggacagactttggctctgggttctag

SEQ ID NO: 130520 - DNA, 1145 bp, Zea Mays
taaaatttgaatatgaatattagaatgaataagctgatggagatagcttatggctcagcacattaatagtcaattttttttcttccccaaaaaagctgttgcctcgttgaggaatattccacatcccctcgtttccggcaaaccgcaatgaagtctctgacccccaccgccgctggctccgccgcagatttttccgactctctgccctccccgatctcccctgcggcggtgccatgccattccagccccggccgccactactacctcgccgtcgaccgcacccagttcaaaatgaggacactcttggagctcctgggggttgtcgcggatcgccgtggtgggctgccgattgcaacatgtgtttcctcccgtgatgagcttgatgccgtctgtgctgccgtcgcaaacctcccctttgtgtcagcgtcacctctgtatagtgatcaagctgaagcagagcgtgcatctattcttgagaactttcgtcaagaaacaactcagtggaataaaactgctaaagctaccaatattgccgaaagttctaagcttgaaagtactggctctaaaataagcattatagttgcaacagatgcttgcttgcctcaggcagcgatggcagaggcaccccttatggctcgagtgctgataaactatgagcttcccacaaagaaggaagcgtacttaagacgcatgtcaacatgtttggcggcagacggaattgtgattaacatggtcgttggttgtgaggtggttacactcaaggctttagaagagaacagtggtctgcttattgctgagatgccaatacatgtttcagaaatattatgaccgttccagttgtacaacatttcagaagttactgttctgattgcacactaactactcatggtttacttctactttaattttgaattgcttttcatgtttcagaatgttctcaaattatatctctaaagcattagaataatgctcattgcttcttttttcctctgtataagaaatgatagaatatagtcatggttcaacatccagcgacatgtttcttttactctgtgcatcgtatctatgttgatgcttacaagtccatgtatgaaggcaactaaaagtttaacatcaatccattattcttgcttatcactagtcac

SEQ ID NO: 130521 - DNA, 1420 bp, Zea Mays
taaaatttgaatatgaatattagaatgaataagctgatggagatagcttatggctcagcacattaatagtcaattttttttcttccccaaaaaagctgttgcctcgttgaggaatattccacatcccctcgtttccggcaaaccgcaatgaagtctctgacccccaccgccgctggctccgccgcagatttttccgactctctgccctccccgatctcccctgcggcggtgccatgccattccagccccggccgccactactacctcgccgtcgaccgcacccagttcaaaatgaggacactcttggagctcctgggggttgtcgcggatcgccgtggtgggctgccgattgcaacatgtgtttcctcccgtgatgagcttgatgccgtctgtgctgccgtcgcaaacctcccctttgtgtcagcgtcacctctggtagttcacaaacacaatttcacctccttagttgtaacttcctctatgcattttcatttgttctattttctctgaaattttttggtggcttggaagcaatatgccttcatctagtatgttttctctgaaaatatatgacgtttatcaccaacataaatatttttatgaacccataaattgttgcacaaggtcctaacaggtatatgatccttactattatgatgttcttacttcacatcaacctccagatattactaatggtcttctatgtacagtatagtgatcaagctgaagcagagcgtgcatctattcttgagaactttcgtcaagaaacaactcagtggaataaaactgctaaagctaccaatattgccgaaagttctaagcttgaaagtactggctctaaaataagcattatagttgcaacagatgcttgcttgcctcaggcagcgatggcagaggcaccccttatggctcgagtgctgataaactatgagcttcccacaaagaaggaagcgtacttaagacgcatgtcaacatgtttggcggcagacggaattgtgattaacatggtcgttggttgtgaggtggttacactcaaggctttagaagagaacagtggtctgcttattgctgagatgccaatacatgtttcagaaatattatgaccgttccagttgtacaacatttcagaagttactgttctgattgcacactaactactcatggtttacttctactttaattttgaattgcttttcatgtttcagaatgttctcaaattatatctctaaagcattagaataatgctcattgcttcttttttcctctgtataagaaatgatagaatatagtcatggttcaacatccagcgacatgtttcttttactctgtgcatcgtatctatgttgatgcttacaagtccatgtatgaaggcaactaaaagtttaacatcaatccattattcttgcttatcactagtcac

SEQ ID NO: 130522 - DNA, 1074 bp, Zea Mays
taaaatttgaatatgaatattagaatgaataagctgatggagatagcttatggctcagcacattaatagtcaattttttttcttccccaaaaaagctgttgcctcgttgaggaatattccacatcccctcgtttccggcaaaccgcaatgaagtctctgacccccaccgccgctggctccgccgcagatttttccgactctctgccctccccgatctcccctgcggcggtgccatgccattccagccccggccgccactactacctcgccgtcgaccgcacccagttcaaaatgaggacactcttggagctcctgggggttgtcgcggatcgccgtggtgggctgccgattgcaacatgtgtttcctcccgtgatgagcttgatgccgtctgtgctgccgtcgcaaacctcccctttgtgtcagcgtcacctctgtgatcaagctgaagcagagcgtgcatctattcttgagaactttcgtcaagaaacaactcagtggaataaaactgctaaagctaccaatattgccgaaagttctaagcttgaaagtactggctctaaaataagcattatagttgcaacagatgcttgcttgcctcaggcagcgatggcagaggcaccccttatggctcgagtgctgataaactatgagcttcccacaaagaaggaagcgtacttaagacgcatgtcaacatgtttggcggcagacggaattgtgattaacatggtcgttggttgtgaggtggttacactcaaggctttagaagagaacagtggtctgcttattgctgagatgccaatacatgtttcagaaatattatgaccgttccagttgtacaacatttcagaagttactgttctgattgcacactaactactcatggtttacttctactttaattttgaattgcttttcatgtttcagaatgttctcaaattatatctctaaagcattagaataatgctcattgcttcttttttcctctgtataagaaatgatagaatatagtcatggttcaacatccagcgacatgtttcttttactctgtgcatcgtatctatgttgatgcttac

SEQ ID NO: 130523 - DNA, 894 bp, Zea Mays
ggggtgaaagacgtcgcggatggggctgcgcaaaaacagcaaacacccggcgagcgtcgacggcgtgctgttcactgctcagcacaaagcagcgatgaagccagggaagtgacggggctgcagtttttggaccggcattgctgcgcagagacttggacgccacggctacagcccgagcaggggctccttgctgcagcaccagggaaaggaggaaggggcgagcaacagcagggaaggaaagccggctgggaggaagatgaacagggaggtgctggaaaaaaaaattctggacgccatccatagaagctgctgctgcctgcgctgaaccagatcgaaggggagctcggcgtgtgctgcgggagatggccggctagagcagagggaacagggagctcggccatggagaggctgctggaatttctgggcgcctgcttgggggctcggctgggggatttttctgggcgtccatgggagggagctagaaatcagggcgccatggggctctgcgcgtccagcagcaagggcgccgaacagagggaggaggggctcagccttggaggttgcagggagatggaaatcgctgctcgcttgcaggggacgcgctggagagatggcgaccaggggaaactcgcgaccatggaagtcgcagggaaaacaggggcgccagtgacctgctgttccatgaacgctggagcttgggggagggagagccgaggcgctgcgcgaggaagaaaggcgccatggctggggcgtcggccaagggaaactgctccctgcagggagcgagcgccagggaggagggcgccatgggggaggcttgctgccgtgaagagaagacagggaggaagaatggctgtggcggctaggaaaattgaggggtgggagtgcaaaaat

SEQ ID NO: 130524 - DNA, 2045 bp, Zea Mays
cagtcttccctgtgcagacatccacttcttctctccctgatccaaatcacgaaatagtgttgacggttcccctgcgctcctcccctcggcttctagcggcgcgcagcagccccggccggtgttctggcgatcccgaagccccatgcccaggtacgaagcccccctttccccagtgatccttccccatggcggctagcccctgctaggaagccggcgcaggatccatgtagggcagcccttctcttgccgtgtgtggccctgcctctggccctgcagccgcgacatgctagcacgagacccagggaaagcgtgccgatcagaaccgcccatacactgtcgttcacgccgtgccgcgctatgcctgctgtcgcgtcgtccgctattgtcgaagtcgcatcgtgccgcgctgctcctgctgttgcgtcgtccgctgttgtcgaagacgcgtcatgtcgcgctgctccagctatcgtgtcgtctgccgccgttgaagtcgcgtcgtcacgtcgaggtgagcgtcactcctctccctcccgtgcaagatcgtgtggagcaggcagccattggagcggctcctatggtgcagccccatgcggctagcccgagctcgccccctacacggccgctgcccgtggtagtccggtggtcggccgcttggccacctccactcccctgctcacgccaagcgcgtcccctacccctggtcgcccctaaccccatgctagcggaggtgctgctcgccggccgagcagccgtggccccctgagctcccctgcgcgcgaatctccagctcatctcccagcgtgcagccatggcgggtgtggccgaggtcccctgcgcatggccagcgcccagcttgcccctccccctgcgtgtcccggtgcagccgatggccagcgaccggcgcggtgacctgctctgtcctcggctcccttccaacctggccagcttcccccggcggcctagccaagcccctgcccctcacggtggcttcctgagtcctaggaagaaggagagaaatctgtcattgtgagtgcatctggaaaaaaagggaaactacccacggtcccacctgcatgtcgttctttccgtgaacgtgatactcttgccatgcgtttggagaaagcatttggccccatgtgcatgcacgatcccctacatgcagctaatagaaatttaacctcacaccatccctttgatcttctgtgcccaagatcctgtggtcacccgtgtggccaagcgcagaccaatcagattatgacacatctcctttaaaccgtgatatactaaacacacgatatctcttgtgttataggtccgatacactctattcaagttgcgttagatttatattaatgttgtctatgcgttaaaaataatgttccatcatttcatatgtttcgaataatctattaaatatttgttttaaaattagttttccaattgaaactaatttataattcttttacccgagattttataaataaatactaagttgattaataccaaccaaaatatttagaattaatacttggctagtataaacgtgatatctgttagtgattctcgcttgtcgcgtgttgggggccttcggcttccgaaggtcctcaaaaacatgatttaacaatgtttctggagtacaatgtgtgaacagatatcttcggacccaagttaaaaccacaatgtgaagaagcacagaaggggtacgaaggatggcgcggagccgaagctgtgtgtagaagagcttcggcatgataagcggaaagggaaaccgacttaaagatgaaaaggctatttaaacctcgatgaattattatagagttattagcagatgtaaagggcattggtgtaattttacatgggttgcgtctcacgcatataaatagatgaacagtaaccctgtactgttcatgctgacttggcatttgcttttgcgtcacgcttgtacttttaccttctctcaagtcaaaggtatatttgtaacccgatatcatttctatttttccatagcaataaaatagaaatgagttgataataacacataa

SEQ ID NO: 130525 - DNA, 1110 bp, Zea Mays
atttttgcactcccacccctcaattttcctagccgccacaaccattcttcctccctgtcttctcttcacggcagcaagcctcccccatggcgccctcctccctggcgctcgctccctgcagggagcagtttcccttggccgacgccccagccatggcgcctttcttcctcgcgcagcgcctcggctctccctcccccaagctccagcgttcatggaacagcaggtcactggcgcccctgttttccctgcgacttccatggtcgcgagtttcccctggtcgccatctctccagcgcgtcccctgcaagcgagcagcgatttccatctccctgcaacctccaaggctgagcccctcctccctctgttcggcgcccttgctgctggacgcgcagagccccatggcgccctgatttctagctccctcccatggacgcccagaaaaatcccccagccgagcccccaagcaggcgcccagaaattccagcagcctctccatggccgagctccctgttccctctgctctagccggccatctcccgcagcacacgccgagctccccttcgatctggttcagcgcaggcagcagcagcttctatggatggcgtccagaatttttttttccagcacctccctgttcatcttcctcccagccggctttcctcccctgctgttgctcgccccttcctcctttccctggtgctgcagcaaggagcccctgctcgggctgtagccgtggcgtccaagtctctgcgcagcaatgccggtccaaaaactgcagccccgtcacttccctggcttcatcgctgctttgtgctgagcagtgaacagcacgccgtcgacgctcgccgggtgtttgctgtttttgcgcagccccatccgcgacgtctttcacccccggtgagacaacgacgctccttgtttgattccacatcggcgttattttcatatgattaattgtgtatgtgtgctgttttatttttgttttgtggaggagaggcaccccgtgttttgcgaggagaaggcaagccgctcgacgctcgtcgatgttcgtaacgatgcacaaatcggaatcaccatcgtcctcacaaacaccgattgggtttgtttatgg

SEQ ID NO: 130526 - DNA, 440 bp, Zea Mays
cttttctttttcttgggagaaacaacagcgccaccatcagcctactctggttacaaaagccatgctggctatgaggctgcaaatacatatgaatacgcagggaaccgggcgcctacacctccaagtggatcttacatccctcgaagaggacattactaacaaaaaatggagtgctggctctgtgcatccattcgatcgcatggtaacaaggaatcaaggatctccgtatttagatgtttcatacatgttatgtagacgttaaaaagtaacttgtttaaggaaaataagaaccctctgcagctttccctttgactgaagtgcagcccggcacaccggttgcttgttgaagaatgctttttttattattattgtagttaagagtccagacgtcgttattaccacttatcttcgtattggaaaaaaaatgtctttttcttagt

SEQ ID NO: 130527 - DNA, 1380 bp, Zea Mays
gtgttgaacaccctaaaaagtattggaattcaagagtgtgagataagctttcccagttacaagggaggaagccgagggtttgcttttcttaagttcacctcacattactatgctagagcagcacttcgtcgcttaatgaaatccgatgctatttttggtactgatagaagcgctaaagtatccttttatcgaacccccacaaaatcatccaagagacttatacagtctggacctaggccttgtcatttggatgaaaaaattcacccggggagggtaagatcaccctcgcgtagtcacggtattatattaatagaaggtcatgacaagttgacaatggtctcgaccgagcaacccccgaaccctgtcctcccatcatcaatgggccgcttcaagctgtccactctgcaaatgcccatccagggtggtgcacagccgagtcgtaacccgagagtggatgagaaacacgaggagatgtcaatgatatatgcccaggcaaaaatagtatacctggaacatgtccctctttcttgggatgaaaataaagttaaggaatactgtgaagaatatggggagatcctgaaagctgatgttttccagatatcaaagaatatggaaaatgaaacaatttcttttgttgaattctcatccaggaagggtgcgttagcttgtgtgacaggaataaacaaagcaaatattgttgatggaagcttcaagttgtgtgcatatcttgcttggccaaaaagtgcttcaaaggtcaatagtgctgcaccttcaaatgctgccaccgcaaccgagaaggacaaaacccacacagagaagattcttgtagacatcgatttgcaacataaattccagaaaggcgacaagagcaaacttacatctcagacaaaggaggcaattatgaagaagaaaaaatcaagtaaattaccaaatgacaatgatacaaaactaacctcacaaggtgctgccgaagtaccacaaacctccaaatcttctgaaggcaagaggaaagttggaaaaaacaaacatgcctctgtataccaaaaaccattgaagaaagcaataaataatcgtaacgttgatgagagccagctaactcatcggagtgctgcagtactgcaaacgtctaacacttccaaagggaaaaggaaagccagtaatttgggtggaagttcaagatctaaatcatatgcctctgatctggaacctcatgctggattcatttcgcctgcgattcgagataatggcagtgatgcatataatcgacagagaactgcacggtatgatatccatcctatagatgtccatccttatgctagagttgttttagaaattatgtcagggaaagtgggtaaccaaccagtcaactgtaggccataa

SEQ ID NO: 130528 - DNA, 927 bp, Zea Mays
ctccaattacctatcctctccgtcgaatcagaaaccctaacctcaccgtaccacggcctacgagccggaatgaccacatcagccgccgacgatggcagctctttggcgcctaccatcaccgagggagaaaccacagccgacgccggtgctggggcaggtgttgagtgcgtcgagggcaaagagatgaaggttggggccgcggctccagttgaggagccggataaggaggcggcgcgggaggaggatcctggtgatgatgatgactatgaggaggaggaggaggaggaggaggaggaggaggaggaggaggaggaggaggaggaggaggtggaggaggagacggaaactgcgaatgggaaagaggctgagttgatggagccattggcggcgctgaagcctggggaggaggtcaaacctgaaaagctagagggggagaaggaagagctggatgaggagcccgaggcatcggaagaggaccccgaggaggtggaagagttgaaggaggagggcgacggtattgcggaggaaggcttggtggatgggtcggaggcgaacgatgataaagatgctgatcaattgagcagtgggagtgatagtggtggaagcagaagtcgtggtatgcagaactctgaacttgctggaggtcttgaaatatttgttgatgacttgcctcaagattgtgtcaaggaagacattgctatggccttttctcaatcaggggaggtcaaatctgttaggataattaaaaattcatcaactggaaagaaccaagacattgcatttgtttgttacacaagtattgaagctgcaaagaaggttcttgctgaatttaaggagggaattgaggtaaaaggaaaaatggtcagggtatctgcttgtcaagataataataccctttacctggggaacatttgcaagggttggacc

SEQ ID NO: 130529 - DNA, 308 bp, Zea Mays
attcctaccgaattgtcagttaaggcgattgttcctcccgggcgaaggaccctgaatgcttccttcactaatcccgtgattgctcgtgctgggcactcatggcactgcaggtttttttttgaattatggtactccacagaatctcgaatatagcgataaatttgtggtaaccactactacagattttaaatccatgtaataaagaagaagattttgaatctggtagaaatttaccacataagcaagggagacaaggtcaaatgaatctgaagacagcccggtcgcttcaccattggcatgaacccagc

SEQ ID NO: 130530 - DNA, 525 bp, Zea Mays
acaaaaaggggttgccgagtcctcccttccccctcccttctggatcacgccgcctcagcccttgcacgtcccagccacgctcgcccactgtgtgccgtcgtggtgagaaagaaagcaacgccgccgccctgtacctgtgcgctggcgggcagggaaattatcgcctgcacgttgagcggacctgggcaccgtcgttcagccggatcgtgcagactcagacggtctttatgcggtgggcgccatggtgcgctgtgcatgctcgatgcgtaatcgctcgctcgggtagcgactggagctcgggtgctcgacgtcatggttccccgccgccggggaccagcaggtattcagtcgccggggcccaatccggtgtcctaggagtggtgcctccactcgatggtgtatttcggagtctcgggtcgggcgcagaagcttcacggtctgggaaattgctcatcgaagtcgatatctgcagtggggtcgagctcttccgtggtcgggtgtcgctgctccaaaatcgccggtgag

SEQ ID NO: 130531 - DNA, 1213 bp, Zea Mays
agatgctccgttcatcgagcaacaggcaggccgcacgctcttccttagcttgcctgaattctgtagtcacgcacactagtctcagatatggatacttgtcatcaatccatagagaccgcagatggcaagaaggactacagtgaccctgtcccagcaccattcgtgaacgccggcgagctgggcaagtggtccctgtaccgcgccgtcatcgccgagttcgtggccacgctgctcttcgtgtacgtcacgctggccaccgtcatcgggcacaagcgcgaggccgagtcccagccgtgcggcagcgtcggcgtgctgggcatcgcctggtccttcggcggcatgatcttcgtgctcgtctactgcatcgccggcatctccggcggccacattaacccggcggtcaccttcggcctgctgctggcgcgcaagctgtcgctggtgcgcgccgcgctctacgtggtcgcgcagtgcctgggcgccatgtgcggcgccggcctcgtcaaggccttccacggcgcccactggtaccttcgctacggcggcggagccaacgagctcgccgccggctactccaagggagccggtctgggcgccgagatcgtgggcaccttcgtcctcgtctacaccgtgttctcggccaccgaccccaagcgcaaggtcagggattcgcacgtcccggtcctggcgccgctgcccatcggattcgcggtgttcatggtgcacctggccaccatccccgtcaccggcacgggcatcaacccggcaaggagcctggggccggccgttgtgtacaaccagcgaaaggcgtgggaggatcactggatattctgggtcggcccactcatcggcgccgccgccgccatgctctaccaccagttggtcctccgcgccggcgcagccaaggccttcgcgtcctttcgcaacaaccagcacttctgaatctctgatcctcccgtcggcacgacgatacatggattccaattttcgccgtgcatgcatttcgtgtctccagtgtttgcgttgtgtatcgcttacgatttcatcggcttccattccaagttttcgatcagctacctgtttattgtggaccgtaacactacgttctgtatttttcaacttactgtatctatctatgtactgatttaggttcagtgcaaacactttccctgtttgtataattcatctcatgtcaaattgtctatggttgttagtt

SEQ ID NO: 130532 - DNA, 3552 bp, Zea Mays
cgttctccgtttcactttcccaacacccagaatcctgcagaaatcaccctttccacccccacccagcgctgctcggatccccgggcgagcacatcctccggtcctcgcttgtcggcctctcctccccggggccggtccagcgggttgcatggtgcgcggccgctggttgtgagcccaatcgatggcctcggcggaggcgcgccgcctcgcggtcgtgccgcagctagatatcgagcagatactgaaggaagctcaacaccgatggttacgccctgctgaaatatgtgaaatactgaaaaactacaggaacttccgtattgctccagaaccaccaaacagaccaccaagtggctcactttttttatttgatcggaaagtgttgagatacttcaggaaggatggtcataattggaggaagaaaaatgatcagaagactgtcaaggaagcccatgaaaggttgaagtctggaagtattgatgtacttcactgttactatgcccatggggaagagaatataaacttccaaaggaggacttactggatgctggaagaggactatatgcacattgtacttgtgcattatcttgagactaagggtggcaagtcgtctcgtgctagaggaaacaacatgattcaagaagctgctgtggatagtcctttaagtcaattaccttcacagactatggagggagagagctcacttagtggacaggcctccgaatatgaagaggcggaatcagatatttattcaggaggagccggacacgactctttcacttgggtgcagcagcatgaaaatggaactggacccatgatagcttcttctgttttcagctcgtacacacctgctttgtccataggtaattaccatgggctgcatgccacacaaaacacaagcttctatcctgttaaccagcttaattctcctgtcattcttaatggatcaagtgccatgcttggaacaaatggctgtgcaaatcaaactgatcttccatcgtggaattctgtgatagaactggatcatgagcctgttcaaatgcctgatctccagtttcctgttcctcctgatcaaggtacttccacagaaggcctgggagttgattacttaacatttgatgaagtatattctgatggcctcagtctccaagatattggtgccacaggaactcatggagagtcatatttgcagttctctagtggtactggtgatttggctgcaacagtgaacagcttcccacaagaaaatgatggttctctggaggcagccattggctatccatttttgaagacacagtcatccaatctatctgatatcttaaaagacagctttaagaaaactgacagttttacaagatggatgagcaaagagcttcctgaagtggaagattctcaaattcaatctagttctggggcgttctggagcagtgaagaagcaaataatatcatcgaagcatcaaaccatgaggcactggatcagttcactgtttccccgatgctctcgcaggaccagctctttagtatagttgacttttctccaaactggacatatgtaggttcaaagactaagattttagttgctggtaacatcctgaatgacagtcaaatcaccgagagatccaagtggtcatgtatgtttggagaagttgaagttccagcaaatattttagcagatggtactctcatctgttactcaccgcagcataaacctggtcgagtacctttttatatcacctgctccaacaggttggcctgcagtgaagtgcgagagtttgaatttcgaccaactgtctcccagtacatggatgctcctagtccacatggtgaaacaaacaaagtttatttccagatacgccttgacaagttgttatcccttggaccggatgagtaccaggcaactgtatctaatcctactctggagatggttgacttaagcaggaagataagttcactgatggcgagcaacgatgagtggtccaacttgctaaagttggctgttgataatgagccttctactgctgatcagcaggatcagtttgctgaaaacttgataaagggaaaattgcatatctggcttctaaataaagttggtatgggtggcaagggacccagtgtgttagatgatgaagggcagggcgtgcttcacttagcagctgcacttggatatgattgggctataaggccaacacttgctgctggcgtgaatattaatttcagagatattcatggctggactgcactccattgggctgccttttgtggccgagagagtactgtagttgcgcttattgcactgggagcagctcctggagctttgacagacccaactcccgatttccctggaagtacaccagcagatcttgcatcttctaatggtcaaaagggaatatctggtttcttggcagagtgttctctgaccagtcatcttcaggtccttaatctgaaggaagctaatatggctcaaatatctggtctacctggtattggagatgttaccgagagagattcactgcagcctccaagtggagattcattgggtcctgttcgaaatgctactcaagctgctgcgcggatatatcaagttttcagggtgcaatccttccagagaaagcaagcggctcaatatgaggataaaggtggcatgtctgatgagcgtgctctctcactcctttctgtcaagccacccaagtcagggcagcttgatcctctgcactctgctgcaactcgcatacaaaataagttcagaggatggaaggggagaaaggaatttcttcttattaggcagcgaattgtgaagatccaggctcatgtgcgaggtcaccaagtgaggaagcattatcggaaaatagtttggtctgttgggatcgtggagaaagttatattgcgttggaggcgtagaggggctgggttacgtgggtttcggtctcaagaaggatcagtggagagcagtagtggcggaacaagtagcagttcgatccaaaataagtcttctggagatgattacgattttctgcaagaaggacgaaaacagactgaagaacggctccagaaagctcttgcaagagtgaagtccatggctcagtacccggaagcaagagatcagtaccagaggattttcactgtcgtgtcaaaaatgcaggagtctcaggctatgcaagaaaagatgccggaggagtcagcagagatggacatgagtgaattcaaggaactgtgggatgacgatgcacctatcccgggttatttttagtgtggaaacctgttttgttggatttatttctctgtagattgctccgtttgtcttgagtgctactgaattgatggcacaaatggctgataacccaaagtagcgttgctggtgcatgatctgacatgtttggatttggacttaggtgtggtatttcttttgccttatgtacagtagaatattatctacatttgaaggagccttgtatttactgtgtgaaatcggtgtaaagagtttgatatcagagatcttacccagacttaacggttgcatgttactgcagtgcagcagttaggagtttgaggcttttt

SEQ ID NO: 130533 - DNA, 1006 bp, Zea Mays
cgttctccgtttcactttcccaacacccagaatcctgcagaaatcaccctttccacccccacccagcgctgctcggatccccgggcgagcacatcctccggtcctcgcttgtcggcctctcctccccggggccggtccagcgggttgcatggtgcgcggccgctggttgtgagcccaatcgatggcctcggcggaggcgcgccgcctcgcggtcgtgccgcagctagatatcgagcagatactgaaggaagctcaacaccgatggttacgccctgctgaaatatgtgaaatactgaaaaactacaggaacttccgtattgctccagaaccaccaaacagaccaccaagtggctcactttttttatttgatcggaaagtgttgagatacttcaggaaggatggtcataattggaggaagaaaaatgatcagaagactgtcaaggaagcccatgaaaggttgaagtctggaagtattgatgtacttcactgttactatgcccatggggaagagaatataaacttccaaaggaggacttactggatgctattgtacttgtgcattatcttgagactaagggtggcaagtcgtctcgtgctagaggaaacaacatgattcaagaagctgctgtggatagtcctttaagtcaattaccttcacagactatggagggagagagctcacttagtggacaggcctccgaatatgaagaggcggaatcagatatttattcaggaggagccggacacgactctttcacttgggtgcagcagcatgaaaatggaactggacccatgatagcttcttctgttttcagctcgtacacacctgctttgtccataggtaattaccatgggctgcatgccacacaaaacacaagcttctatcctgttaaccagcttaattctcctgtcattcttaatggatcaagtgccatgcttggaacaaatggctgataacccaaagtagcgttgctggtgcatgatctgacatgtttggatttggact

SEQ ID NO: 130534 - DNA, 507 bp, Zea Mays
atcaaattagtttttatatatatatataacacatacactaagtattatatgaatccattagaaaccaaaacgaattttaatttatgacagaaggagtacatgacattggtttaatggcaagggcaacatctaaatgccttatatttttatagcgaaaccaaaaatcaaaatgtggcgccggtgcactggcaagggcaacaggaaggggcttcgctacaatgctgatgtccaatggttattggcccgcctattgatgatcgagcacggtgtatgatgctgatgcatacgcccttaactttccagaaatcgccacatagctgcagttctagcagtacagaatactgatagggcaacccgcgtggtcgcttggtgttgagcttccacaaaacatgagcttcttttctgcatagtcatcttagcctatcctcttgaatttcagtccggacaattgatacaacgacggctatgtcatccagtttgcccccactgtagccaaggtacccagcc

SEQ ID NO: 130535 - DNA, 1005 bp, Zea Mays
gaattcggtgataggaggcgacgacttcaagagtgggcagaccaagatgaagtctgtgttggtcgatttcctcgtcggcgctgggattaagcccacctcaattgcaagctacaaccatctgggaaacaacgacggcatgaatctctctgccccacaagtcttccggtccaaagagatctccaagagcagcgtggtggacgacatggtcgctagcaatcccatcctctacaagcccggcgaacatccggatcacgtaatcgtgatcaagtacatcccctacgtgggtgacagcaagagggctatggacgagtatacctctgagatcttcatgggtggcaagaacaccatcgcgctgcacaacacctgcgaggactcgcttctcgccgcgcccatcatccttgacttggtgctcctagctgagctcagcactcggattcagctcaaggccgaagggcaggataagttccactccttccaccctgtcgccactattctgagctacctcagcaaggctcctcttgtacctcctggcacaccagtggtgaatgctctagccaagcagagggccatgctggaaaacatcttgcgggcctgcattggccttgcccctgagaacaacatgatgcttgagcacaagtgaagagtttcacgtcccttaattaactaccacaagataggatgaatggaaaaaggagggatcaagcgaaggtgtgggaataatcagtgactcctctgagcccaacgaagaaatgtcaggaggctacaggaaggagaagtgtaaggagagaagaccaagcatggatatatcctcttttcgaaggcaatctatctattctttttttgtagatttgactcgttttttgtactcgtgggacgagattgtgtactggctatatatccactgtatgcagcatgaaacctttatttgttctgttgtgtgatagaggttatatatagaagtgtccagcctagtttttgaaactcctagttgattaatattttcac

SEQ ID NO: 130536 - DNA, 7198 bp, Zea Mays
ctgaacttcacagggtgaaataatggcggagccctaccaactgaacggcatactgaacgggatgcctaatttgagtcatccatcctctccatcagaggtcgatgaattctgtaaggcacttggtggtaactcgccaatacacagcgtgctagtcgctaacaatgggatggccgcggtcaagttcatgcgcagcatccggatatgggccctggagacctttgggacagagaaggccattcttttggttgctatggcaactccagaggacttgaagataaacgctgagcacataagaatcgctgatcagttcatagaagttcctggaggaacaaacaataacaactatgcgaatgtacagcttatagtggagattgcagagagaactcgcgtatctgcagtttggcctggctggggtcatgcgtctgagaacccagaacttccagatgctctagatgagaaaggaatcatttttctcggaccaccatcagctgcaatggctgcactgggtgataagattggttcttctcttattgcacaagcagctggagttccaactcttccatggagtggatcacatgtaaaagttccaccagaaagctgccattcaattcccgaggagttatataggaatgcttgtgtttccaccacagaggaagcagtggctagttgtcaggtggttgggtaccctgccatgatcaaggcatcatggggaggcggtggtaaaggaataaggaaggttcataacgatgatgaggtgagggcgctgttcaagcaagttcaaggagaagtccctggctcacctatatttattatgaaagtggcatctcagagccgacatctggaggttcaattgctctgtgataaacatggcaatgtggcagcactgcacagtcgagattgcagtgttcaaagaagacaccaaaagattattgaagaggggccaatcacaattgctgctccagacactgttaaagagcttgagcaggcagcaaggcagcttgctaagtgtgttcaatacgttggtgctgctactgtagaatatctgtacagcatggaaacgggcgagtactattttctggagcttaatccacggttgcaggtagaacatcctgtgactgaatggatagctgaaataaacttgccagcagcccaagttgcagtcggaatgggcatacccctttataacattccagagattagacgcttttatggaatggatcatgggggcggctaccataattggaggacaatatctgctgttgcaactaagtttgatttggataaagcacagtcagtgaggccaaagggccattgtgttgcagttagagttacaagtgaggatcctgatgatgggtttaagcctacaagtggaagagtggagtctggaggagcaattcatgaattttctgattcacagtttggtcatgtttttgcatttggggaatctagatctttggccatagccaatatggtacttgggctgaaagagattcagatccgtggagagatacgcacaaatgttgattacacagtggatctcttgaatgcaacagaataccgcgaaaataagatccatactggttggcttgacagcagaatagctatgcgtgttagagccgagaggcccccatggtacctctcagttgttggaggagctctatatgaagcatcaagcaggagctcaagcgttattactgattatgttggttatctcagcaaaggtcagataccaccaaagcacatatcgcttgtcaatttaactgtaactctgaacatagaggggagcaaatacacgattgagacagtaaggggtggaccccgcagctacaaattaagaatgaatggatcagaaattgaaacagagatacattcactgcgagatggtggacttttaatgcagttggatggaaacagtcatgtaatttatgcagagacagaggctgctggtacacgccttctcattaatggtagaacatgcttactacagaaagaacacgatccttcaaagctattggctgatacaccttgcaaacttttgcggttcttggttgcggatggctctcatgtggatgctgatacaccatatgctgaggtggaagtcatgaaaatgtgcatgccactgttgctgcctgcctctggtgtcattcactttgttatgcctgagggtcaggccatgaaggcgaatgacctgatagcaagattggaccttgatgacccatcttctgtgaggagagccgaaccatttcatggttcctttcccaaactgggacctcctactgctatctctggcaaagttcatcaaaaatttgctgcaagtgtgaattctgcacacatgatccttgcaggatatgaacataatatcaatgaagttgtacaagacctgctaaactgcctagacaaccctgagctcccttttctacaatggcaagaacttatgtctgttttagcaacacgacttccaaaagatcttaggaatgagttggatggtaagtacaaggagtatgaattgaatcctgacttctgcaagagcaaggatttccctgcaaggttgctgaggggggttattgaggcaaatcttgcatactgttcggagaaagatagggttacaaatgagaggcttgtggaaccacttatgagcctggtcaagtcatacgagggtggaagagaaagccatgctcgtgttgttgttaaatctctatttgaggagtatctgtcggttgaagagctcttcaatgataaccttcagtctgatgttatagagcgtctacgccttcaacatgcaaaagaccttgagaaggttgtatacattgtgttctcacatcagggtgtgagaagcaaaaataaattaatactgcggcttatggaagcattggtatatccaaacccatctgcttacagggatcagttgattcgcttctctgccttgaaccatacatcatattctgaactggcacttaaagcaagccaacttcttgagcacactaaattgagtgaacttcgcaccagcatagcaagaagcctttcagagctggagatgtttactgaggaaggagagcgtctgtcaacacctaggagaaagatggcgataaatgagagaatggaagatttagtttgtgctccactggcagctgaagatgcccttgtagctttgttcgatcacagcgatcctactcttcaacggagagtagttgagacatacatacgcagattgtatcagccatatcttgtaagtggaagtatccggatgcaatggcaccgagctggcctaattgccttatgggagttctctgaagagcatcttaagcaaagaagtgggcaagatgtgcccctacagcaagtagaaaatcccattgagaagagttggggcgtcatggttgtaatcaagtctctccagtttgtagcaactgcaattgatgttgcactgaaggagacttcacagtacggaattggtgtcagaagtgtctctaacagtaaccatgtacattctaatcaaagcaatatgcttcatattgctttggttggtatcaataatcagatgagtactctgcaagacagtggtgatgaggatcaaacacaagaaagggtcaacaaactattcaagattttgaaggataatactattacatcacatcttaatggcgctagtgttaaggttgtcagctgtattatccaaagggatgaagggcgtccaccaatgcgacactccttccaatggtctgttgacaaactttattatgaggaggatccaatgcttcgccatgtggaacccccgttgtctacattccttgagctggaaaaagtaaacttagaaggttacaatgaagtaaaatacactccatcacgtgatcgtcagtggcatatttatacgcttatcaagaacaagaaagatcagagattaaatgaccagaggatgttccttcgtaccatagtcagacaaccaagtgcaacaaatagtttcctgacaggtaatattgacaatgaagtagggcacacacaagcttcgtcatcgttcacatcaaacagcattctcagatcattgatgggagcactagaagaaatagagctacatgctcatagtgagactgtgagatcaggccactcacacatgtatctgtgcttactgagagaacaacaattgcatgaactaatcccgttttcaaggatgactggtaaaattgataaggatgaaggaactgtgtgcacacttttgaagcatatggtattgaatttatatgaacatgttggggtcaggatgcatcgtctttctgtgtgccagtgggaagtcaagctctggttggtttgtgatgggcaagctagtggtgcttggagagttgttgttaccaatgttactggccacacatgcaccattgatatttaccgagaagtggaagaccccaccacacatcagcttctctaccactctgccacaacctcggctggtcctttgcatggtgttgcattgaatgaaccatacaagcctttggatgctattgacctcaaacgttatgctgctaggaaaaatgaaaccacatactgctatgattttcccctggcatttgaaacagcgctgaagagatcatggaaatcaagtagctatggtgttagcgaagctaatgagcacaatcgattctatgctgaagtgaaagagcttatatttgctgattcggttggagcatggggcactccattggtttcagttgaacgtcctccaggcatcaatgatattggcatcgttgcttggaacatgaagctgtccacgccagaattcccacgtggccgggagattatagttgttgccaatgatgtgacatttaaagctgggtcctttggtccaagagaagatgcattttttgatgctgttaccaatcttgcctgtgagaggaaacttcctcttatctatctggcagcaactgctggtgccaggcttggtgtagcagaggaaataaagtcatgcttccatgtcggctggtctgattatgagagccctgaacgtgggtttcagtacatttacctcactacacaagattactcacgtctaagctcttcagtaatagctcacgagctgcaactaaaaaatggagaaaccagatgggtggttgataccattgttggtaaagaggatggacttggttgtgagaatctccacggcagtggggcgattgccagcgcatattctaaggcatacaaagagacctttactctgacatttgtgactggaagagctgttggcattggggcttatctggctcgtttaggcatgaggtgtatacaacgtcttgatcaaccaattattttgactgggttttcggcactaaacaagctcctggggcgggaggtgtacagttctcatatgcaattgggtggccccaaaatcatggctacaaatggcgttgtccaccaaactgtgtcagatgaccttgaaggtgtttctgctatcctgaaatggctcagttatgttcctccatatgttggtggtcctcttcccattatgaaacccctggacccacccgaaagaccagtaacatacctccctgagaatgcttgtgatgctcttgcagccatctgtggcattcaggatggtgaagggaggtggttgggtggtatgtttgatagggaaagctttgtggaaacattggaaggttgggcaaaaacagttatcaccggaagagcaaagcttggtggaataccagttggtgtcatagctgtagaaacccagactgtgatgcaagtcatcccagctgatccaggtcagcttgattccgctgagcgcgtagtccctcaagcaggtcaggtttggttcccagattctgcaaccaaaacagctcaggcattactggatttcaaccgtgaggagcttccgctgttcatcctagcaaactggagaggtttctctggtgggcaaagggatttatttgaaggaatccttcaggctggttcaacaattgttgagaatctgaggacatacaagcagcctgcttttgtatatatcccaatgggtggagagctacggggaggggcctgggttgtggtggacagcaagatcaatccagaccacatcgagatgtatgccgagaggactgcgaaagggaatgtccttgagcccgaaggattggtggagatcaaattcaggccaaaggaactggaagattgcatgctaaggcttgacccagaattgattggtctgaatactaggctgaaagagatgaagaaacaaaatgccagcatctcggaaatggagaccatacggaggagtatgactattcggatgaagcagttgatgcctatttatactcaggttgccacacgatttgccgaattgcatgacacctctgctagaatggccgccaaaggtgtgatcggtaaggttgttgattggaaagagtctcgggccttcttctacaggagattgcgaaggagagttgctgaggatgccctggccaaggaagttaaagaagctgctggcgagcagctttcccacagatcagcattagactgtatcaagaaatggtatctagcgtccaaaggaactgaaggtgatggtgaaatgtggaatgatgatgaatctttctttgcttggaaggatgatcccaaaaactatgagaattatcttgaggagttgaaggctgaaagagtatcgaactggttctcgcatcttgctgaaagttcagacgtgaaagctctaccaaacggtctttcgctgctccttaacaagatgaatcctttgaagagggagcaggtcattgatggcctcaggcagcttcttggttgatcgatggtggcaaagtggagcatgaagccctgtttagttgggaacggattgttctggttgtagtcatgtatttagctgtttaacatgtatttaattgggtggcgttactccacgtcatacggtacaacagcaatcctgatcaagtgattatttattcttcaatcgaagtagtacatgattttcatcagtaagctttgtgcttgcaattagggataaaatcggatggaaatgaactgaaaaacactcattttcgtttctatattttttttataaaaatggattctaattcagaaaaaccgtgagcaaaaacataaggttctcggtaaagaagggatttggacagcgcatatattgaaagaccggtaggagatgcaatagagacccgattctcgatttcttgtggaggatttctctattaggaataaaaaa

SEQ ID NO: 130537 - DNA, 123 bp, Zea Mays
cgttattttcacgcgggagctaaagctgggcaagcgcacgcgagtcggcgagtgggaggggggaccaagaaatttcccacattatattagtagggataggaatttggtataacaatgttttct

SEQ ID NO: 130538 - DNA, 445 bp, Zea Mays
tttagaattagcaggacctaaaccgagtatatgagatgtgactttggtactacaattagtgaggatggagatgtaagcttgggaggtcaggtagtaccaaagaaggacaccttccattaattgggatcgatgctacagagagatggtgatattgatgaagatattagccataggatcaaagcggggtggatgaaatggtgtcaagcatcaggagtcttatgtgacaagagagtcccacagaagttgaaaggcctcatagaagttgaaaggcaagttctacaggacgacgattaggcctgctatgttatatagggctgagtgttggcctactaagagacgacatatccaacaactaagtgtcgtagagatgcgtatgttgtgttggatatgtgggcacacaagattggaccgagtgagaaacgatgacatacacaatcggctagga

SEQ ID NO: 130539 - DNA, 1119 bp, Zea Mays
aacccatgctcaagggaaagtgggaaacgctcgaagaggggagaggagacagcggtcctatgtccgtgtggtcgtgcggactgcggacttctcttcctcattccatccccgctgccccatccggccatcccacagcgaatctcccaaaccccggctccctcgattcccaatcccacccctgccacgaagagatcagatgacggcgagctgctgctgatcgagtgcagtggaatcggaggcgatgcgggctagccggccggcggtgcaccctgtggaagcggcccctccgccgccggccgcggcggcggaggggccggaggcccaggtggagggtgccgcgcacccgcgcggggtgcggatgaaggatccgcctggggcaccagggacacctgcggggcttggtctacgccttgcgcaggccttcttcgcagccgctgcgctcgccgtcatggcgtccaccaacgacttcccgtccgtctctgccttcagctaccttgtcgcagcagccattttgcagtgcttgtggagccttttgctagcctttgtcgacatttatgcacttcttgtcaagcgatcgttgagaaatgcccgagctgtatgtatatttactatcggagatgggatcacaggtacaataaccttgggcgcggcatgtgcttcagcaggaatcactgttctcatcggtaatgatctcaacatatgtgcagagaatcactgtgcaagtttcgagaccgccacagcattggcttttataagctggtttgcgctggcgccatcctgtatcttgaatttctggtcgatggcctccagatgataaatataggatgttataaaacatagtatttttgaatggtttctggacaaggtcgctgcttatggtagcagcaaagcaacgcggtgccgtaaagctaattgtaatacccagaaattgttgaatggctgtggaatgtagcacgtggtcgaattgtctgtacaaaatacggagaggccttctttggatctgaaaaaggcttctgaatcttgccagtccttcctttttacgttaacatgtttctcctgtgtggtttgttgtattgtacgatggcatgcctaaatggctcgagatgattgtttttatga

SEQ ID NO: 130540 - DNA, 551 bp, Zea Mays
agtcatacatggactctgagattagagctatcatggcgcagtatatgccacttgacaatcaaggagaggtcccaaatcatacacatgacgaagatcgttcataagtgtgcagatcattacgtggtgggcccatatggcctaatctgacaccaatgcagatcgtcgtgagctctacaaacagaagctacaggccaataatagcttgatttttagagtacaaaaatctgttatttgcctgatagtttatctggagcagtttcattttacatatgactgtaatttgtgagaatgcacatcttacgatttttgttgaccagtattcataggtttttagttagcaatgtgttgttggcccgttgctagtccttgtaatacaagcccacctgtttttttgcgcacggcaagacttaaactgacaacattttgtagtaccttttattttgtatcacctgctctatacacgagttttcttggaacatcggaaataataatgccctccagtatcttgcgaccacagaattgctaatacttgtcatcaggttatcatatga

SEQ ID NO: 130541 - DNA, 321 bp, Zea Mays
gcatcgggagttctatgtgacaaaagagtgccacaaaagttgaaaggcaagttctacaggacggcgattaggcctgctatgttatatggggctgagtgttggtctactaagagacgacatatccaacaactaagtgtcgcagagatgtgtatgttgcattggatatgtggccacacaagattggaccgagtgagaaacgatgacatactcgatcaactagaagtagcgccaattgaaaaaagcttatttaacttcggttgagatggtttgggcatgtccaccggagaccccataggcaccagtgtacagaggcatcataag

SEQ ID NO: 130542 - DNA, 730 bp, Zea Mays
gttaaccttgctacagaatataagtcgctgacccattatacaaaaggtacgcagtcacacgcctaagcatgctcatcaaatcctctcgtacaccacacaaaaccctagtcactagtgagagccgaggggccttgttcatttccctcacgggcctggatcgctatcggtcagtcagagtattagcttggaggatggtccccccataatcagacaggatcacacgtgtcccgccctattcatggaggtcacaatatgtgcatttttgtgtagggggaggtcacccggtatcgcgcgcctttccagacgcttccactaacacacatactgattcaggctgtgggctgctccccgttcgctcgccgctactgggggaatctcggttgatttcttttcctcggggtacttagatgtttcagttcccccggttcgcctcattaacctatggattcagttaatgatagtgtgtcgaaacacactgggtttccccattcggaaatcgccggttataacggttcatatcaccttaccgacgcttatcgcagattagcacgtccttcatcgcctctgactgccagggcatccaccgtgtacgcttagtcgcttaacctcacaacccgaagatgtttctttcgattcatcatcgtgttgcgaaaatttgagagactcacgaacaactttcgttgttcagtgtttcaattttcagcttgatccagatttttaaagagcaaat

SEQ ID NO: 130543 - DNA, 1965 bp, Zea Mays
atggcgttcactgccctctcattgctataccacctctcgatcactgtatcgcttgtcctagctcgtggcattatcatagccggtgttgttgacatagctccacgtcccactcctctacctcttcctccgcagccacttcttgcaccctctccgactcctcgtcctccaggtcttggggcccctactcgcactcctcctcttcctcttcctcttccttcccctaggccaccacgcactccgcctacaacgactcctcttccacgtccatggttgggggcaccttctcctgcccgtgttcctcgtcctccacggctcggagcaccccctcgtactcctgttcttccgtctcctcgagtaggtgctccatctcccgcacctcctcctgttcgtcctccacagttgggagctccccttcctacccctgttgctcctactcctcagttggaggatccctctagaggtcctattcttcctcgaccgcctctcaagggtgttccaccttctactcctccacttgtggcaccacggttaggggcacccctcccatcccctcctgttccttcagctcggaagggcactccacctcctccaccacagtttagggtacctattcgatctcctgttattcctcctcctcagaagggcattccaccttccgctcctctaattcccgcaccacgattaggggtacctcttccatctcctcctgttcagcagccccctcggactcctattctaccaccctctcgaaagggtgctccaccatctatccctccactttctccaccaaagttaggagcaccacttccgtctccactttttcctccgcctcgactaggagctccccctcgcactcctattcttgctcctcctcctcaagttcgtgccgtatttcctagtcctcgtagccctcctccgcgtttgggtgcacctcttccaactcctcttctacctcctcagtatgcggccgctcctcctcctcctccgtctccatctccacctatggtggtgcctagtgggcctaaggtgccagccttgctcgcgtttggagattcaatcgtggacacaggaaacaacaactacctggtgaccgttgtgaaggccaacttcccgccgtacggcagggagtaccctaaccacaaggctactggcaggttctccgacggcaagatcaccgtggactttctagcgtctgcgcttgggttgaaggagacgctcccgccatacctgaacaagagcctcaccctggaggacctcaagaccggcgtcagcttcgcgtcggcggggagcggctacaacaacgccacgtgccggacgtcgtcgaccatgacgatcgagcggcagctgcagttgttctccgagtacaaggcgaaggtggggggcatccacgagagggccctcttcgtggtctgctccggcagcaacgacattgtggagcacttcaccctcgccgacggtatgacctcgccggagtacgccgacatgatggcccgcagggccatcggcttggtcgaggcgctgatcggccaaggcgcgcggcagatcgcgctgaccggggcgccgccggtggggtgcgtgccctcgcagcggcgcatcgccggcggggttcggatgcagtgcgccacggaccgcaaccagctggcgctcttgttcaaccggaagctgagcctggaggtggccaagctgtccgggaagtaccgcggcgtcaacatcttctacgtcgacctctactccgtcctcgccgacgtggtccagcgctaccaggctctcgggttcaaggacggcaaggacgcctgctgcggctacgtcggcctggcggtgggcccgctctgcaacatcggcagccgtacctgcccggacccctccaagtacgtgttctgggacagctaccaccccaccgagagggcgtacaagctcatgatggacgacttcctcacaagatacatgagatacatacactagcta

SEQ ID NO: 130544 - DNA, 1614 bp, Zea Mays
atggcgcgtgaggacgcagctttgcggaaggctctatttgtcacaatagttggtactaggccagaggtcctaggggctgagatcatcaatgaagttgctcgaagttttaacgtcgatgggggttcaatgtccattcaccaggcaatgcccgaggatttcattctgttcttgccggatgaacgaacagcttcaagggtattcaatgatggaagtattttcagaggaccacagtttgaccttgtgtttaagaggtggacgcgttgtgcaaatgcggctgcgacatcgctcccgaccttgattaatgtggagatcaggggcattccggcccatgcatggtctcgatctacagcagaatttctgctgcgagattcgtgcatcatttccgagctgcacccagcaacagcattgaagactgacctatcgtccttcatgttgaaggtgtggtgtctggatccgaggaatctacatcgtgacatgactctcatcatttcggagccagggcctgcggcaggagaaaagcgttgtttatcctacaagatcagcctgatggtcacccctgtcgatgcctcggaaaaagctattgttattcccactccgctgagcgatagtgacccccctgatggtgacggtgattcctccttccctgggtcgccaccgagacgttcaaagcacagtgctggtgggcgacgctcagtccattctcgtttgggcccacaactgccttctcgacgtatggaaggaggtcaacgggaagctggagaaccatccttgaagatgcacagctctgtggagtctgctttggggacagcatctaatccgtgcatgcacaagaattgtttgttgggcggatccagcctggaactgcttgctggggctactgaacagactgctggactggtttccaaggaaacaattatgctggacagtttacgggatggcagactcgaagagactcaatctgaggatgggcagctggagcaggacagtttatgggatgacagacttgaagaaactcactctgaggatggacagctagagcaggtcgcattactttccccccaacaatctgctggtccgctgaaatctaatgggcctatgcagcaggaagagggcactctgggtccggtgacccactctgacgtagggccgctggggcagagctgcagaatgcatccaaatgtctacgggacatcacttaaagtttatagtagaagaagacaacgtgtttcagttggacaggttgacgcgcaggacgtatctccttccaaacagcagttctttgagatggtgtccaagaaaattggttgtttacttcctactccaaaagctaagaagaggagagaacctgccatcccttcgcagggactccgtcgtagtcgatgggtggctggtctgggcgctgagcacattccacagatccccagggccaggattttggtgatgaaggctatccataatacttcagacacgaatcagctcaacagtgaggatctggagacttatgccaagctgttctgccatcctctttcctatccacaggttcaagcccttgcagcacttttcggttgggcagtcccagatgacttgggtggagcggccaccatggtctgctaa

SEQ ID NO: 130545 - DNA, 1666 bp, Zea Mays
ccgagccagccaacgagacacgattatttcgtacaaacctatcctcgtcaaccagacggtcactccgcgacggcatcgctacagcctacaggcactaataactgcactggcacagcgacactgcacacgcatcttccccgtgcttgcagttgcagtgcagctgtacccacattaccctgtcagtctcggccattgcattgcctcaagaagcagcaatggagttgccaagaccaatgggcgtgcttctgctcgtgttcttcgtcttgtgcagagtgggggacgcggcgacgttcatgttcgtgaaccggtgcacggacacggtgtggccgggcgtcctgtccaacgccggcagcccaaggctggagccgacggggttcgagctcccgccgggcgcggcacgcgcggtgccggcgccggcgggctggtccggccgcatgtgggcgcgcacgggctgctcccaggacggcgccacggggcggctcgtctgtgccacgggcgactgcggctctggctccgccgagtgcgcgggcgcgggcgctgcgccgccggccacgctggccgagttcacgctcgacggcagtggcgggctggacttctacgacgtcagcctcgtggatggctacaacctccccgtgctggtggagacctccggcggcgcaggctccagcgggccggcgtcgtgcgcggcggccgggtgcgcagcggacctgaacgcgatgtgccccgccgagctccgagccgggggcggcgccgcgtgccggagcgcgtgcgacgcgttcgcgcggcccgagtactgctgcagcggcgccttcgcgaccccggcggcgtgccggccgactgcctactcgcaggtgttcaagagcgcgtgcccgcgctcctacagttacgccttcgacgatcccacctccacattcacctgcggcggcggcccagactacaccgtcaccttctgccccggcgccaccccaagccagaagtcgacgaccacaccgggcgcgacgccggcgacggtgccggggacaatgacgacgacggtgccggaggcaacgccgatgccgggcgcgaccccggctatgccgacggggaccatgatgccaccgggcgcgacgttcacggacgccaccccggacagcgcgatgatgccgatgggtggcctgggcatcgagggcgggggccaaggcagcgtgctcctgggcggcagcagcagcgaaggcagcgtctcttggctcgccaacatggccaccggcgacgcggccgtcccgctggtggcttcggctcggttattggtggcgccactggcaacgttgctctgcggcctccatttgctgtagtagtggtgatggagggagcagaggaatctgttggcgattcgcacggtggcgcctttgtattgccgtgtctgtagatgattttactgtccattgatcatgttgcgttagccccggtcccaggattagatacttgtggctactagtagtactagttctagaggagaaattaaagcatggatgtggacattgattaaagttaatcgctgtcgtgctagctgcgctttgttgttgccactgttgttcgtgcgtggctcgaggttggcgaggaaacacgggcgcagcatggactcaagagactgtctggactaaaaaaaaattactagtgtcctgcgttc

SEQ ID NO: 130546 - DNA, 2503 bp, Zea Mays
acccctgtctcggtctcacgcgctgaccgcagcgtcgactcagccgctgccccggtccaggccccgcacatcactccaggcttcagcagtccagctccaaccgcagccgcctccctttgcttcctccactcttccccaaccccaaccaaacccaccaccaccactaccatccccaaaacccccacgaggaatccccaaattcgtcctgctcccccgcagatcgcaccatctgcgcgcgtttccatcgacacccgcaacccccgaccacccaagccgcggcgccggtttctttttccttctttggttggggaggggagatgggggagggggtgaaggagatgctggccccgccgatccagctggccgacgaggtcgccaagcagtgcgctgccgcgcggagcttccgcgccgagtgcgccgaactcaaggcccgcgcggacaagctggcggcgctgctgcggcaggcggcgcgggccccggagctctacgaccgccccgcggcccgcatcttggccggggccacccaggcgctgtccagagcctcggccctcgccgcccggtgcgctcggggccacccgcggctgcgcagcctcttcacgctcagccccgccgccgggttcccccgggccgtggcggcgctcgacacggcgctcgaggacgtcgcgtggctgctccgcatctcctcgcctggtgccaccggcgaaggggacgacgactcgctcctgggcctccccaacatcgcgcagaacgagcccatcctcttcttaatctgggaccacgtcgcgcgcctgcacacgggttcccccgccgcccgcgctgactcggccgccaacctcgcctcgctcgcccgcgacaaccagcactttgccaagctcatcatcgaggaggacggcgtgccgccgctgctcaagctgctcaaggacggcaccgacgaaagccaggaggccgcggcacgggctctgggcttcctcggctgtgacgccgagaacgtggacaagctcgtgcaggccggggtttgctcctccttcgctgccgcgctcaaggagccgcccatgcgcgtgcaggctgcagtggcggaggccatcgcgtccctcgccgaccggagctccacctgccaagaccttttcgcgcagaacaatgccgtccggtaccttgtcgcacacctcgcttccgggactatccaggagcacagccggtactccgtcggctccagcagctccaagaacagcgcagccgctgctgccacagcacagcagcacatgaagtcgctccactctgttgtgcttgccaagacgctcagcatgcgccacagcggtgactgtgacacctccatccgcggcgctgatggtctgccaaggatgtccaatggtacaccaggatgcgatcaagacacaaaaaggaacccccagatgcagtcagtggtacactcggctatgtctgccaagacaaacacaaatggctcattggttccgcccttcaggcctcagctgggcaccagtggctccagtggccgtggtgctcgtgaagtggaggatcctgaaaccaaggcacaattgaaggctatggcggcaaaagctttgtggaagcttgctcataaccatttgggtgtgtgcaagagcattacagagtcacgcgcgctgctgtgctttgctgtgctccttgagaagggtgatggcgatatgggcactgatgtgcagtacttctcagcaatggccatcatggagattgcccgtgttgctgaacacagcctcgtgctgcggcaatcagcattcaaacccagctccccagctgccaaggctgttgttgatcagctgcttggtgttgtctgcaggggtgaatacgatacattgcttctcccatgcatcactggccttggatgccttgcccgtaccttcacagcaagtgagaccaggatagtggcccctcttgtgcagcttctcgatgagcgcgagcctccagtcataaaggaggctgttgttgcgctcaccaagtttgcgtgcactgagaaccatctacatgtgaaccactgcaaagccattgttgatgatggtggtgcgcgccaccttgtccagcttgtctaccttggtgatgaggtgcagattgaggcgctcatactactctgttacattgcattgtatgtgcctgagagcgaggaactcgcgcaagctggtgtgctggccgtgctgctttgggcatcaaagcaggctcaaatggtgcaggacacacgtgttgaggcattgcttccagatgcgaaagggaggcttgagctgttccagtccagggcctccaggtgatgttggagaggggatcgttgggcatgggttagtagttctttattgcaatgtgtaattagagtagaattatctccgtcatccgtaattgctcttgtgaggtacgttacatttttggctgtacatgtgaagtcatatatttgtctattaaattggttggtgttattgaattataaattataaattcatgagacattgaaatagaacatgtt

SEQ ID NO: 130547 - DNA, 787 bp, Zea Mays
aaccctggccttcacatcccgtactcgtcgccagcaagcaagcgctccccgcgtgttcacacctcgacctgcgacgtaaggccggcgtggaccagccgccgaccacacgccttggagtctgccagccgccgaccacaagcgccgccgccgaccgccgcaagggggaggagagatgaagtgggggctggcagccgccgtggcttccgcggcgaccgtggcggcggcgtcgggcgccgagctcctcgcctgcgactgcgacgcctccgctccgtcgccggcccctgccgcgaccgtcggcaggtgcgacgggctggtgctctcccggcagcaccacgacgacgaggtccctgagggatcctcgtcggcgtcgagggacaacagccatagcggcggtcgccgcgggcagcggttcgcgccgcgattcgatggcctgcgcttcatcgagacgctcgtcacggcgcaccgctgaagcgacggacccgcgatccgcctggctgcctatgctccggtggtaatctccccgccgccatgattcggcgattcgttgttgctggtggcgcttaggccaccgagttttgttagaacaacaatttcaggcttccccttttcatttggtgctgtgctgttcgtcctcttgttgatgtcggtggtccgtgaccattcattctccttttttagcttgtttgtgtttgtgcgagagggaaggattaagattatacccggcatgtcgatttgagcaaacgctactctatttctttatttataatgtcacacatttcttcgtccc

SEQ ID NO: 130548 - DNA, 871 bp, Zea Mays
cttctccccatcaccaagttttggattccagcagcggcgcccccaggccaggccccacccgctcagcctcctcagctgcccaaccttctccccatctgctcagcctcagctgtcattcccgcgaagcgccgtctcccggctctatcgatggaccgagtcgccgccctcgtcgtcgcgctcctcgccctcttcttcgccgccggggccacggcgcaggccccggcctcgtcgcccaagcgcactccagcgccagcgccacccaggacggccttcctcccgccgccgccggccagggcgcctatggcctccccgccctcgcctcccgcgatggcgccggtgcccgcgccctccgccggcgtgccggccacgagccccgtcggcgcgggagctggtgacgacgcgatggcccccgccggagccgcggcggctctgactccggctgccgcgcccgtcacggagaagagcgccgccgtctcagcctccgccgccgccgccagcctcgtggccatcgttgccgccgtggcagccgccgtcgcgttctagaccgggaccgaccttgggacatctgatatgtcggtggatccgtggaggagctagagctgcactctttctctgctgtgtgtgttgggtgttttcctcctcttttttcggatcctatttatttgtttattcatttgttatttcgaggcttgagacggagatgaggacgtgtaatcctaccaatttttcagacgggagctgatttctatgcttatgagaagattttatattctttcattaccagttttgtcaatacacgaagccatgacaacagcaacagacgactttaccagccaagcaaaaccgtaataacggtcgtctagttattctt

SEQ ID NO: 130549 - DNA, 2619 bp, Zea Mays
aaaatatcgtcacagaggcccaggtcctcgccgcccccgatggccgactcctccggtcgcagtggcggccgccccacgtcagcctcgccatccactgccacacacacctcaccggcgtctttcgacggcggtctcctactccgcctcctccaaaaccctccttctgcgcacccgcgagaggaaatcctcgccccgtcccccgttgccccgggggcgcaccacttctttagtgaccctgccgtcgccgccgtggggcctctcttcgccgcatcggcgcagacgcaaggaggggacttcgggtggtcctccacctcgaccacgcacgtacagcagcaaccccgattctcggatccccgattcgctccaggggaccccttcgctgctcttggcggtagagggttcggatctggggatgcggttagggcggagaggcctcggtcgggggcgccgcctccagggtttggcaagccgtcgcatccacttcctgctgcccgtgatgcgcggagtgcatctggtgtggtattgcgtaaggagcagtacaatcctcgtcccgtggatttcgttccggctcttgcagatgttcgtgatccggttggcagaatgcctcatggacacggagagcagttttacagggaacagcagcaagatcgttttttgtcacggaccccgcctgagatcaatgccaatggacagtttggcaggatgccaattggagagcagcatacacttcctatcttaggtggcaggaggctccatgtagatcagtacatgcctcccgtccaggaaggcagggcaccacatggtggtcatggcaagcatgaatcccgcttaaccaatccgctacaaagggagcagaggtggcagggtcttagggaggacaagggctatgcttcgcggaagctgccaaatgtgaatgcccattacacatctggtaaggcactggtgaaggaggtgcaccatttgacaatacctgctggcagttcagttccagtggaaattacggagaatcaagcgagtggtttggaaggaggcagaatagggaaagtagttttggaggatggaattgatgaagaaggggtagtggaggcaagtaagtttgaagtgtcatatgaaaagagtaagattagatttgctggacatgatgaacaagatgatggtggtgacagggaagatgctataattgagcagatggcacaaaatctgctgattgatggcaatggtgatgccaagggagtagtgttggaaaaacctatcctgaggagtaaggatttcagatcagatttttctagagggcatcatgtatcaagtcagagaataagattccagaggagaaacaggccatgtcgatatgacatagatcgatttacacctaacttcttgtcaatttttgaatctttggtgccctctgaagaggaaattgcaaatcagaaacagttgttaacatctctaagcagactgataaacacagaatggcctaattcaaaactatacctctatggatcatgtgccaattcttttggtttctcaaatagtgatattgatctttgtctctcgattgataacaaggaaatgagcaaggttgatattatattgaaattggcagatattttccaagctggaaatctccagaatattcagccattaactcgagcaagggtcccaatagtgaagcttatggatccaaaaacagggctttcctgtgatatatgcgtcaataatcttttagcagttgttaacacaaaacttttgcgagattatggacaaatagataaaaggttacagcagttggcattcattgtgaagcattgggctaaaactcgacgtgtaaatgaaacttatcaaggaacactttctagttatgcctatgtgattatgtgcattcacctcctacagctgcgaagaatactcccatgtctacaggaaatggaggccacttattatgtcaaggtggaagaaatcaactgtgcatactttgaccaagtggacaagctaaataattatggtgctcacaacagagatacagtatcaaggctgctctggtcctttttccattactgggcatatgagcacgattacacaagagatgtcatatcaattcgtactggaaggattatcagtaaggaacggaaggactggactagacgagttggaaatgacaggcatctcatatgcatcgaagatccgtttgagatctcccatgatctcggtcgcgtagttgacaagttcaccatcaaaatactcagggaggaattcgagcgagcagctaatatattacagttcgatccaaaccccagcgtaacactctttgagccctacgtgccccctccatcgccgagcctgttgcaagaagaaactgcgaatgctgcagaaattgaactatgatagcgtttggttcgtccccaggtattgtaataggaaatagaatcaactcaaggattttgatccttgcatcactggttgcagcctttggttggatgtgtaaatggtattgtttaccgttacagctgtttggtttctatctcagggatcacaagtcagttcccgaacttaaaaatcattcgtggtatgttctatttcaactcaagggatcacaagtcagctaccatatcacatgtccta

SEQ ID NO: 130550 - DNA, 1203 bp, Zea Mays
gacaagtcttgtctctcctatgtttttttcttcttaatataatgacacgcagctctcctgcgtttgttcaaaaaaaagatttatggttttgttgggtttgaactctagcctattctattttgcttgggactaaaaggctttgttgttgtatgtagtactattgtgttgagatctaatacaggttaggaatttgaaatggtatactgattttttgacacaaactaatgaaaatttgcagccattaactcgagcaagggtcccaatagtgaagcttatggatccaaaaacagggctttcctgtgatatatgcgtcaataatcttttagcagttgttaacacaaaacttttgcgagattatggacaaatagataaaaggttacagcagttggcattcattgtgaagcattgggctaaaactcgacgtgtaaatgaaacttatcaaggaacactttctagttatgcctatgtgattatgtgcattcacctcctacagctgcgaagaatactcccatgtctacaggaaatggaggccacttattatgtcaaggtggaagaaatcaactgtgcatactttgaccaagtggacaagctaaataattatggtgctcacaacagagatacagtatcaaggctgctctggtcctttttccattactgggcatatgagcacgattacacaagagatgtcatatcaattcgtactggaaggattatcagtaaggaacggaaggactggactagacgagttggaaatgacaggcatctcatatgcatcgaagatccgtttgagatctcccatgatctcggtcgcgtagttgacaagttcaccatcaaaatactcagggaggaattcgagcgagcagctaatatattacagttcgatccaaaccccagcgtaacactctttgagccctacgtgccccctccatcgccgagcctgttgcaagaagaaactgcgaatgctgcagaaattgaactatgatagcgtttggttcgtccccaggtattgtaataggaaatagaatcaactcaaggattttgatccttgcatcactggttgcagcctttggttggatgtgtaaatggtattgtttaccgttacagctgtttggtttctatctcagggatcacaagtcagttcccgaacttaaaaatcattcgtggtatgttctatttcaactcaagggatcacaagtcagctac

SEQ ID NO: 130551 - DNA, 728 bp, Zea Mays
acacagacacagcgcggagccgccacttctcttctcagcgctcccaatctggcggcggcggcacgccggcacccacccgcagttgacatgattaagtcaagtatcgaagaagagcttgatagctacatatttgatggacaaggtcatgatgattctattgacacaagtgacttagaaaaatatttggcagatccaatactaaaggttggtaaaagtaatcaacacacttttgacatattagcatggtggaaagcacacaaagaagaatatcctgtcttgggccagcttgctcgtgatgtcttagctatgcaagtgtcaacagtagcttcagaatcttcttttagtgttggtggtcgtgtacttaatccatttcgtactcgccttgaccctaccatggtagaagcactagtctgcaccaaagattggatagctggagcaagaaaaaggttccaaggctaagagtgttgctattcctaatatggtttatgaaatggatgaacttgaggctcttgcaagaaatatttcatttgaggatgaagacctagatgatgatgatcatgatgatggacctgaggcatcgttgtaagcttgttgatgaagatctagatgataataacgtaccatgaatgctatgaatgtttcttattgtacttgctccgtaatgttttgtgaccttgcgaacttgggacttgtggctttgtgaactttatgatgaacttgttatattg

SEQ ID NO: 130552 - DNA, 531 bp, Zea Mays
atggcgggcggctcagcgttgggtggttccgctaccactgatggtgggaagcgacatactcgtcgcggacagcgaaagcgtaggatcaaggctggtgatggacttggcgatcatggcgtggccggcagcgttccattgctgctatcattgaagaattcgtcgcctactgctttggatgatgctcgacctttgagaatcattgggcgttctgggaagatcgatcgtgctgatattgagcttcattgtgctctcatcgtcagcgttattggacagaagggctctggtcgcgccagcgaggtccgggatgcgctcgccttgaggtttgaccttgacgctgatgcgctccacctacgtaatgttgcgtcaggttccttcctcttcttcccttcagaggacctagctattcgagtcttcaatgggggagcaccacttcacgtccctcctctccggatgcatgttaagaggtggtctcgtcaagcttttgcttccggtagcagtgtcatgccttccctaatcgacattgagctctag

SEQ ID NO: 130553 - DNA, 850 bp, Zea Mays
gattcacactaatatttactaatggtattgtggtacatcattcagttgataaggagaaggtatttttcgaatgagcttcctgcccctagcccatggtcactcactcccagggaagataccattcttcccgtagaaactgtgaacgatgatgacatgttccaaagaaaaagctacggcggacagagctacaaatacaatggggttaccccactgcctgcacagcggaacctaactccgccccccacactctatccacagcagccaatgtcctcttcatcagaaaactacagataccacagattttcctcttcgtcaatacctgattcaagtggtggttcaaaaagccgagcgaaccttaatatatgatgggatatgtaagtccttatccattatcacctggagtgtgggaaaaaaacatgacacctgggttttttggttctcaggtttttgatctttttgagttgttcatctgtctttgatttgattgtaatatgtgcatgttgacagggcgccagagcattatgtttgtgggatcactagtgataattctttggttcttctctgtatatctcctaattttgtgtatgaattcaatatagttatttaggaaaacacattacatggtcagatggtctacactgtgcaacggcaatctgaatcaatcttttttcctgagtcccttcaagtcacctgggagaaatcaagtctcgtggtgttatggggcacagcaactttatataaatcagcattcagtctgatgggttttcactctatctggttccttatagacagattaaaggcatgtttggttcattacctcaattgccacattttgcctaacttttctacc

SEQ ID NO: 130554 - DNA, 1818 bp, Zea Mays
tccctatccctccgtggccgatcggcggccgccgaactactgcactacagcagcggaaggggctcgtaccgtcgcatgtatacggcagccgaccaaccaaccaactccccggcagccgcaaatccttccgtcccaccgggaaacatccctctccctctgacgctgctgctactcaccctctcggatccctttccaccccacctcccagatgcggctggcgacgacagcgccggcgcctccgcctccggatccgttgatctagttgctgctgcttgattggggttaggaggaggtggaagaggagggaataggagatgttgttctggaaggacggcggcggtactggtggcggcaacggacgggaccttagcggcgggccgccctgcggccaggttcgtgtactcgtcgttggcgactcaggtgttggcaaatcttcattggtgcatctcttactgaaagattctgcagtggctcgaccagcccaaacaattgggtgtgcagttggtgttaaacatattacttacagtagcccagggagttcatctaatagcgtcaagggtgatgctgaaaggaacttctttgttgagctttgggatgtttctggacatgagcgctacaaagagtgccgttcacttttttattcacaaattaatggtgtcatatttgtttatgacctctcccagaggaaaacaaagacaaatttgaacaagtgggcagtggaggtttctgaatctgggaccttttcagctcctcttgggtctggtggtcccggtggccttccagttccttacctagttattgccaacaaagtggatattgctccaagagatggtagaagagtgagcagtggtaatcttgttgatgttgctcgtcaatgggttgaaaaacaaggtctgcttccatccagtgaagtgcttccacttgcagataactttcctggcaattctggtttgctcacggctgccaaagaggcaagatatgataaagaagctctaatcaagttcttccgcatgttgataaggagaaggtatttttcgaatgagcttcctgcccctagcccatggtcactcactcccagggaagataccattcttcccgtagaaactgtgaacgatgatgacatgttccaaagaaaaagctacggcggacagagctacaaatacaatggggttaccccactgcctgcacagcggaacctaactccgccccccacactctatccacagcagccaatgtcctcttcatcagaaaactacagataccacagattttcctcttcgtcaatacctgattcaagtggtggttcaaaaagccgagcgaaccttaatatatgatgggatatgtaagtccttatccattatcacctggagtgtgggaaaaaaacatgacacctgggttttttggttctcaggtttttgatctttttgagttgttcatctgtctttgatttgattgtaatatgtgcatgttgacagggcgccagagcattatgtttgtgggatcactagtgataattctttggttcttctctgtatatctcctaattttgtgtatgaattcaatatagttatttaggaaaacacattacatggtcagatggtctacactgtgcaacggcaatctgaatcaatcttttttcctgagtcccttcaagtcacctgggagaaatcaagtctcgtggtgttatggggcacagcaactttatataaatcagcattcagtctgatgggttttcactctatctggttccttatagacagattaaaggcatgtttggttcattacctcaattgccacattttgcctaacttttctacc

SEQ ID NO: 130555 - DNA, 1442 bp, Zea Mays
tccctatccctccgtggccgatcggcggccgccgaactactgcactacagcagcggaaggggctcgtaccgtcgcatgtatacggcagccgaccaaccaaccaactccccggcagccgcaaatccttccgtcccaccgggaaacatccctctccctctgacgctgctgctactcaccctctcggatccctttccaccccacctcccagatgcggctggcgacgacagcgccggcgcctccgcctccggatccgttgatctagttgctgctgcttgattggggttaggaggaggtggaagaggagggaataggagatgttgttctggaaggacggcggcggtactggtggcggcaacggacgggaccttagcggcgggccgccctgcggccaggttcgtgtactcgtcgttggcgactcaggtgttggcaaatcttcattggtgcatctcttactgaaagattctgcagtggctcgaccagcccaaacaattgggtgtgcagttggtgttaaacatattacttacagtagcccagggagttcatctaatagcgtcaagggtgatgctgaaaggaacttctttgttgagctttgggatgtttctggacatgagcgctacaaagagtgccgttcacttttttattcacaaattaatggtgtcatatttgtttatgacctctcccagaggaaaacaaagacaaatttgaacaagtgggcagtggaggtttctgaatctgggaccttttcagctcctcttgggtctggtggtcccggtggccttccagttccttacctagttattgccaacaaagtggatattgctccaagagatggtagaagagtgagcagtggtaatcttgttgatgttgctcgtcaatgggttgaaaaacaaggtctgcttccatccagtgaagtgcttccacttgcagataactttcctggcaattctggtttgctcacggctgccaaagaggcaagatatgataaagaagctctaatcaagttcttccgcatgttgataaggagaaggtatttttcgaatgagcttcctgcccctagcccatggtcactcactcccagggaagataccattcttcccgtagaaactgtgaacgatgatgacatgttccaaagaaaaagctacggcggacagagctacaaatacaatggggttaccccactgcctgcacagcggaacctaactccgccccccacactctatccacagcagccaatgtcctcttcatcagaaaactacagataccacagattttcctcttcgtcaatacctgattcaagtggtggttcaaaaagccgagcgaaccttaatatatgatgggatatggcgccagagcattatgtttgtgggatcactagtgataattctttggttcttctctgtatatctcctaattttgtgtatgaattcaatatagttatttag

SEQ ID NO: 130556 - DNA, 1374 bp, Zea Mays
tccctatccctccgtggccgatcggcggccgccgaactactgcactacagcagcggaaggggctcgtaccgtcgcatgtatacggcagccgaccaaccaaccaactccccggcagccgcaaatccttccgtcccaccgggaaacatccctctccctctgacgctgctgctactcaccctctcggatccctttccaccccacctcccagatgcggctggcgacgacagcgccggcgcctccgcctccggatccgttgatctagttgctgctgcttgattggggttaggaggaggtggaagaggagggaataggagatgttgttctggaaggacggcggcggtactggtggcggcaacggacgggaccttagcggcgggccgccctgcggccaggttcgtgtactcgtcgttggcgactcaggtgttggcaaatcttcattggtgcatctcttactgaaagattctgcagtggctcgaccagcccaaacaattgggtgtgcagttggtgttaaacatattacttacagtagcccagggagttcatctaatagcgtcaagggtgatgctgaaaggaacttctttgttgagctttgggatgtttctggacatgagcgctacaaagagtgccgttcacttttttattcacaaattaatgaggaaaacaaagacaaatttgaacaagtgggcagtggaggtttctgaatctgggaccttttcagctcctcttgggtctggtggtcccggtggccttccagttccttacctagttattgccaacaaagtggatattgctccaagagatggtagaagagtgagcagtggtaatcttgttgatgttgctcgtcaatgggttgaaaaacaaggtctgcttccatccagtgaagtgcttccacttgcagataactttcctggcaattctggtttgctcacggctgccaaagaggcaagatatgataaagaagctctaatcaagttcttccgcatgttgataaggagaaggtatttttcgaatgagcttcctgcccctagcccatggtcactcactcccagggaagataccattcttcccgtagaaactgtgaacgatgatgacatgttccaaagaaaaagctacggcggacagagctacaaatacaatggggttaccccactgcctgcacagcggaacctaactccgccccccacactctatccacagcagccaatgtcctcttcatcagaaaactacagataccacagattttcctcttcgtcaatacctgattcaagtggtggttcaaaaagccgagcgaaccttaatatatgatgggatatggcgccagagcattatgtttgtgggatcactagtgataattctttggttcttctctgtata

SEQ ID NO: 130557 - DNA, 3592 bp, Zea Mays
tccgccatcgcgatccactcctcgacgcaatccatctaccccacagaactgctgccggcgtggcagatctcctcctcggcacctagatctcctcggcgcgatcaacggctgagcccgctgcccccaccacacaaccgatatgctctccatggaaggtcagggacctgctcgcccatgatctccatggaaggtggtctactgtcgacggcctctccctcgtgctccttcgtcaaccccgtccgccgcgccgccgagccccgagatcgcgccgatccgccattctcgcgccctcgccccgacacgcgctcaccaccggccctcaccaacctccactcgcgttccccacaccaccctccaccccatccgcgtccgccccatccgtagcacgcgggctgcagccgccccatccctaaaatgtgggcgctggcgctaccacggctccgcaccatgcctccgcgctgccagacagcgccgggcgataccatgcccccaccccggcttcttcctgccagtgaggagcagcggaagcccgaaccgaatccaaccgagtcatctcaacgactccgccagtttccaatcgccccttttttaggcgttcaagttccttcgagatgatgacaagcagaggagagagatagcgtctccttcaatccctctggcgacaccaacaacgcatccccgtggccatcctcgattctccttgccaaggaggcgacagccaagtcgtcgcggtcacggccggcgatccactcgagggtgttcctggtgagtagcaccactgcggtggggatcggggatgggggaggcggcaatggcgatggcggggtgcagctcgccgacaaccttaagatcttcaaggctgacaacttcgatctcgacgtctagattccttccaaggctctgtgcagctgttcatccatttctcccttcgatgtcggtgtttgtccctgctatgtgtgttggatcaccattgacatatatgtggaagtaggttctctgctgaaagaatacatacctgtaacaaactggggattagaccggcatacagtgctggtaccccaccttggtcgacaatcttaaggcatgttgcaagcgcattcattctggttgcttttacttgcatctgtagctgcctaaggaccacttcaaatgtgtatgtagcagcttcagcacagcaaccagcaatggccccatagagagaatgcagataagccatcttcagtatgccatacactccatagaatacaacgccagaggatgccatactgataagagaaggcaccaatcccttatacagcgagaagaatccttcagtttggatcatgtggcgggcaacaccaatgaccccacctaaagcttcaccaccaggagcatccatctttgtcctgatctgaaaccaacagctcaaatcagggatcttgtgaagacataggatggttgcaaagaactcgggcatcacttcgttcagttgatgggacaggtcacttcaaggagattttgcatgagataaggtggaacaatcacttctcatcacaggttttggatatgaacatgatgatgctaggatgaccaatataaatttgtttaaggaatttactgccctaagcagggtaagtgtttcctgaactacaattgttttttttggctttttgcagatctgcacatctgaatttcctattatcctgttgggctgcctcttttttggagtgactgtagcaaccacttctaattcattttcaattgtattgaactggatgttgaccttcctagcataattagctctattttttaaaaaaatagttcattatgtatgtttctattttttatggtaccgcctatgtttatataaatttagcctagcactgcttgaataacaagtgattgaatgaggctcatatgcaaccattaaatcaatatttatgaaccaatgtttgttaaagtaataaaacatttacaaggaccatcgatgacctcaagaagctggtggtggcgtagatgggaacgcaccccgagaagatttgcatctagaggtggtgaccccacctctgtcctcaaccgccacctcgtacctcgtcttcggcgccgccggctcctgccccccttggcacgccttcggggtcctcgctggcggcaagcacctccgtcccggaggcatctgccgctgcagcatagaccaccgcgtcctcgctcagcagcaccgatgtcgatgatggcaacaaggaggacggctccgcgagcacccccgagatctgctgctgccactcccacgcagctcttgcttgtgagatctgtgtgcaggttgatgtcctcgtggcgccacgccgacctcaccgccaccaagcgcgccacccatgtcctcaccgacctcgccaaaaactataagaataggtgtagtcactgtcggggtgtacatccaattgagttttgagttggtgtttagctttcccttaccagggacggatcaaagcaccgtaataagtgtcgatatagctctttcaattgcgcctattgttttgtgcgggctatatggatcaaggaaccctctttgcagcagaggtttgttttgtgttctgctgctagtagtcgcatgtcagtttaatcttttgagttctggaagctgttggtcccttaggtgtttgggagatccttttgaatcgaagcacacacactcaggtgctatgacctttggcatttcatagttgcatatttaactggtgtgcgaagagcaccaggatagcacccttgcagcaggaacttacttttggttgcttttctgttgcctgtcatatcccgatatttgtttcctgcaaatttactttgtttaattgtattctattgattttacagcttttgtacttgtacagttacattgtcatctggtttctattgcacgtgtagctgattagttgtagtcactatcttgcaagcatagatattagggaggtattatgtccagtcaagttttgtgttggctatgtgtagcgaattaggattgcttttcctgggatggatcagagcacatgtactgtggcgatatagttgtttcaatagtatagttgccaaattttatgtgtgtgctatatagaccagggaacccacttagaagcagaaaattttctgtgtgcgcgcgaaattttctgtgtgtgctaacaaattgcaggcaaccatcttaacaacaaaagaggctcgtacaatagcagagatgatgctaaaccacttgtgcatgcaaagtatcaaaaaggagaccagacacatgttgatgaaacatctaaaaaggtcctggaatctgaatgcacaaatgtggagaccttatagaaaagggcacaagcacacatgcatcttgctgatcttgatttggcggaggcagacatcaagaaagctctagataaactacagatccagacatgttaatcatatgtactactgaagttggcttaatgaaatcttttgagaataacttgcctatttaacttgtgtcctttttgatggtggcgttgtttgttagctacaaaatcatcaatcaaagattgtaattatatcatatcactgttttctattaatttttaagctgccgtagcaaggcacgggcatc

SEQ ID NO: 130558 - DNA, 3805 bp, Zea Mays
atcgcgcggtgcacgttctgccgctccgctcacgcccgcggccgaacgctcccccgcaccttccatcctccgcgcagccacagctgcgattccctgctccccgcaccttccatcctctgcgcagccacagccgcgattcccgccgccccgccgcgctcaccttccctcccgcggcagagtgctccctcgacggggccgccccaaccatcgccctcctcatccgccatcgcgatccactcctcgacgcaatccatctaccccacagaactgctgccggcgtggcagatctcctcctcggcacctagatctcctcggcgcgatcaacggctgagcccgctgcccccaccacacaaccgatatgctctccatggaaggtcagggacctgctcgcccatgatctccatggaaggtggtctactgtcgacggcctctccctcgtgctccttcgtcaaccccgtccgccgcgccgccgagccccgagatcgcgccgatccgccattctcgcgccctcgccccgacacgcgctcaccaccggccctcaccaacctccactcgcgttccccacaccaccctccaccccatccgcgtccgccccatccgtagcacgcgggctgcagccgccccatccctaaaatgtgggcgctggcgctaccacggctccgcaccatgcctccgcgctgccagacagcgccgggcgataccatgcccccaccccggcttcttcctgccagtgtaatcggccactacttctccactgctgctcgccgtctcctcaaccaccgctgcgccacacaatcctcccgcgacgtgtctgattcaagccaggatgtctcacaggaggagcagcggaagcccgaaccgaatccaaccgagtcatctcaacgactccgccagtttccaatcgccccttttttaggcgttcaagttccttcgagatgatgacaagcagaggagagagatagcgtctccttcaatccctctggcgacaccaacaacgcatccccgtggccatcctcgattctccttgccaaggaggcgacagccaagtcgtcgcggtcacggccggcgatccactcgagggtgttcctggtgagtagcaccactgcggtggggatcggggatgggggaggcggcaatggcgatggcggggtgcagctcgccgacaaccttaagatcttcaaggctgacaacttcgatctcgacgtctagattccttccaaggctctgtgcagctgttcatccatttctcccttcgatgtcggtgtttgtccctgctatgtgtgttggatcaccattgacatatatgtggaactgcctaaggaccacttcaaatgtgtatgtagcagcttcagcacagcaaccagcaatggccccatagagagaatgcagataagccatcttcagtatgccatacactccatagaatacaacgccagaggatgccatactgataagagaaggcaccaatcccttatacagcgagaagaatccttcagtttggatcatgtggcgggcaacaccaatgaccccacctaaagcttcaccaccaggagcatccatctttgtcctgatctgaaaccaacagctcaaatcaggatcttacatcgtttctggacaacactacagggatcttgtgaagacataggatggttgcaaagaactcgggcatcacttcgttcagttgatgggacaggtcacttcaaggagattttgcatgagataaggtggaacaatcacttctcatcacaggttttggatatgaacatgatgatgctaggatgaccaatataaatttgtttaaggaatttactgccctaagcagggtaagtgtttcctgaactacaattgttttttttggctttttgcagatctgcacatctgaatttcctattatcctgttgggctgcctcttttttggagtgactgtagcaaccacttctaattcattttcaattgtattgaactggatgttgaccttcctagcataattagctctattttttaaaaaaatagttcattatgtatgtttctattttttatggtaccgcctatgtttatataaatttagcctagcactgcttgaataacaagtgattgaatgaggctcatatgcaaccattaaatcaatatttatgaaccaatgtttgttaaagtaataaaacatttacaaggaccatcgatgacctcaagaagctggtggtggcgtagatgggaacgcaccccgagaagatttgcatctagaggtggtgaccccacctctgtcctcaaccgccacctcgtacctcgtcttcggcgccgccggctcctgccccccttggcacgccttcggggtcctcgctggcggcaagcacctccgtcccggaggcatctgccgctgcagcatagaccaccgcgtcctcgctcagcagcaccgatgtcgatgatggcaacaaggaggacggctccgcgagcacccccgagatctgctgctgccactcccacgcagctcttgcttgtgagatctgtgtgcaggttgatgtcctcgtggcgccacgccgacctcaccgccaccaagcgcgccacccatgtcctcaccgacctcgccaaaaactataagaataggtgtagtcactgtcggggtgtacatccaattgagttttgagttggtgtttagctttcccttaccagggacggatcaaagcaccgtaataagtgtcgatatagctctttcaattgcgcctattgttttgtgcgggctatatggatcaaggaaccctctttgcagcagaggtttgttttgtgttctgctgctagtagtcgcatgtcagtttaatcttttgagttctggaagctgttggtcccttaggtgtttgggagatccttttgaatcgaagcacacacactcaggtgctatgacctttggcatttcatagttgcatatttaactggtgtgcgaagagcaccaggatagcacccttgcagcaggaacttacttttggttgcttttctgttgcctgtcatatcccgatatttgtttcctgcaaatttactttgtttaattgtattctattgattttacagcttttgtacttgtacagttacattgtcatctggtttctattgcacgtgtagctgattagttgtagtcactatcttgcaagcatagatattagggaggtattatgtccagtcaagttttgtgttggctatgtgtagcgaattaggattgcttttcctgggatggatcagagcacatgtactgtggcgatatagttgtttcaatagtatagttgccaaattttatgtgtgtgctatatagaccagggaacccacttagaagcagaaaattttctgtgtgcgcgcgaaattttctgtgtgtgctaacaaattgcaggcaaccatcttaacaacaaaagaggctcgtacaatagcagagatgatgctaaaccacttgtgcatgcaaagtatcaaaaaggagaccagacacatgttgatgaaacatctaaaaaggtcctggaatctgaatgcacaaatgtggagaccttatagaaaagggcacaagcacacatgcatcttgctgatcttgatttggcggaggcagacatcaagaaagctctagataaactacagatccagacatgttaatcatatgtactactgaagttggcttaatgaaatcttttgagaataacttgcctatttaacttgtgtcctttttgatggtggcgttgtttgttagctacaaaatcatcaatcaaagattgtaattatatcatatcactgttttctattaatttttaagctgccgtagcaaggcacgggcatc

SEQ ID NO: 130559 - DNA, 1710 bp, Zea Mays
atcactgcatcagattggatctcaaaaaataaaatcacaccgtcatcgacactagaacaaatggagctcacttggcgtctcctcgctgctctcgtccttcctctctcctttctgctgctgtaccacgccaagaacggtggcaaggccagccgccgcctgcccccggggccagccgccgtgccggttatcgggaacttgttttgggtgaggctccaagggatcgagatcctgcatgccatccgccgcttccacgcgcgccatggcccgctgctgacgctgcgcatcggctcccacctcgaggtcaccgtctccgaccgccgcctcgcgcaccttgcgctcgtcgagcgcggcgccgctctggccgaccgcccggcgtccgcgtcccgggacctcctgggactgaacgcctccaccatctccacctcaagctacggcccgctgtggcggatgttccggcgcaacttcgtggccgaggtcgcgaacccagcgcggctccggctgtttgcgccggctcgggcggcggtgctcgccgagctcaccgacaagctacgccatcagcaggaggcggacggtaccatagtgcaaacattccagtacgccatgttccgcctcctggtggccatgtgcttcggcgagcggctcgacgagcgcgccgtgcgcgacatcgccgcggcgcagcgggacctgctgctatactcgtcgaccaagatgagagtcttcgccttcctgccggccgtcacgaggctgctcttccgcggccgccttcaggccatggtcgcgatgcgccaacggctcaaggacatgtacatgccgctgatcgacgcgcgtagggagcgcaagaataaaaacccgggagtgggagccgccgctgatcgcgatgcggtagaagacgaagcgacacaaacaacgctgccgcactcgtacgttgacgcgctgcttgacatccggctcaacgaagacgacggccgcgagctgacggacgacgagatgatcgcgctgtgctccgagttcctcaacggcggcacggacaccacgtctacggcgctgcagtggatcatggcggagctagtcaagaacccgggcatccaggacaagctccacgacgagatcaaagccaccatggcgaccagtggcggctcggatggtcatgtctccgaggaggacgtgcacaggatgccgtacctcaaagcggtggttctggaaggcctccggcggcacccgccggggcacatggtgctgccgcacgcgccggccgaggacatggagctgggtgggtacatgatccctaagggcaccatggtgaacttcttggtggtggacatgggcatggaccagcgcgcgtgggagcggccgacggagttcgcgccggagcggttcctgccgggcggcgacggcgagagcgtggacatcacgggcacgagggagatcaggatgatgccgttcggggctgggcggaggatctgcccggggctcaacgtcgcgacgctgcacctcgagttcttcgtggcgaacctggtgcgcgagttcgagtggcggcagctggagggggagacggtggacgtggagggcgagaaggccgagttcaccgttgtcatggcgaagccgctccgggcgcgcctcgtcccgagagcaagcgactaaggctgcagcctgcaggcgagggaggccctgttacgcgcttgccttgcctccttggttggaatgtgttgt

SEQ ID NO: 130560 - DNA, 96 bp, Zea Mays
gtgggaggaatctcatttctattggggagagattgaggcaagaactctgaagtttgatacggtcgattctgaggtaagtgttctcctttcagcatc

SEQ ID NO: 130561 - DNA, 954 bp, Zea Mays
atgaaaacaaaccgcagcgcccgactccaggtgtggttcgccctccgcgcgagctccctcgacgcgtcggcggcagtgacgatgacagtgaacgggtctgcaggggccgcggtggagaggaaggagaaggtggaggaggataaggacaacgagggactgccagtgaaggaggagcaggagagggggtggagctggccaaaatcaatcatcccaatgcttgtctctaaagggcagcacgtgctagaggtgctggggaaacaaaggaatcattctggtttggtttcccttctgtttctgtacatggatgacgacgacgtgtcacccgacgcctccccgtcactggcacaccttggcatcgatcctcgaatctctacccccacacccacacctccccgctgccgaactagccccgatttgccaccatggacgtcgatgacgtgtcacccgatgcctccctgtcactggcacacccagacgatgcgaaccctagctctgacactaggaacaatctgcccgctcagccacagaggttcccagggcggcgtcgctgaagatcatgcagagaaggattgcatattctggacacttgagtggaaattcaattcaactgatgttgtcctaactgatcatggtgtgccaaggtattgtaaaccaggttttcataaacacggaatacttgagctagccaagatcaccaatggcttctctccagatggccttgttgggaaaggcggcgccggccaggcctacagggggtgtaccgtaggaggcaaggtgcagctcggtggagcacgagaacgccatgtccctcgttgggttctgcgtcgacggtggcagggacatgctgatgctcgtgtacgactacatgccgcgaggcagcttggagaggaatttgtcaaaacagaagaacggagaggagaggcagaattgaatttgaggagacagcgtgcgtga

SEQ ID NO: 130562 - DNA, 132 bp, Zea Mays
taaaacttatacaaattagagaagcaatctggaccaaaaccgttctagtcttctattctctatcaaccgaacgggcccttagttgtatccgatacacttggatccaaactcttaaaattagaaaaaaaaaaa

SEQ ID NO: 130563 - DNA, 1737 bp, Zea Mays
gttggatcagaccgtctggtccagcttccagcctccaggcccatgtgaaacggtggatggcccgccctacgcgacccgggttctgcaccctgccgtttcttctccattattcccagcgggcgcgctcgctctctctttctccctcccctcctcgtggcgacgattgggggcagtcgctgccgccgtacgccaggtgcccagatcttcttcatgcccttctccagcgacgagtatcagaagctgtttgtgcttttaaggatgcataagcgtatggcggttttgatggtatccattgtttgaacgatgggaggatagaagaccattctctgcataaataggcttcataagtattattgctttattgctttaatattatcatatgattgagtgcacaatgccatcaaccttacttgatgatctccctaacgaagttgctctccagtgccttgcacgggtaccattcttgttccatccgacgcttcagttggtttgccgctcttggcgagcatcagtttgcagtggcgaacttctcaaaattcgtaaccagattggtacgacagaagagctcttgtgtgtgttggcgtttgaaccagaaaacatgtggcaactttatgatcccctacgagacaagtggataactcttcctgtcatgccatctcagattaggaacatagcccgctttggcgtggcctcagttgctggcaagctctatgtaattggtggtggcagtgatcgagttgatccgcttactggagatcacgacaggatctttgcaagcaatgaggtttggtcttatgatccgctgcaccgtgtgtggtcccagagggctcctatgcttgtggctcgagcgatgtttgcttgttgtgcactggatgggaaaataatcgttgcaggaggcttcactaactgccgcaaatcgatatcaaaggctgagatctatgaccctgaagctggcatatgggagcctcttcctgaccttcgtctggctcatagctctgcatgtactggacttgtcatcaagggtaagatgcatgtattgcataaaggtctatcgacagttcagattctggaagatggtggcagtcattgggctgttgaggatttctcttggttgcaaggcccgatggcgatggtcggtggagagctgtatgtgctgagtaacagctgtattatgaagcaacgtggtgagaacttccctgataagatggtatcgtgtgcatctgagttccagagcaggatcggtttcgggatgattggtgtgggtgacaacatatatttggttggaggagtgattggacctgggccgagaaaccaatgcatcaagctgctctctgatgttgatatcttgaacgtcacaagtgagagaccaacctggagaccagggtcgccgatgacgcattgccgagggagcatctgtggctgcgctttgttgaggatttagcgtcttcccagtgtgatagtgtgagtattccaccattgctgaactgatcggtgacgtcctaagttttattttattttcaaaagggttgttatttacgctttccttttggatcctttgtagcattgagggcatgactcaatgttggattgccaatgagatatatactatattgaccatgaacagtgttccagaacacactatatacttcatcattttcatttggcatttaaatattttggtggttttaaatgacatcttgctggtttgaatagcctttgttgtgtgatttccctcat

SEQ ID NO: 130564 - DNA, 1639 bp, Zea Mays
gttggatcagaccgtctggtccagcttccagcctccaggcccatgtgaaacggtggatggcccgccctacgcgacccgggttctgcaccctgccgtttcttctccattattcccagcgggcgcgctcgctctctctttctccctcccctcctcgtggcgacgattgggggcagtcgctgccgccgtacgccaggtgcccagatcttcttcatgcccttctccagcgacgagtatcagaaggcttcataagtattattgctttattgctttaatattatcatatgattgagtgcacaatgccatcaaccttacttgatgatctccctaacgaagttgctctccagtgccttgcacgggtaccattcttgttccatccgacgcttcagttggtttgccgctcttggcgagcatcagtttgcagtggcgaacttctcaaaattcgtaaccagattggtacgacagaagagctcttgtgtgtgttggcgtttgaaccagaaaacatgtggcaactttatgatcccctacgagacaagtggataactcttcctgtcatgccatctcagattaggaacatagcccgctttggcgtggcctcagttgctggcaagctctatgtaattggtggtggcagtgatcgagttgatccgcttactggagatcacgacaggatctttgcaagcaatgaggtttggtcttatgatccgctgcaccgtgtgtggtcccagagggctcctatgcttgtggctcgagcgatgtttgcttgttgtgcactggatgggaaaataatcgttgcaggaggcttcactaactgccgcaaatcgatatcaaaggctgagatctatgaccctgaagctggcatatgggagcctcttcctgaccttcgtctggctcatagctctgcatgtactggacttgtcatcaagggtaagatgcatgtattgcataaaggtctatcgacagttcagattctggaagatggtggcagtcattgggctgttgaggatttctcttggttgcaaggcccgatggcgatggtcggtggagagctgtatgtgctgagtaacagctgtattatgaagcaacgtggtgagaacttccctgataagatggtatcgtgtgcatctgagttccagagcaggatcggtttcgggatgattggtgtgggtgacaacatatatttggttggaggagtgattggacctgggccgagaaaccaatgcatcaagctgctctctgatgttgatatcttgaacgtcacaagtgagagaccaacctggagaccagggtcgccgatgacgcattgccgagggagcatctgtggctgcgctttgttgaggatttagcgtcttcccagtgtgatagtgtgagtattccaccattgctgaactgatcggtgacgtcctaagttttattttattttcaaaagggttgttatttacgctttccttttggatcctttgtagcattgagggcatgactcaatgttggattgccaatgagatatatactatattgaccatgaacagtgttccagaacacactatatacttcatcattttcatttggcatttaaatattttggtggttttaaatgacatcttgctggtttgaatagcctttgttgtgtgatttccctcat

SEQ ID NO: 130565 - DNA, 1423 bp, Zea Mays
accctgccgtttcttctccattattcccagcgggcgcgctcgctctctctttctccctcccctcctcgtggcgacgattgggggcagtcgctgccgccgtacgccaggtgcccagatcttcttcatgcccttctccagcgacgagtatcagaagtgccttgcacgggtaccattcttgttccatccgacgcttcagttggtttgccgctcttggcgagcatcagtttgcagtggcgaacttctcaaaattcgtaaccagattggtacgacagaagagctcttgtgtgtgttggcgtttgaaccagaaaacatgtggcaactttatgatcccctacgagacaagtggataactcttcctgtcatgccatctcagattaggaacatagcccgctttggcgtggcctcagttgctggcaagctctatgtaattggtggtggcagtgatcgagttgatccgcttactggagatcacgacaggatctttgcaagcaatgaggtttggtcttatgatccgctgcaccgtgtgtggtcccagagggctcctatgcttgtggctcgagcgatgtttgcttgttgtgcactggatgggaaaataatcgttgcaggaggcttcactaactgccgcaaatcgatatcaaaggctgagatctatgaccctgaagctggcatatgggagcctcttcctgaccttcgtctggctcatagctctgcatgtactggacttgtcatcaagggtaagatgcatgtattgcataaaggtctatcgacagttcagattctggaagatggtggcagtcattgggctgttgaggatttctcttggttgcaaggcccgatggcgatggtcggtggagagctgtatgtgctgagtaacagctgtattatgaagcaacgtggtgagaacttccctgataagatggtatcgtgtgcatctgagttccagagcaggatcggtttcgggatgattggtgtgggtgacaacatatatttggttggaggagtgattggacctgggccgagaaaccaatgcatcaagctgctctctgatgttgatatcttgaacgtcacaagtgagagaccaacctggagaccagggtcgccgatgacgcattgccgagggagcatctgtggctgcgctttgttgaggatttagcgtcttcccagtgtgatagtgtgagtattccaccattgctgaactgatcggtgacgtcctaagttttattttattttcaaaagggttgttatttacgctttccttttggatcctttgtagcattgagggcatgactcaatgttggattgccaatgagatatatactatattgaccatgaacagtgttccagaacacactatatacttcatcattttcatttggcatttaaatattttggtggttttaaatgacatcttgctggtttgaat

SEQ ID NO: 130566 - DNA, 1487 bp, Zea Mays
ttctccattattcccagcgggcgcgctcgctctctctttctccctcccctcctcgtggcgacgattgggggcagtcgctgccgccgtacgccaggtgcccagatcttcttcatgcccttctccagcgacgagtatcagaagctgtttgtgcttttaaggatgcataagcgtatggcggttttgatggtatccattgtttgaacgatgggaggatagaagaccattctctgcataaatagtgccttgcacgggtaccattcttgttccatccgacgcttcagttggtttgccgctcttggcgagcatcagtttgcagtggcgaacttctcaaaattcgtaaccagattggtacgacagaagagctcttgtgtgtgttggcgtttgaaccagaaaacatgtggcaactttatgatcccctacgagacaagtggataactcttcctgtcatgccatctcagattaggaacatagcccgctttggcgtggcctcagttgctggcaagctctatgtaattggtggtggcagtgatcgagttgatccgcttactggagatcacgacaggatctttgcaagcaatgaggtttggtcttatgatccgctgcaccgtgtgtggtcccagagggctcctatgcttgtggctcgagcgatgtttgcttgttgtgcactggatgggaaaataatcgttgcaggaggcttcactaactgccgcaaatcgatatcaaaggctgagatctatgaccctgaagctggcatatgggagcctcttcctgaccttcgtctggctcatagctctgcatgtactggacttgtcatcaagggtaagatgcatgtattgcataaaggtctatcgacagttcagattctggaagatggtggcagtcattgggctgttgaggatttctcttggttgcaaggcccgatggcgatggtcggtggagagctgtatgtgctgagtaacagctgtattatgaagcaacgtggtgagaacttccctgataagatggtatcgtgtgcatctgagttccagagcaggatcggtttcgggatgattggtgtgggtgacaacatatatttggttggaggagtgattggacctgggccgagaaaccaatgcatcaagctgctctctgatgttgatatcttgaacgtcacaagtgagagaccaacctggagaccagggtcgccgatgacgcattgccgagggagcatctgtggctgcgctttgttgaggatttagcgtcttcccagtgtgatagtgtgagtattccaccattgctgaactgatcggtgacgtcctaagttttattttattttcaaaagggttgttatttacgctttccttttggatcctttgtagcattgagggcatgactcaatgttggattgccaatgagatatatactatattgaccatgaacagtgttccagaacacactatatacttcatcattttcatttggcatttaaatattttggtggttttaaa

SEQ ID NO: 130567 - DNA, 3905 bp, Zea Mays
tcctgcatgagcctgacctcatctcatcatcgcctccaactcaccagagaagagaaatccttctccctcgtctctcgccaatcttttctatcaaaccctcttccttccatctcagatccctctcccgtcccagctcgatcctgcccgatggccaccggatcgtacgccgcttccgtccgacgctgagcaaccaggacaacgacctccgacgaccccccgagcacccacgagatggtcgcggaggcggcgccgttctcctcatcggcgatctggtcgtgtcaccgcgacgagatcaccttcgaccgcctccacaagttttggagtgccctgtcacctcatgcacgacatgagctgttaagacttgataaacagacccttattgagcatgctcgcaagaatttgtactgttcaaggtgtaatgggttgcttttggaaagtttcacacaaatagtcatgtatgggaagtctctgcttcatgaaggttcatgtgagccaaggattcaggaagttgaagcagaagttcaggaaccttcagttcatccttggggaggtctttcgacaacaaaggatggcatcctaactcttcttgattgcttcataaatgcaaaatctcttcatgtgatccagaatgtatttgacaatgcacgtgcgagagaacgtgaacgtgagatgctttaccctgatgcatgtggtggcggtggcagaggatggattagcccagtgatacctaactatggcaggggccatggaacacgagatacctgtgctttgcacactgcacacctttcttgtgatactctggtggatttttggtcggctctgggtgaagaaactagatcatctcttttaaggatgaaagaagaggacttcattgaaagacttatgcacagattcgacagcaagagattctgcagagactgcagaaggaatgttattcgcgaattcaaggagctcaaggaactaaaacgcatgcgaagggaacctcgctgcactagttggttttgtgttgcagataccacatttaagtgtgaggtgttcgaggatgctattcttgttgattggcatcaatctttattggagcaagatggaatataccatcatttcgagtgggctattggaacagatgaaggaaaatctgatattctaaactttgaaaatgtgggcatgaatggacaagtccacaggaaaggcctcgatcttgatcactttgaagactattttgttacactgagagcatggaggctggatggtcgctgtactgaattctgtgtgaaggcgcatgccttgaagggccaatcatgtgttcaccggaggctaattgtgggggatggatttgtgacaattaccaaaggtgaaagtattagaagtttctttgagtatgctgaagaagcagaggaagaggatgaagatgatgtagtggacagagacagcaatgaccctgatggtgatatcgctcatccacagaagcatgccaagagccctgaacttgcaagagaatttctcctggatgctgctgctgttatcttcaaagaacagattgagaaggctttcagagaaggcacagcgcggcaaaatgcacatagcgttttcgtgtcccttgctctaaaactgttagaagaacgagttcatgttgcctgcaaggaaataattacattggaaaaacagaccaagcttcttgaggaagaagagaaagaaaagcgtgaagaagaggagcgcagggagaggaggagaacaaaagaaagagaaaagaagaatagaagaaaagagaggctgaaaggaaaggacagagataaggaaaaaacactggttcggtcaaaaaaaccagatctttcaccattttctctgtgcagccaagcaacaccaagtaataatgagtctcaggatgttctagacttgagatattcagatagtgaagaggaagacaatgttgtggtcggggaacactatcctgattcctctgctgatcaatcttcaagcaaggacagtgatgaacgaagcaatgggcatgaatgcagtgtaacaatagaatttgttccctcagattgtgatagctcattcttatgtgatgagcctaaatcatcaagaaacctgagatttagaagagacttccctgaagagaaagatgctagttattggcatgagggttgctgtgatgattctggagatactcaatggcagtctagagagaggaccagaaataacactagaaattataactctgtatttaatacaaataaccgtacaagagacaggtacaacccctgcagctgtagccatcaagaagactacagatattttaccacagcaactagatcaagtagggagacaaagatgcccaggaaaacagtggctgagaagcccaggttgcaataccgcaggtgctatcctccggatagctttgctgtgtcaaatggaggacgtgttggtggtacaccaaacaaaaacccaggtccaaaacaagtatgggagccaatggatgcaagaaagaagacagggaatgggaatagtgctactggggctgctgatggttcagatcaagtagaatgctcaaataatatcagtgaatgtgaaaagcttgaggcagtgtgtgactctcttgttgaaatttgttctgagatatctgcggaaacctgtaagtcagacacagatcaaccatggagacaaggtgagaagaatcagtctgcttgcagcgatgaatctaaatgcgtggataagccaaattgctccaaggacactggtaggacgacaaacttaaccacttcggatagctcctcgtgtctaagtgagggagatagagacagcagcatgacctcactgagtgttcagaatgtagaatcttcatctgcatctgattcagaagagtcttcagacaggaacaatagcagcccaggcgatataccagcgaagaatgtttctcgtacattacttgagatgtgtgcaggaaatggtttcagagagtaccaaccaaaaggcttgaaccctcctaatggtaaccaatttggatttatggtggccccttcacaggagcagatgttataccaacagaaggtccatgcaccgccgtactcgtcaccattcatggggttccacaatcaccccttggcagttccaacaaatgggtacttaccatatactcagccaggtcacttctaccctgcttctatgacccctgttggatatggagttgctggtgaccaatgtgtcgacttctcgatgcagtacagaaataacattcatccttactcgggtcctgaatttggttttctgccttcacagccagttcacaagacctcagtgaacttccatgcggtaccagtgacaccactgaccccgttgtgtagccgcggaatgccagtggcgacaaatcaagagaggcagcagagtcctgccctcttccctaaattaaaacaggcagtgctggtccctgagaccgtctgtgcaggagacaacaccttcaaacagaaaggcgatgacgtagacagcacacccttctccttgttccagttcaacctgccgattgcccctcccaccctggcaacatccaaagagcgaagtggggaactggcaccagctcagatagctcgagtccagccgtgctcgagggaggagaccaacgtcaaggaatacaacattttctctgggtgtgacggggtgatgtttcagctcaactagagacgaagaaaattgagcagctattcaatatacagcgttacatggtgagtgatttgtattctcgtaaaacagaataaggtagatcgaggtttttactgtgttgccctcgactattgattctcttttttctcattttgttttgctttgcttcccctcccagttttgtttttgtgtgtatggaaaactgaaaagatagtgagtggtatagattctgcagttttgtcactagatct

SEQ ID NO: 130568 - DNA, 378 bp, Zea Mays
agagtcagtacttccaccaaggcttccatccaagctgataaacatggagatagatgaatgtgattgatgtgaacaacatcgagaaatagatgcgcaggaagcaggctcatgttgctagggaggtgtatgaggaggataaagagatgtgcaatgcgcgcaatagtaagcacactaccatcacttggttgctcttcaagtgtgcaagtgcgtctatggactgtatggttctttggtttttgttgttcgctaaggtgcaaagtaggaagaaaatgcggccctgaccctgcaagtggggaatgtatcgttttttctgcaactaaaatatgtggtgttcttttttatgcactaacattttgttgaatattttgtataccgttg

SEQ ID NO: 130569 - DNA, 1548 bp, Zea Mays
gcatccatccattcatccatccccccacagtaagcaaagcaggcatgcatcttcatcaagattaaccaacaattaatcatagctactcatggagctagctactgtgtgtgtgtgctcgccccttttcgctagctacacgcctataaattagaggcgcgtgtgtgtagtctttgcctcaccgagttcgtcggtcgtcacctgatattttttccgacggacacacaagcatatatacatacacgccgacatagggatgatggcttcctctagtcctcagcgtgcagccggcgccgccgtcgccggcgtgctgctggtggcggctgccgccctgtgctcgtgcggcgccatggcgcagctgaccgcggactactacgactgcacatgccctgacgcctacaacatcgtgaagcaggtcctgatcgaggcgcacaagtccgacgtgcgcatctacgccagcctcacccgcctccacttccacgactgcttcgtccagggctgcgatggctcggtgctcctggacgccgttccgggggtggccaactccactgagaagctggcgccggccaacaacaactcggcgcgagggttcccggtggtggacaaagtgaaggcggcgctggaggacgcctgccccggcgtcgtctcctgcgccgacatcctcgccctcgccgcagagatctcggtcgaactgtccggaggaccaaagtgggcagtgcttcttgggaggctagacagcaagaaggccgacttcaagagcgcggagaacctgccgtcgccgttcgacaacctgacggtgctggagcagaagttcgcggccgtgggcctccacaccgtggacctggtggccctctcgggagctcacacgttcgggcgggtccagtgccagttcgtcacggggcggctgtacaacttcagcggcacgaaccggccggaccccacgctcaactccggctaccgggcgttcctggcccagaggtgcccccagaacggcagcccctcggccctcaacgacctggaccccacgacgccgaacctgttcgacaaccactactacaccaacctggaggtgaaccggggcttcctcggctcggaccaggagctcaagtcggcgccgcaggcgcagggcgtcaccgcgcccgtcgtcgaccagttcgccaccagccaggccgccttcttcagcagcttcgcgcagtccatgatcaacatgggcaacatccagccgctcaccgacccggccaagggagaggtccgctgcgactgccgggtggctaatgatgattaatccacgacgacgacgtgtgtagttagaaacggacgtgaatgcatgtgcatgtgcccggccgggtcgttagtacaccgacaagcaagagtgcactagcgctatggatcggactatatggtgcacaactgcacatgcatgcatataatatcagggcctcgtcgtttcgaattgtttgctgtcgacttcaattaatagtttctcataaatgtgcaataaagaggaacccaatttctcctgttacgtttttttacccactctatccaccg

SEQ ID NO: 130570 - DNA, 1673 bp, Zea Mays
gcatccatccattcatccatccccccacagtaagcaaagcaggcatgcatcttcatcaagattaaccaacaattaatcatagctactcatggagctagctactgtgtgtgtgtgctcgccccttttcgctagctacacgcctataaattagaggcgcgtgtgtgtagtctttgcctcaccgagttcgtcggtcgtcacctgatattttttccgacggacacacaagcatatatacatacacgccgacatagggatgatggcttcctctagtcctcagcgtgcagccggcgccgccgtcgccggcgtgctgctggtggcggctgccgccctgtgctcgtgcggcgccatggcgcagctgaccgcggactactacgactgcacatgccctgacgcctacaacatcgtgaagcaggtcctgatcgaggcgcacaagtccgacgtgcgcatctacgccagcctcacccgcctccacttccacgactgcttcgtccaggtacggtacggtaccatggccatgccgcatgcacgcatcagcaatcagctggtgtatatatatattaattaataacctgttgccgccgtgccgcatatctctgctgtatgcatgtcttcaattagggctgcgatggctcggtgctcctggacgccgttccgggggtggccaactccactgagaagctggcgccggccaacaacaactcggcgcgagggttcccggtggtggacaaagtgaaggcggcgctggaggacgcctgccccggcgtcgtctcctgcgccgacatcctcgccctcgccgcagagatctcggtcgaactgtccggaggaccaaagtgggcagtgcttcttgggaggctagacagcaagaaggccgacttcaagagcgcggagaacctgccgtcgccgttcgacaacctgacggtgctggagcagaagttcgcggccgtgggcctccacaccgtggacctggtggccctctcgggagctcacacgttcgggcgggtccagtgccagttcgtcacggggcggctgtacaacttcagcggcacgaaccggccggaccccacgctcaactccggctaccgggcgttcctggcccagaggtgcccccagaacggcagcccctcggccctcaacgacctggaccccacgacgccgaacctgttcgacaaccactactacaccaacctggaggtgaaccggggcttcctcggctcggaccaggagctcaagtcggcgccgcaggcgcagggcgtcaccgcgcccgtcgtcgaccagttcgccaccagccaggccgccttcttcagcagcttcgcgcagtccatgatcaacatgggcaacatccagccgctcaccgacccggccaagggagaggtccgctgcgactgccgggtggctaatgatgattaatccacgacgacgacgtgtgtagttagaaacggacgtgaatgcatgtgcatgtgcccggccgggtcgttagtacaccgacaagcaagagtgcactagcgctatggatcggactatatggtgcacaactgcacatgcatgcatataatatcagggcctcgtcgtttcgaattgtttgctgtcgacttcaattaatagtttctcataaatgtgcaataaagaggaacccaatttctcctgttacgtttttttacccactctatccaccg

SEQ ID NO: 130571 - DNA, 1325 bp, Zea Mays
ctatgtgcggtggagagcaagcgtacaaaatttgaacttgttttggcctcctggcgtgcagccggcgccgccgtcgccggcgtgctgctggtggcggctgccgccctgtgctcgtgcggcgccatggcgcagctgaccgcggactactacgactgcacatgccctgacgcctacaacatcgtgaagcaggtcctgatcgaggcgcacaagtccgacgtgcgcatctacgccagcctcacccgcctccacttccacgactgcttcgtccagggctgcgatggctcggtgctcctggacgccgttccgggggtggccaactccactgagaagctggcgccggccaacaacaactcggcgcgagggttcccggtggtggacaaagtgaaggcggcgctggaggacgcctgccccggcgtcgtctcctgcgccgacatcctcgccctcgccgcagagatctcggtcgaactgtccggaggaccaaagtgggcagtgcttcttgggaggctagacagcaagaaggccgacttcaagagcgcggagaacctgccgtcgccgttcgacaacctgacggtgctggagcagaagttcgcggccgtgggcctccacaccgtggacctggtggccctctcgggagctcacacgttcgggcgggtccagtgccagttcgtcacggggcggctgtacaacttcagcggcacgaaccggccggaccccacgctcaactccggctaccgggcgttcctggcccagaggtgcccccagaacggcagcccctcggccctcaacgacctggaccccacgacgccgaacctgttcgacaaccactactacaccaacctggaggtgaaccggggcttcctcggctcggaccaggagctcaagtcggcgccgcaggcgcagggcgtcaccgcgcccgtcgtcgaccagttcgccaccagccaggccgccttcttcagcagcttcgcgcagtccatgatcaacatgggcaacatccagccgctcaccgacccggccaagggagaggtccgctgcgactgccgggtggctaatgatgattaatccacgacgacgacgtgtgtagttagaaacggacgtgaatgcatgtgcatgtgcccggccgggtcgttagtacaccgacaagcaagagtgcactagcgctatggatcggactatatggtgcacaactgcacatgcatgcatataatatcagggcctcgtcgtttcgaattgtttgctgtcgacttcaattaatagtttctcataaatgtgcaataaagaggaacccaatttctcctgttacgtttttttacccactctatccaccg

SEQ ID NO: 130572 - DNA, 3578 bp, Zea Mays
aaagactacaggggggagacacatctctccccacctcgcttcgcacctctccagccgccgcctcctccttcgccggcgtcgacgatgggtgactatggccacggcggggggcagatgcggggcaacccggactcccgccccaggggccagggccagcgccctaacgtccagcagctcaagctcatggggcagatccacccgacggggctcacgcccaacctgcttaagctcttcgaaccgcgtccaccgctcgagtacaagcccccgctggagaagcgcaaattgccggcctacaccgggatggcacaatttgtgtcgcactttgctgagcccgaggatccagagtatgctccgccagtacccaagtgtgagaccagggcagagaagaaggctagaattcgcaataataagctcgagcaaggcgcagctaaggttgctgaagagcttcagaagtatgacccacaaagtgaccccaatgctactggagatccatacaaaacactctttgttgctagacttaactatgagacatctgagcagaggatcaaacgcgagtttgaaggttatggtcctattaaaagggtaagtaatgtggtaattcctgtgcaggtgaagttattgcactttggtaaggtttatggatttttcaatcattctaaaatgtaaacaatcattggacaaaactgtggaaaagttgcctcattagtttatggcttccttttaagctcctccgacaagtgtttgcaacaccaggggtccttataaccgctttcttgctccatttcatatctagaatcaaaatctgcagtttcttcatttcctttctggtttctgaaaacttctctggaaatgctttcaaagaaactgggaactctcagtttcatagtcatttttggtaaacttagcatcaatgttttaattgaatttttgtttttggagccaacaacttgtttgctctgtttcacgcacatgtatagtgtttgctctagaatgtattccatgacaactttttttttatggttttgagctgtgaatttgatcatttagctgtaattcattttatttgattacttaattatgaaattggttctagaataaaatattttcagtagttttatacagttcaatgcaatgatgtaaaattttacctagttaagggtatttaaacatcagacaagaaatttttcatggggaggggtgtggagtaactcttggcagttgtgttgtcctaaactaaggaaataacaatcatttctgtggcacagaaggtctacaactcttcacaatctctctttttaagcgatctttataccttttggggcttagatggaatacatttcaaatggaaaattatatagggttcaggcatatgtatgctcgctggtaatttagttaaatcttttggactttcattggaaagccattttactatgtgcatggttggtacaaccaattaatgacaaggcatctctgggaacacaaatatgcgtaaacaggtaattatggctgcacctgtatgtggcccaggttctctatttcctagtacttttttgtcgtcagcaagaaatttcttgagaagagcaaattgcttctaacgaaggtagtaaatggttgagctgttctctcattccacagatttgcatctaccataatggtcaactgggggtaaacaagcttgaaaaatgctgacagtggcacaaattagcatagatcactttgtatttttcaaaaagcagcttgtctgtagacagggattttctactgtatgtaggcttaattgggtaggcttgctggtgagtatagtatttatagttccttcagattagctatgaaagctatcactgctaccaaattttggttgtggagcaatcagcaaccttacacaatactaattgcatctctcaactcctagagtcgaagatccatcgattttgtgcataaggggtatacatcactcacttggtatttatcacctttctgttaacttcgttatcattctgtttgtttggaaaacgaaggctgaacaaatttcaccgatggagggcaacttggtatagtatttagttctatcgtacaccctttcctttagtataaaattccctggtaaggggatatccaatttatttcccaacgtatgccaatcggccagacagcgcttttcctccaactgtgttgatctgtgctggatttcactcctcgtgtggaagctctacatgtgcaaggttcgtcttgtaactgagaaagatacaagtaaacctagaggatatgcattcattgagtatgtgcacacacgagacatgaaaaatgcctacaagcaagcagatgggagaaaagtggacaacaggagggtattagttgatgttgagcgaggcagaactgttccaaattggcgtcctaggagattgggtggtgggttgggatcaagcaggatgggtggtactgatactgacaaaaaggattccactagggagcaacaacaaggtggacgccctagatcagaagagcctcggagggatgatcgtcgtgccgatagggatcgtgaaaaatctcgtgaaagggtacgggaaagagaccgtgaggagaggacccgtgaacgttcgcatgaccggactcgtgatagagatctacgagatgagaagcatcaccatagagaccgtgagaggactcgggatagggagagaggaaaggaccgtgaaagagaccacggccgtgaccgggagcgtgatcgtcgtgacagggacaaggatcgtggtcgggactatgatagagaaagggaccgtggtcgctctcatgatcgccatcgtgagagaggcagggaccgtggtgaaagagattatgagcgcaccagccatgaacgtgaccgtggtcacatgcatgagagggatgcagactatggcaatggtgggacaaagcatgacaaaaatctgtctagttatgggcaggattatggctatggtcagtatgagcaacacaaaggtcatgatgcatatggttacagtcaagatgtacgtggacatgaaactgaacactcaaagcggcatgagcacgaatattatcgtgttgactcgtatggtaaaatggaagctaactatcagatgccgccaaacaatgctgagccagaaggccctgaggaaggtgaggcatatgaggaaggcgactaccagtatcaccggtctggtgaacacatgaaggaagcttgattgcagcgatgagatttgcctgcagctttatactgatacacaacgatggtttcaatgttggttctttgtatgaattagtttcagctgcatagtgcctgtcagttgtgttcttccatgttggggaattctcaaaaggaagcaaaatcttgcccaactgcgtggatttttgaatttgaagcctatggctgccaatatcttgtggaataagatatttgtgtaatctggttgtggagatccatatgatctgccgttatccatctactcttctgttaagaagttttgtatgacagttccttcaaattatttgttccaacattttgcagaacttcagaattgttgttctatttggccttctaacaaaaagttgcttggtaacaa

SEQ ID NO: 130573 - DNA, 1975 bp, Zea Mays
cacggtcttgacctagtcccgtgcgttcgttgctgggccgcctcgaccgcaacaaagactacaggggggagacacatctctccccacctcgcttcgcacctctccagccgccgcctcctccttcgccggcgtcgacgatgggtgactatggccacggcggggggcagatgcggggcaacccggactcccgccccaggggccagggccagcgccctaacgtccagcagctcaagctcatggggcagatccacccgacggggctcacgcccaacctgcttaagctcttcgaaccgcgtccaccgctcgagtacaagcccccgctggagaagcgcaaattgccggcctacaccgggatggcacaatttgtgtcgcactttgctgagcccgaggatccagagtatgctccgccagtacccaagtgtgagaccagggcagagaagaaggctagaattcgcaataataagctcgagcaaggcgcagctaaggttgctgaagagcttcagaagtatgacccacaaagtgaccccaatgctactggagatccatacaaaacactctttgttgctagacttaactatgagacatctgagcagaggatcaaacgcgagtttgaaggttatggtcctattaaaagggttcgtcttgtaactgagaaagatacaagtaaacctagaggatatgcattcattgagtatgtgcacacacgagacatgaaaaatgcctacaagcaagcagatgggagaaaagtggacaacaggagggtattagttgatgttgagcgaggcagaactgttccaaattggcgtcctaggagattgggtggtgggttgggatcaagcaggatgggtggtactgatactgacaaaaaggattccactagggagcaacaacaaggtggacgccctagatcagaagagcctcggagggatgatcgtcgtgccgatagggatcgtgaaaaatctcgtgaaagggtacgggaaagagaccgtgaggagaggacccgtgaacgttcgcatgaccggactcgtgatagagatctacgagatgagaagcatcaccatagagaccgtgagaggactcgggatagggagagaggaaaggaccgtgaaagagaccacggccgtgaccgggagcgtgatcgtcgtgacagggacaaggatcgtggtcgggactatgatagagaaagggaccgtggtcgctctcatgatcgccatcgtgagagaggcagggaccgtggtgaaagagattatgagcgcaccagccatgaacgtgaccgtggtcacatgcatgagagggatgcagactatggcaatggtgggacaaagcatgacaaaaatctgtctagttatgggcaggattatggctatggtcagtatgagcaacacaaaggtcatgatgcatatggttacagtcaagatgtacgtggacatgaaactgaacactcaaagcggcatgagcacgaatattatcgtgttgactcgtatggtaaaatggaagctaactatcagatgccgccaaacaatgctgagccagaaggccctgaggaaggtgaggcatatgaggaaggcgactaccagtatcaccggtctggtgaacacatgaaggaagcttgattgcagcgatgagatttgcctgcagctttatactgatacacaacgatggtttcaatgttggttctttgtatgaattagtttcagctgcatagtgcctgtcagttgtgttcttccatgttggggaattctcaaaaggaagcaaaatcttgcccaactgcgtggatttttgaatttgaagcctatggctgccaatatcttgtggaataagatatttgtgtaatctggttgtggagatccatatgatctgccgttatccatctactcttctgttaagaagttttgtatgacagttccttcaaattatttgttccaacattttgcagaacttcagaattgttgttctatttggccttctaacaaaa

SEQ ID NO: 130574 - DNA, 2268 bp, Zea Mays
aaagactacaggggggagacacatctctccccacctcgcttcgcacctctccagccgccgcctcctccttcgccggcgtcgacgatgggtgactatggccacggcggggggcagatgcggggcaacccggactcccgccccaggggccagggccagcgccctaacgtccagcagctcaagctcatggggcagatccacccgacggggctcacgcccaacctgcttaagctcttcgaaccgcgtccaccgctcgagtacaagcccccgctggagaagcgcaaattgccggcctacaccgggatggcacaatttgtgtcgcactttgctgagcccgaggatccagagtatgctccgccagtacccaagtgtgagaccagggcagagaagaaggctagaattcgcaataataagctcgagcaaggcgcagctaaggttgctgaagagcttcagaagtatgacccacaaagtgaccccaatgctactggagatccatacaaaacactctttgttgctagacttaactatgagacatctgagcagaggatcaaacgcgagtttgaaggttatggtcctattaaaagggtaagtaatgtggtaattcctgtgcaggtgaagttattgcactttggtaaggtttatggatttttcaatcattctaaaatgtaaacaatcattggacaaaactgtggaaaagttgcctcattagtttatggcttccttttaagctcctccgacaagtgtttgcaacaccaggggtccttataaccgctttcttgctccatttcatatctagaatcaaaatctgcagtttcttcatttcctttctggtttctgaaaacttctctggaaatgctttcaaagaaactgggaactctcagtttcatagtcatttttggtaaacttagcatcaatgttttaattgaatttttgtttttggagccaacaacttgtttgctctgtttcacgcacatgtatagtgtttgctctagaatgtattccatgacaactttttttttatggttttgagctgtgaatttgatcatttagctgtaattcattttatttgattacttaattatgaaattggttctagaataaaatattttcagtagttttatacagttcaatgcaatgatgtaaaattttacctagttaagggtatttaaacatcagacaagaaatttttcatggggaggggtgtggagtaactcttggcagttgtgttgtcctaaactaaggaaataacaatcatttctgtggcacagaaggtctacaactcttcacaatctctctttttaagcgatctttataccttttggggcttagatggaatacatttcaaatggaaaattatatagggttcaggcatatgtatgctcgctggtaatttagttaaatcttttggactttcattggaaagccattttactatgtgcatggttggtacaaccaattaatgacaaggcatctctgggaacacaaatatgcgtaaacaggtaattatggctgcacctgtatgtggcccaggttctctatttcctagtacttttttgtcgtcagcaagaaatttcttgagaagagcaaattgcttctaacgaaggtagtaaatggttgagctgttctctcattccacagatttgcatctaccataatggtcaactgggggtaaacaagcttgaaaaatgctgacagtggcacaaattagcatagatcactttgtatttttcaaaaagcagcttgtctgtagacagggattttctactgtatgtaggcttaattgggtaggcttgctggtgagtatagtatttatagttccttcagattagctatgaaagctatcactgctaccaaattttggttgtggagcaatcagcaaccttacacaatactaattgcatctctcaactcctagagtcgaagatccatcgattttgtgcataaggggtatacatcactcacttggtatttatcacctttctgttaacttcgttatcattctgtttgtttggaaaacgaaggctgaacaaatttcaccgatggagggcaacttggtatagtatttagttctatcgtacaccctttcctttagtataaaattccctggtaaggggatatccaatttatttcccaacgtatgccaatcggccagacagcgcttttcctccaactgtgttgatctgtgctggatttcactcctcgtgtggaagctctacatgtgcaaggttagcacggctgttttaggctttatgcctgtctgtcgtgcagcat

SEQ ID NO: 130575 - DNA, 6624 bp, Zea Mays
cggaaggaagcctaacctctcttccaaagccaaaccgaaaagggaaaaaaagtattgtcgaagagaaaaggaaaaaaataataaaggaacacaagcagcccaccggcgcatcacaggggaagcaaacaggggagaaccctagtcaacagacgccgccgccctccctggctggatctggccgccgtctcctccgccgcccgacgatcgcctgatgcttgtcccgacagaaaggcaacaataacttccctccattgggtgccttaatattcccggaaattgctactggttccactagttgaaagattcaatctatatgcatctacacatgacatgggttctcgaggaaggatgttatttgaccttaacgaactcccagcagaagttgaagaagcagcagctgctgtcgtgccaaaagaatctgctgctgttgtgccaaaagaatctgctgctgtcgtaccacaagaagctgttgttgtggcgttacaagaagctgctgttgtcgtgtcacaacctcagaaatcccttcgtgttccgacgacatatgccccaaccttgtttcagcgaggggaaggatcacagtcgcaggggatattgaacaataatgcctttaagcatgcatccattggttctggatttcagccttttgtgaggaacagcaaagattcaaacaatacaaaggagccgatgaaggtggaagataatcataattctagtatagcatcactgtccatggtaaacaatcagatcaccgacagtgctgcttcaaaggttgagacttgcaataaggtgtcacaagccattgaaagagaagaaggagaatggtctgatgcagatggcatttctgaaaatgcagggagtagcaacaaagatgagttcactggtaccgcaagcactaatttgaagaaagaatcccaagagagcgagccccatcttattaaatctggtgatgtgactaaagatgatactgctgcggaatgtagtgatgctgaaaaggttgatgcatctgaagatcgggttcacgggtccacaggatcagataacatgcaaaattctgaatgtaaaggaaatcagcctggtgatgatctagatctttgcaacaggtcaagggatgttaaaggagtcgaagccaattatgctttgaggtttgcgagcaaccccgcaaagaggcccaagttaaatgaacacaaagaggccatgttaggcaaaaaacgagctaggcaaactgtcttcatcaatgtagaggatgcgaaacaagctggtacaatgaagacatcaacacccaggaggcagtcatcttttccagcaccgattgttacacgtacagtgaaggaagcttctcgtggtgctggtgaaaaggctgcagaaaaacaaagtcagcaagcaatcagggatcagagacaacctgaaatgatgggatcagagcgaagcaattctgcagatcctagtgaccaatacactgaatccaatggtgatgctgagttgggtacccagggccggtcaaagaaaatgaatgcagaagatccagcctcagatgggtatcagcagcctgtccaaagacaagcttcattcaagcaatccatggacttgaagcaaccaaaaagccgatcattctcttcccaaagaacatttctaacaggaacaaacaatgctgatcagaagccagccagcaaaaggtctattatttccaaaaagcaaacttttgtaaacaatgtacaggattcatctgttgagcgacttataagggaggtgacaaacgataagttctggcacaatccagaggaggcagaacttgagtgtgttcctggaagctttgaatctgctgaggagtacattagagtttttgagcctttgctttttgaggaatgcagagctcagctttatagttcgtatgaggagagtcttgaggctgtgggaagggatgcacatgtagcggtccgagtaaaaactgtcgatagacgtgaaagaggatggtacgatgttgtcgttctaccgatccatgaacaaaaatggaatttcaaagaaggcgatgttgctattctatcgtttccacggcctggttcagctgcacaatcaggccgatctagtaggagagctatgggttcaaatgaggatgctgtatcagaatgtggccggcttgttggtactgttaggcgccacatgcctattgatacacgtgatcctattggagctattatccatttttatcttggtgattcatttgattctaacagtgaggctaatgttctgaataaactccaacctcggagtacctggtatctaactggacttggttctcttgcaacaacacaacgagaatatgttgctttacacgctttccgccgtcttagtgtgcagatgcaaaatgcaatacttcaaccaagtccagagcatttcccgaagtatcaagagcaaccaccagtcatgccagactgcttcaccccaaatttcgctgaccatctccatcgtagcttcaatggtcctcaattgtcggcaattcattgggctgcaacacatacagctgctggcacaaacaatggtgtcctaaagaaacaagaaccatggcctttcacgttggtacaaggtcctcctgggacagggaaaactcatactgtgtgggggatgctaaatgttatccatcttgttcagtatcaacattactatgctgctttgcttaagaagcttgctcctgaaagttacaagcaagttagtggtagcactagtaccagctcagagactgttgcagcagggtcaattgatgaactattgcagagcatggaccagaatctatttcgcactcttcccaagctttgccctaagcctcggatgcttgtatgtgccccatcaaatgctgcaacagatgagcttcttgctcgtgttcttgaccgtggttttatagatggtgaaatgaaggtataccgccctgatgttgctcgtgttggagttgattcacagtctcgagctgcacaggctgtttcagttgaaagaaggacagatcagcttttaatgaagggccgtgaagaagtaattgggtggctacatcagctaaaagcccgtgagcagcagctatcacaggagattgcctatcttcaaagggaactcaatatagttgcagcggctggtagatcccagggttcagtaggggtagatcctgatgttcttgctcaaagggatcgtaaccgtgatattctgcttcagaaacttgctgcgtcagttgaaagcagggataaagtattggtggagatgtcacggctgctgatattagaaagcaggttcggtcttggcagcaacttcaatatggaagatgctagggctagtctggaagccagttttgccaatgaagctgagattgtttttacaactgtgtcaagtagcgggcgtaagttattttcccgcctgactcatggctttgatatggttgttattgatgaggctgctcaggctagcgaagtaggagtccttcctccattggctcttggtgcagctagatgtgtcctggttggtgatccacagcaactccctgctactgttattagcaaagcagctggaactttgctttacagtaggagtctattcgagaggtttcagcaggctggttgtcctaccattttattgtcagtgcaatacaggatgcatccccagatccgtgaatttccatcaaaatacttttatcaaggccgtcttacagatagtgagagtgttgttaaattacctgatgaagcctattacagagatgcacttatggcaccttatatcttctacgacttgtcacatggccgtgagtctcataggggtgggtcatcttcatatcagaatattcatgaagcgcagtttgcattgcgtttgtatgagcaccttcagaagttcttgaaagctaacggtgccaagaaggtttctgttggtataatcacaccatataagttgcagttgaagtgccttcagcgggaatttaaggatgttatgaatactgaggaagggaaggatatctacataaatacagttgatgctttccaaggacaggagcgtgacataattattatgtcatgtgtccgtgcatcaaaccatggtgtgggtttcgttgctgatatacggcgtatgaatgtagctctaactagagctaggagagctttatgggttgttggtaatgctaatgctctcatgcagtctgaggactgggcatcgctaatagcggatgcgaaggccaggaaatgttttatggacctggattgcattcccaaggacttcttaccaatgaaggttccatctaatactccaggtaggaattcttccaacaacatccggaacatgaggactggtggtggacctagaccaagacacttggacatgttctcagaaccgagaactggtatgaacatgaggcccgatgaagatgagcgtctgaattctgttccaagaaatggtagttacaggaatttggatgattttgtccgacctggtgatcgtcccagggataatctgcagtttggagttcccaggaggccaaattcttctaatggcaggagagaagtgtaaggagtgtgttgctatctacaactctggtacagcatggaacaatggtgaagagctctgggacggtccagattcagcaaggtgcagattcatgttcagaagattagttgcctctgcattagatcccttgcaccatgtggtggggctggtcacaagaaagcattgctatcagcagaggatgtgcgaatctaccatgatgtgacctccagtcagtggatcaagacgctttcatggtgggtgattataggctcatgatgtcaggttgaagaaaggctgctgtagccctcagtgttatggagttcgcaggagtttctttctcagaacaaggctgtctgatgtgttttgacattgctatccttgctttagccagctccatctttcggtagatacatacatgcatgggcatatccattttgaaacatgccaggagaaagctcactggctctagagcagggagtacaggcaccctgaaatctgaagtgcgccttggatcatctctactttggcgctggtggttttgtggatgtcctctcagtgccactcccagaataccaggccagttgaagtcctcaagcttctgcttggattctagtgtcactctcaactcttgttatcttttgagaagagatcccctgggcccatgacgaactccaggaatgcatggttgcctgcatgatagatgtagagatggcggtcatatagttaaattacacgttctgccgtatgtatatgattttattggagctaatggattttttatctgctttgtttggagaaaaacatagtttgcatctatctctacacgacttgcttttgtaccggaggcacgcagcagcagggttgtatatgtccaacctctgatgggtctgcggtctgccgttgaaagaggggctttggagatctgaaggtattccacgccaggtgctcctgtaatgtgctggacttctgttctgccactttggttacgcagagctgatccattacaaatggtacttgtgatgctttgttgttagcttgtgagttgtctgtttctgcgcttgtgattcagtggccggcaagcgtttttttttttgactcggccggattgttcatcgatctatttttggatcttttattgctctggtgaaaacagctgggccccattcacaaggagacgcgccacaacgctccaaaggccaaaccagagattatctccgggttgtttacacattgaacttgtctttcaccttgaccttgtttatacatgaacccgcctcggatccgtcaccaggacacgccccctaacaagccaccgtaccatattatgccatcacgcggcggtagcggcaacacgcagcggcaacaggatccaactgtggtggtggtagcctttgcgcagccgaggaggagaacgagacggcgacgcgccattatgccggtgaagagcagcgccagcttccgcatgaccgcgctgcctatggtggtgacggcgcagctgctggcggctgccgtgctcacgctcacgctcgtctgggtgctgcactttcgtggtggcgtctcgtggaagccgacatccaaccctctcttcgtctacacggcacaccctctgttcatggtgatcggctttatcatctgcaccggagaagcggtgatggcgtacaggatcgtgctgggcccgaggtcggccaagaaggcggtgcacctgctgctacatctcgtagccctcaccttcgctgccgtcggcctgtacgccgccttcaagtttcaccatgacgtcggccttcctgacatccgttccctgcattcttggctcgggattgccacgatagcgctctatggtcttcagtggttgatggcattcgtgtactttgtcttccccggggctgtgatgacgatgagggcggactacgctccatggcacatcttctttggcctcgccatctttctgatggccatttgcactgctgagaccggactggccaagttcgtctccgccttcatcgcttacccaggcgaagtgtttgtcgtcaacttcaccgggatcgccatcctcatgtttggcgttgccgtcgtcttggctgtcatccttccgtcaagatactagcaagtgcttaacga

SEQ ID NO: 130576 - DNA, 5274 bp, Zea Mays
cggaaggaagcctaacctctcttccaaagccaaaccgaaaagggaaaaaaagtattgtcgaagagaaaaggaaaaaaataataaaggaacacaagcagcccaccggcgcatcacaggggaagcaaacaggggagaaccctagtcaacagacgccgccgccctccctggctggatctggccgccgtctcctccgccgcccgacgatcgcctgatgcttgtcccgacagaaaggcaacaataacttccctccattgggtgccttaatattcccggaaattgctactggttccactagttgaaagattcaatctatatgcatctacacatgacatgggttctcgaggaaggatgttatttgaccttaacgaactcccagcagaagttgaagaagcagcagctgctgtcgtgccaaaagaatctgctgctgttgtgccaaaagaatctgctgctgtcgtaccacaagaagctgttgttgtggcgttacaagaagctgctgttgtcgtgtcacaacctcagaaatcccttcgtgttccgacgacatatgccccaaccttgtttcagcgaggggaaggatcacagtcgcaggggatattgaacaataatgcctttaagcatgcatccattggttctggatttcagccttttgtgaggaacagcaaagattcaaacaatacaaaggagccgatgaaggtggaagataatcataattctagtatagcatcactgtccatggtaaacaatcagatcaccgacagtgctgcttcaaaggttgagacttgcaataaggtgtcacaagccattgaaagagaagaaggagaatggtctgatgcagatggcatttctgaaaatgcagggagtagcaacaaagatgagttcactggtaccgcaagcactaatttgaagaaagaatcccaagagagcgagccccatcttattaaatctggtgatgtgactaaagatgatactgctgcggaatgtagtgatgctgaaaaggttgatgcatctgaagatcgggttcacgggtccacaggatcagataacatgcaaaattctgaatgtaaaggaaatcagcctggtgatgatctagatctttgcaacaggtcaagggatgttaaaggagtcgaagccaattatgctttgaggtttgcgagcaaccccgcaaagaggcccaagttaaatgaacacaaagaggccatgttaggcaaaaaacgagctaggcaaactgtcttcatcaatgtagaggatgcgaaacaagctggtacaatgaagacatcaacacccaggaggcagtcatcttttccagcaccgattgttacacgtacagtgaaggaagcttctcgtggtgctggtgaaaaggctgcagaaaaacaaagtcagcaagcaatcagggatcagagacaacctgaaatgatgggatcagagcgaagcaattctgcagatcctagtgaccaatacactgaatccaatggtgatgctgagttgggtacccagggccggtcaaagaaaatgaatgcagaagatccagcctcagatgggtatcagcagcctgtccaaagacaagcttcattcaagcaatccatggacttgaagcaaccaaaaagccgatcattctcttcccaaagaacatttctaacaggaacaaacaatgctgatcagaagccagccagcaaaaggtctattatttccaaaaagcaaacttttgtaaacaatgtacaggattcatctgttgagcgacttataagggaggtgacaaacgataagttctggcacaatccagaggaggcagaacttgagtgtgttcctggaagctttgaatctgctgaggagtacattagagtttttgagcctttgctttttgaggaatgcagagctcagctttatagttcgtatgaggagagtcttgaggctgtgggaagggatgcacatgtagcggtccgagtaaaaactgtcgatagacgtgaaagaggatggtacgatgttgtcgttctaccgatccatgaacaaaaatggaatttcaaagaaggcgatgttgctattctatcgtttccacggcctggttcagctgcacaatcaggccgatctagtaggagagctatgggttcaaatgaggatgctgtatcagaatgtggccggcttgttggtactgttaggcgccacatgcctattgatacacgtgatcctattggagctattatccatttttatcttggtgattcatttgattctaacagtgaggctaatgttctgaataaactccaacctcggagtacctggtatctaactggacttggttctcttgcaacaacacaacgagaatatgttgctttacacgctttccgccgtcttagtgtgcagatgcaaaatgcaatacttcaaccaagtccagagcatttcccgaagtatcaagagcaaccaccagtcatgccagactgcttcaccccaaatttcgctgaccatctccatcgtagcttcaatggtcctcaattgtcggcaattcattgggctgcaacacatacagctgctggcacaaacaatggtgtcctaaagaaacaagaaccatggcctttcacgttggtacaaggtcctcctgggacagggaaaactcatactgtgtgggggatgctaaatgttatccatcttgttcagtatcaacattactatgctgctttgcttaagaagcttgctcctgaaagttacaagcaagttagtggtagcactagtaccagctcagagactgttgcagcagggtcaattgatgaactattgcagagcatggaccagaatctatttcgcactcttcccaagctttgccctaagcctcggatgcttgtatgtgccccatcaaatgctgcaacagatgagcttcttgctcgtgttcttgaccgtggttttatagatggtgaaatgaaggtataccgccctgatgttgctcgtgttggagttgattcacagtctcgagctgcacaggctgtttcagttgaaagaaggacagatcagcttttaatgaagggccgtgaagaagtaattgggtggctacatcagctaaaagcccgtgagcagcagctatcacaggagattgcctatcttcaaagggaactcaatatagttgcagcggctggtagatcccagggttcagtaggggtagatcctgatgttcttgctcaaagggatcgtaaccgtgatattctgcttcagaaacttgctgcgtcagttgaaagcagggataaagtattggtggagatgtcacggctgctgatattagaaagcaggttcggtcttggcagcaacttcaatatggaagatgctagggctagtctggaagccagttttgccaatgaagctgagattgtttttacaactgtgtcaagtagcgggcgtaagttattttcccgcctgactcatggctttgatatggttgttattgatgaggctgctcaggctagcgaagtaggagtccttcctccattggctcttggtgcagctagatgtgtcctggttggtgatccacagcaactccctgctactgttattagcaaagcagctggaactttgctttacagtaggagtctattcgagaggtttcagcaggctggttgtcctaccattttattgtcagtgcaatacaggatgcatccccagatccgtgaatttccatcaaaatacttttatcaaggccgtcttacagatagtgagagtgttgttaaattacctgatgaagcctattacagagatgcacttatggcaccttatatcttctacgacttgtcacatggccgtgagtctcataggggtgggtcatcttcatatcagaatattcatgaagcgcagtttgcattgcgtttgtatgagcaccttcagaagttcttgaaagctaacggtgccaagaaggtttctgttggtataatcacaccatataagttgcagttgaagtgccttcagcgggaatttaaggatgttatgaatactgaggaagggaaggatatctacataaatacagttgatgctttccaaggacaggagcgtgacataattattatgtcatgtgtccgtgcatcaaaccatggtgtgggtttcgttgctgatatacggcgtatgaatgtagctctaactagagctaggagagctttatgggttgttggtaatgctaatgctctcatgcagtctgaggactgggcatcgctaatagcggatgcgaaggccaggaaatgttttatggacctggattgcattcccaaggacttcttaccaatgaaggttccatctaatactccaggtaggaattcttccaacaacatccggaacatgaggactggtggtggacctagaccaagacacttggacatgttctcagaaccgagaactggtatgaacatgaggcccgatgaagatgagcgtctgaattctgttccaagaaatggtagttacaggaatttggatgattttgtccgacctggtgatcgtcccagggataatctgcagtttggagttcccaggaggccaaattcttctaatggcaggagagaagtgtaaggagtgtgttgctatctacaactctggtacagcatggaacaatggtgaagagctctgggacggtccagattcagcaaggtgcagattcatgttcagaagattagttgcctctgcattagatcccttgcaccatgtggtggggctggtcacaagaaagcattgctatcagcagaggatgtgcgaatctaccatgatgtgacctccagtcagtggatcaagacgctttcatggtgggtgattataggctcatgatgtcaggttgaagaaaggctgctgtagccctcagtgttatggagttcgcaggagtttctttctcagaacaaggctgtctgatgtgttttgacattgctatccttgctttagccagctccatctttcggtagatacatacatgcatgggcatatccattttgaaacatgccaggagaaagctcactggctctagagcagggtaggtctcaagcgttgttgcctgattgctgctgcgatcgttgcatgcttgacatgtctagtaggatcagtatgctaacataggcagggcttctgtaccatatgacataagttccttctgtatacagggtcgagatctagagaaaagaagttcattatttcattcagctcatgttgttaccctttgttcttgtcaacatgttctgtgcatattgttgaaagatgttaccatgtttgcagtagtgatatttattttcctgattatcagtggcatgagtctgtgcttgtatgtta

SEQ ID NO: 130577 - DNA, 813 bp, Zea Mays
atggcctgcgtggtgacagtgaggtatgaggcggagctgacgttgatgcaaaattcatgtgatcaacttgctattgggaaggaaacaacacgtcgtttgggaatgggtactaaatgtaaggatgagtcacttgcttcattgccaattgatgaattgaccgagaaggctgatggctttgctagagtctttccagaacacatgtatgaaaaacatttatgtggcatgacttgggatggtgtaaatgatgccccaactttaaaaaaggcggatattggtattgcaatagcagactctactgacgcagcccgtggtgcttctgacattgtcctaaatgaacccggccttagtatctatgttgaatcaattaccatctgtattgtgcttggttttatgcttcttgcgctgatatggaagtttgacttcccaacatttaccgtccagatcattgccatcctcaatgacgccttgagaaaatttcccagggtgattttcatacgctttcctctgccatgtaccttcaagtcagcacaatcaatcagggcccttaacttacacggtctcgcacgctcgcaactgctgctgagtcatccgactctagttccataccttactgttgtatgtggtctttccgcgtctccttacattttatggtgtttgcagaatgccactctgattgttgtatatgccaactgggcatttgctgctattaagggcattggatggggctgggccggtgtcaaatggctctacatcattgtcttctacttcctgctgcgcatcatcaatttcctcatcctgctatacgctgagtag

SEQ ID NO: 130578 - DNA, 106 bp, Zea Mays
cgtcaactttgcaaggtaatgtctctactgtttagtttgaattacttcgattctggcactgccaaatgtctctactatttgaagccagtgtctttattgtttagtt

SEQ ID NO: 130579 - DNA, 3066 bp, Zea Mays
cggccctacgtgtcggcgacagccgagtaagcacgggccggctcctcctcgcccaacaaccaccgcggcgtgcgccgaccgtaccctctccctccggcgcaccgctctggttcatctccaactacatccaccgcgccccaaatcgcaccccgcctcccccattcgcgccgatcgaaccccaaatcggtggcgatgagcgtggtcggcttcgacgtcggcaacgacaccctggtggcggcggcggcgcggcagcggggcatcgacgtgctcctcaacgccgagtccaagcgcgagtcccccgccgccatcgccttctcccgcaacgcgcgcctcatcggctgccacgccgcgtccgcctcgtccgcgcacgcccccttctccagcgtcaagcgccttctcatgggcgccacggggaggcacccggactcctccctactccgcgacctgtcccgcctccccttccccgctgccgtcggtggcggcgctgtcgtccacgccgaccacatcggccgccgcatcgcgctctcgccgacccacctcctctccatgctgctggcctacctcaagcagctcgcggaggccgacctcggcggcgcccccgtagccgactgcgtgatctccgtgccctgctacttcactcaagcgcagcgccgagcctacctcgacgccgccgccatcgcggggctcaggccgctccgcctcatgcacgacctcgccgccaccgcgcttggctacggcctctaccgctccgacctcggcggctccgggggtcccacctgtgtcgcgttcgtggacgtcggccaatgcgacacacaggtcgcggtcgtctctttcgacatgtcggggatgaaggtgctgtctcacgggttcgatgcagacctcgggggcagggacttcgacgaggtgctgttcgagcatttcgccgaggagttcaaagacaggtacatgattgatgtcacaggaaatgtcaaggccagtatgaggttgagggcagcctgtgagaaggcgaagaaggttctgagcgcgaacgcggaggctgtggtgaacattgagtgcctgatagaggagaaggatgtgaggggggtgatccgaagggaggacttcgagaagctatgtgccaggctgctggagagggttgttgaaccttgcaacagggcggtgacagattcaaggattggattggagaggctgcattctgtggaactcgttgggtcaggttctcgtgtgcctgccattgccaaggtgcttaaggaattcttcagaaaagaacctagtcgcacactcaattcaagtgagtgtgtggctcgggggtgtgcattacaatgtgcaatgcttagtcctacgttccgtgttcgggaatacgaggtgcacgatgcaatccctgcttccataggattttatactagtgacggcccagtttcaacattgtcaagtgatgcattgttccggagaggcctgccctttcccagtgttaagatcattactctacagaagaacgacagttttagttttgatgcctattatgtggatgcgaatgaattgcctcctggtacctcaacagacatcggtagttttcagaatcaatatgtgttagcagaaaaaggagcactgggatgtgcgataaagaacaagcgacatgattacatgaagtgtgatttgatctgccacggcagactggataatgtcttcttagttgacagtaatgtacttaaacacaactgttctgggaatcatgctctgctgtcagatggcaagtgctggggttatgaccagcttgccaagattggcccattccaagcacatatggaagcttctaaagtcaaagtaaaaattcgtttgaatttacatggtttggtttcagttgaatctgctgctttgatagatgattatcaaaggaatgcaacttctgctgaccatatggaggtggataccagcggtgatgacatgggtcacaagtcaagaagtgaaaggtctatccagcggcaggagttgccaatcactgagtacatctgttgtgcaatgagcaagcaggaactgctggaagctcaggagcaagagcaccaattggcttatcaggataaacttatggaacggacaaaggacaggaagaatgcattagaatcttatgtatatgacacccgtaacaagctttctgagaggtaccggagctttgctactgattcagaaagggaacaaatctcatttaatttacaacagactgaagattggctttatgaagaaggtgatgatgagacagaagtggtttacagtagcaaacttgaggagctgaaaaaggcccactgctgctgcaggtggttcagagggcaggggtggttagtcagtgatagcagctggccgtgggtggtggtggacatctggatgcgaagtgttgggccaggggtaactctggctaccagattggcgtggttgtgcagccccggcagcggttatgctgccagggctggagatccaattgaaaatcgttgtaatgatgacgaagtgagagctgaaatcgcaagggagcttttgaagtgcattgttgaccacagaatggctgccaagtcattatccgcacctgaaagggatgctgttgacaatgagtgcaataaagctgagcagtggctaagtgaggggtccaaacttcaagaatccttgcccaagaatgtggacccagtactttggtcctgtgaaatcaagggaaaggaagaagagctggatatgttctgtcgaaacataacaaggcacaagggctccccagcaaggacagatggcagcaggggttcagatcacatgcctacacctgatagagattagatatattcacaaggtttcttcactgtacgactgataacaccgtcatataattgactctgtaccacactaggcccgcattaggtgaccgcttcttggttctccagggtgttgtgcagttttcacttgagagcctactaatcatggttattgatacctgttaattctttttctgtactcggaccatgggtattgtctgcttcagtttgtgctgaatgaacaggaaaactaaccgcgtgtttggttggtggacga

SEQ ID NO: 130580 - DNA, 726 bp, Zea Mays
caccgcacctccgactccggtcccgggtgtgcctcccgcctgtcgttcggtgacactgacatgggctgctgcctccaccgcctctgcctcggcggcacgcgtaccctgccgttcgtcaggcggttcatgcccaaggaggtggaggccgccacgcgcggcttcaccgcggtgctcgacgccgccggcacggcctatagggcgcgcttcgtcggcggccttgtcgccaccgtcgtcaggctccgccacgacgacgaccaccgccagggagagggaggagggcccacggacgccttctacctggagctgcagctgctggcccgcctcaaccaccgccacgtcgtcaggctgcgtggcttcgcgctagcccaccacgcaaggcccgtgcccttccgccctccgaccctttcttccttccctccccaccgctctctatctctgcttctgcggattgtatcatctcacatcagatttgtttcaccaaatcctaaacggaccttttgtttagtttctcaggcagagattcagattcgttgttttactggtgaagctgtcccaaatagccccaaattatggaccgagacatttttaaaccaaatactaaggttttatgtgccagtttcagtttttggtaacagtctacaggacttttacacattcaaaggtccgcaaccgctggaggtcatagtgcaagatgtcaaggccaagaagcacaaccaggcgctatga

SEQ ID NO: 130581 - DNA, 1813 bp, Zea Mays
gcaagctgtaccctgcgttgtcggtggccgcctcccgcccgcgcacatgggtgtcatggggcgtagaccgtggcggcctcagctccggtctccgggattaaagaatccaggtcatggcttcctcgcgccgtgggcgtccatgtcctgctgctgccgccgcgggacctgagaggagaaggacgaggacgaggtggtggttggcggcgtcgcgccgacggcggacatgggttggaggcggggaggaggcgcggatggcgtggccaggagatgggtgctgctgctatgcgtcgggagcttctgcctcggcctgctcttcaccgacaggatgtggagcttgccagaagcagatgaggtagcagtactcccaaatttaagaagagaggaagaggctgagcgcaagactggagactgtaatgtaggcaaagttcaaggaaaacacgattacaatgacatgttacgtgtctcagatgctcaccataattcacagactttggataaggcaatagcgaacttggagacagagctctctgcggcaagaactctacaagattctttcctcaatggatctccagtgcaagaagattacaaggcttcagagtctaccggtaggcgcaagtaccttatggtaataggtatcaacactgcttttagcagtcgcaagagaagggattctatccgcaacacctggatgcctacaggggaaataaggaaaaagctggaggaagaaagagggatcatagttcgttttgtaattggtcacagtgctatttcaggtggaattgtcgatagagcaattcaggcagaggataagaaacatggagacttcatgaggctggatcatgttgaaggataccttgagctgtcagggaaaaccaggacatactttgcaacagctgttgctttatgggatgctaacttctatgtgaaggttgacgacgatgtacatgttaatatagcaacacttggaaatatcttatccaaacatatttcaaagcccagggtatacattggatgcatgaagtctggccctgtcctctctgacaaggatgtgaggtactatgaaccagagcactggaaatttggggaagtgggtaataaatattttcggcatgccaccggtcaactgtacgctatttcaaaagatttggcagcctacatatcgctaaacaagcatgttttgcacaaatatatcaacgaggacgtgtctttgggagcttggttgatagggttagatgttgagcatattgatgaccgcagactatgctgcggcactccaccagattgcgaatggaaagctcaggctggtaacacctgcgctgcctcgttcgattggaaatgcagcggtatctgcaactctgtgcagaacatctggggggttcataagaagtgttcagaagatgaaaaggcgctgctgactgtttctttctaatcaaagtgcagtgctgtgtatctgtacattgtgcaaagaatgtgtccggttcataggtggctaaatggcttacaattagacaacaccactggagcaggccgcaattttactcagcgtccgctggtggcactctgaggatttaaggggtgtagagctgaccgattcttttagcaagttggccagttgggtggtcatacatgtattgacctgataaaacaaacactatccgacgagttcagccaggctgtctgagctaagacaggatgaataacggctggttgagctcatgcaagacatttatttggttgattgtacaaattaatgcagaccggtgtagatgctatttggttgactggacaaacaaataaaaaaaaatcttttttg

SEQ ID NO: 130582 - DNA, 501 bp, Zea Mays
atgaactgctgcatctccaggttaaactcttcgtcggtgacggccgatgacggccccggcgatggcgccgtcgacccgccgccgaaccaatcccccggcggtgcgacggcgaacatgtcggagaaccccacctcgctcgccgtcctcctcttcgccggcttcacggccgctgaaaacgcattggtttcccgatgcatgcaaccacatggtgagacgatgatcatcgtgtttgtgccgcgtgtacgcacgttcgtgttcgtcctattcacggtggaggtcctgtcccggagggcattgccccagcgaggagacgtcgccgtcgctcccggcgccatgggctggcagcatcctggacccatccggctcacggtaggagagcgcgggcatggaggagaccttgaccatactcgggttaggccgcagcaggtgttcgtcgccgatcagcatcgactgatccaccagcccgccgctgatggaggtgtcgaattggttcgaatgtag

SEQ ID NO: 130583 - DNA, 98 bp, Zea Mays
tatattcttggatgtttctgttttccatcaaactaattctgcgtgcattgatatattcagggatgtgttcctgttttccattatttcatcccattgaa

SEQ ID NO: 130584 - DNA, 158 bp, Zea Mays
ggagcggcatccttcaccgacagggccggagttcttcaaatgggtagaggtaggtggggtgctgtgaatgtgattgtgattattggggcgacaggttttttcccattgacagaaacaagcgggacaagtgcggctggcgtcagcagcaacagcacgag

SEQ ID NO: 130585 - DNA, 1276 bp, Zea Mays
ataaagatcaccacctccattcgcacgcacaaagctctctagctcgcagataagccagagagaaaggatggacgagtcgtggaggtgcacgatgggctcggtgctgccgaggcagcggtcgtcggaccagcacgccgccggccaccagaacctagcccccgacgacttccgggacgtgtacggtgggccacctcgcacggtgctcctccgcagcttcggcggcgaggcggttgactaccactccccgacgggccacggccaccagtacacgagctacggcggtgccgaggccttctgtcgccggccttacgccaacgggcgcgcggcggccgtgcccacggagcagggcttcttcgacgacatcttcggcgcccgtcgtcacatgaggtcgaggtcgagttccaagtccaagtcatcgtcggcggtcagctccgacgagttcccatccgccggcttctgccggccggtggccaccgccggcggcggcagccgcgcagacgccacgctctcctccttcacatctaggctcaggccggtgacgatcccttcgcggcgatatgactcgtcgccgccatcgacgtcgacgagaggggagtactaccagagcagctccacgtgctcgacggccccgtacccggcagctcgctactactacggcgacgacgccaaggccgccggcagcaggtcgaaccacagcagagccggcggcgacgggtcggcagcaacgcgacaccaccggaaccaccgagggggcagcagcttctgttgcttcacgtcgaacccggagaccagcagcaatgcgaccagcttccggcaggcagcacgcggggcgcagtcaccggccgccgagaccaccatcaccgactactcaggcgctgactacgggtactactactcgccgccgtcagccacgtcgtcgtcgctcttcaccaacccgctggctagggcaccgcggcgactggaggaggtagtgatggaggtgagggagcgggcgccgctgctgatggacgacggcgacgacatcgacagcgtcggcgctgctgcggtggatgaggcgattgcatgggccaaagagagattctggagccaggcccgttagaccttgaatcatgatgatgcgtcaggtcaatcaacggcgccattttgtaacgtccattcattattgaatacatttcagtttgcaacgctccatcgttatggcataggccatgtacagtgacgtttatgtgactgtttggttcacataatggataaccaataacgtaaaatcatgttt

SEQ ID NO: 130586 - DNA, 1783 bp, Zea Mays
cccatcgtctacgagccgtaccgcgaggcaagccatccgcctcccgtccacgacgacgttgcgggggtggtgtccacgggctcggatgacgacctcgacctgcagcaaatcgccaaggagccatccgtgtcctcgccgccgcgtcacagctcgagagacgccgtccgaggtccttgccctcgtccactgcatcaccgcctaactatccccgtcgcggccaacctggaccaaatctgccgcctatccgggccctgcgatgtggccgaccggggtctcctctgtgacctgctctggtccgacccttcttccatggaggacagagagtgggcgaacaacaaggatcaatacgtgtcctgcaccttcggcgccgacgtcgcgacggactgccgccgcgcgcaggacctggacatcatttgcagagcgcaccaggtggtggaggacgaatacgagttctctgtcgactgccagttcgtcaccttcttctctgcccccaactaccgcaagctcggctgctccttcaccatcatcaagccgaaggcgaacagaaacaacagctcgcccctcggatgttcaaccaaatgtcccagccaggcactgcaccccattgtcaagcccaatctagtagccgtgctgaatattgcaggtgctgggggcaagttatgtggaggatttgatatcaaagttttcacaagggttcatcagactggggatgtatcgcttatgccgaacgtatccactgagcttgtgtcaaacatgatggaagagggcaaacaaccttctgttgcagccattccaggtcttgcattgggtggtggcctagagttgactatgagttgtcaggctcaaatacctactcatgttgctcacaccatctgctcacttgttaacaacgttatggcatcacaggctcatgtcgtcggacaagggatcgtagaccgcatcgcgttcagtggcgatcaccaatggatcgtccaaggtactaccaatggtcatgggctctcctccaaggttgctgctaaggtgaacaatcagtttagagttggtattcagactactgcgattattcatgtgctgccaaggggtgtcctacagttaggctctactggtttggttttgggaaaaaaaaatttgtgatgtttgcaaagaagtcgtgttctcagctaaacaaccgttcaagcctagctgcatctgcttcggctaagaacacttcaagatagcatggccagtcacttattgataatgcaattgtgtcaactagtacaccaccaaatgtattgttgattgcatctttgctttgggctgcacaacagaatggtcaccctgagctcaatggaaaaacaccaatggtgtatctcaatattgttgctgatgaatgtgtggctaatatcgctgcaaagctcgagtacatgggaccctaccgaagtgccaaggataggattggattaagaaaaattaatgatgctaaagagaaggacttactagtgtctctggacaagaccaatttgggagaaccaataactggaaacattggtgtagacattgtttttgtggctgcagcaaaaggatacaagttgttagcaaccatgccttcatcattagatgttgagagacattcttctgaaaggagcttttgataaagctgaggaaatagtcttgagaatgaagcaatgggatggtactgcgggacttgtttggcaaaaggatagcttaatggtgcccaagtggcttactaacagattgatgacatttctaatattctatagtgattccattacagctcttc

SEQ ID NO: 130587 - DNA, 680 bp, Zea Mays
ccagggatgggtttccctgcaggcctccgcacccttcccttcggggttcttgacagatgatggttctggcccgtggtccgctgatgggaggcatgggaaatgggtggccctggacggcctaatcgtcccatgggtatggcgcccttcatgcccccgccacctccaaataaccgtgctgcgaagcgggagcagagaaggccagggggtgaccgaggggacaggtttgaaacagcatcagcattagaccagggcagcaggggccatgataacactggaaaccctggagcagatggagccagagcccagtctggagacaggtacggtagaagcgcccttcgggacgatgacagcgagagcgaagaggaggccgctcccaggcgatcaaggaaacgatagagcgtctctgacatttcatgctgttacttgaaatgagatgtactgttgaaagatgagtagattgtcttcacccagattagagctaagataatgaaaatgtggattgtgtataactgtatgctgtcaagtgacattggtagttgaatttttcttaggcggaaaaggcagccggctgagattattcttccggaggtgcatcacagtatatgactccagttaggaacgggtagaataacgttggcatgaactatctgtttaagagcttgttcgtttcaaccaactat

SEQ ID NO: 130588 - DNA, 952 bp, Zea Mays
aagacagattgatacaggcacagattactatgaaacatcagcaagataagggcagaaggaaggttgagtttcaggtggggcagtgggtctgggtccggttacagcagcgtacagcggtgggagtgatttctccatctcattcaaagttgggaccaagattctatggcccctacaagattgtgaagacagtaggtccagttttttgtcaattggaactaccaactcgatcgcgtattcatgatgtctttcatgtctcgctcctaaagaagtacgaaggaacacctccagagacagtggtgcctctgcctgaactgctgcatggcagagtggtgcctacaccggtcacagtgactaaagctcggctaaatagaggcgtctgggaagtgcttgtgcaatggatgggttagccctcctcagaagcaacctgggaaccactggaagaattcaagagtcgttttccggaagtacagctcgcagatgagctgtttgttgttgggggggggggagggaaatgttatagatgctttcttaggcaagcattatcataggaagaaagggggccagcgcagctacgagttgagcccaggtgtgcagctagaagataggggtcgggagattttttagctgttcagttaagagattgattagatctattttatagcagataattgttatcctattggttggtgtggcagtcccagtctataagggaatttgcctttagtttgtattaggtattgaaggaataaagatctccaggtagggaggtcgtcctgactgaccatcacagccaggccggcggcggtgatccccccacgccttacgctccatctcttgtctctcccctgcatactcccaagagaagcagcagaccacatcatatacatgcttatatattccttcttttattgatttgttgaacattttgataattaatattatcgggacaaac

SEQ ID NO: 130589 - DNA, 1320 bp, Zea Mays
ggaggacatatccggtgcaatcactcattttggtgcaagcgtacaatcaaactatccagagcatccaatctagatccaacggtttcatacggaagtggttaaatgtaaaatagacactaggttttaggaggaaggggttaaatgtaaaataacagttaccattaaatctaaatcggatgcaccagatcgcttgattgcatgcttgcactaggataagtgattgcataggatattttcccactaagggttgagacatattttttagcgaatacaacttgagggatgagattgccgatgattgtcacttgactgggagtctggatctcaagcaaccagccccaagaactgttctgctccccagttgtatatacgatcgaagaaaaaaaaaagatcccaaaccctagcatctctcatggacgacggcgacggcggactgagcttcgacttcgagggcggcctcgactctgccccggcggccgggggccccgtgccgtcctccactgaccctggcgcgggaggcggcgacgggccgggtatgcacgggcgcggccgaggtcgcgggagctaccgccagacggtgtgccgccactggcttcggggcctatgcatgaagggcgaggcgtgcgggttcctgcaccagttcgacaaggcccgcatgcccgtctgccgtttcttccgcgacttcggcgagtgccgcgagcccgactgcgcgtacaagcactcgtacgacgacgtcaaggagtgcaacatgtacaagatggggttttgtcccaatggtcctaattgccggtacaagcatatcaagctacctgggccaccgccttctgttgaggaagttcttcagaagattttgcagatgcgctcttttaacagatacagtcagaatagaaatagtaattataatcagcaaggggagaggccacaacatccacagggttctgcgttgcctaaccaaaactcagcagaaaatgctactgctgcagctccaccagctggtggacaacaagcacaaacgctgaatcaacagccaccacagcagcagcagaagccaaatacaaatgaccaggcccaaggtgtttcaaatggccatcaggccactagaatcgccacaccccttccacaaggaccatctaggtgtgtgtggagtttctagtcatgcttgtaaagcttttagaactgtgaaaactacatacatagttttggttgcaatagcgtatctcataaaactactatattatattatatgttttgacacttgataagctgtacacttgtacttaattttaagcttatgtcatctataactaattgaaagaaaaa

SEQ ID NO: 130590 - DNA, 2384 bp, Zea Mays
aactattactagtagattattcaaacacccgtctagttctacttgttggaagggtgccgctctccacgagatccaaacccccgcacccgcggcgccggcgacgcagggaggaggcgatgcacggccgcccgcggcgaccggccaagctcgaggacgaggaggcggcgtcagcgaaagccgccaagcttcgggacctccaggcccaggtcctgcacaatcaccatggccgcacgtacacaaaggaggcaattgggctgagcttcaagctgctcgagataaatccagaggcctacaccgcatggaactaccggaagcttgcgtttcagcacaatgtcaaggagctttctgatccggaggccatcaagtctgctgttgatgatgagctgagagtggttgaggttgctttaaggcaaaacccaaaatcctatggagcttggtatcaccgtaagtggttgctatgccaaaagctagcgcccgtggatttcaaacgtgagtttggcctcttggataaactgttgaaggtggacgccaggaattttcatggatggaactacagaaggttccttgcaagattcatgggtgtgtcagatgaggaggagctaaagtatactatggataaaatcagcgacaacttcagtaattactcagcatggcataatcgtagtatacttctgtccaacctactgatccagcagagcaaaggttttgagtcaaagcagaagattttttccgaggagtttgaacttgttactcaagctctttttacagatccaagtgaccaaagtggatggttctatcacctttggcttttagctcaaacgtcttgtccagataacccccagctgattgcttcatggccttctaatgctgcaaagctcagttcctctttgatcaaggaaaaagctgagcagcacagacagtcatccatcttgtcaaggactgtacccattgttctttattttaatgagcctgtcaaaggattaaatcaatcaagtgttaacttaaagtctgatttggagttcagtaaggatattatatggaggcccctcacaatggcagactctgggtattctaactgttgggccacagatctccagattataaatgaatgtagcagtttgcaggaatattctgttgaagtgagcataccctgctcgaatggcattgtatctagaagtggctctaactacaattgtcctgtgcattttacatttggcattgaattgatcagcaacgatccagtacagggtttagatatgtttgataagccagttgcctggaattgctcagaatcattccagcctcatgggaaccgtgatcctatcccttttgatctgctaaagattactagtgccttgatcgagcatgactcaaattggcattttgaaagactatctgaggaaatagatcttttcagagagttacctgatgacaacagcaagtttgggaagttgacattagcccggttattgcttgcttgttctgctataaaatctcgtggaagatctctaattgaaaggaagggatactgtgaagaggcactggggctcttcactgacttgattcacctggatccatctcataagcagtactatgaggatgaacggagcttagtcctgatggataaattaacatgtgacatggagactttcatgaagcactgttcagttcaggttcaaccaaattcagctcccctgaatcatgtgcagctttgcagattatctctaacatgcattggatttgctgaacgcctgttgtgggttcaaatgctggacctaagccataatagtctgagatcagtcgaaggattggaggctttgcagcaccttgtgttcttgaacatcagcaacaaccagatcagtggtttcacagcacttgaatcccttacgaagataatctcattgaaagttctggatttatctttcaacaagattggagctcactcaattgacacaacacggtatatctgctcgtctccattctcacacaaaatggaagcaagtgaagcttttgaagcgtaccagaaggtaaatatcaacgtggaggaatactgggatgccatactgtttttcagatctctgaagttggcacagcttgatataaaaggaaatgcagttgcaagcaaggagaacttcagaactattgtcatgatgctcattccttgtctaaaatggtttgatggtgaagatgtcaattaaaatggagttgagcaatgatagtgtcaaggctcacgctgtaaaccattttttgctagaaggcattgatttgcatcatatgtactgctatatttgtttaaaaaactcggccggtaggggaaagaccgtccccctcctgtattatattaataagaagttcaatcgcagccccgatcgagtaagatcacg

SEQ ID NO: 130591 - DNA, 1737 bp, Zea Mays
tgctgaaagcctgaaactgctcaagtagcgcgcaacgacaagagcaacgaggaacatcagttaggactacctccacaaattgagcatcggttaccccattgcatcgtcctcttcggcggcgctggcgcccacaccaccgaaccctcttccagcttccttccacccgagcacgccggtcacccatcatcgccgaagccctccccctcctgcttcagctgtgctggtattagattagatcaaagtggaccgcgtcgggttgggtccagtcctttcgctgattgcggttgcagattcctctcctgcgaggcacgagctgagtcctatccctatccgcccttgttgcagcggtgcggaaggcaatggtggggttgggatggagagtcggctcaaaggtgcagagatggggccggagctgcctccggggtttctcttctgctgcagttccgtctcagctggagaatgtcggattcatcggacttgggaacatgggttcccatatggcaaggaacttgatcacggctggatataaagtgactgttcatgatataaatgaaaattctatgaagaaattctcagaggatggaatccctacaaaacagtctccacttgaagtatcagaatcgagtgatgtcataattaccatgcttccttcatctactcatgttttagaagtatacaatggacccaatggcttgctttgtcggggcgaacgcttgggcccatggttatacatagattcatcaacagttgatccacaaacatcaagaaagatatcgacagccatctcaagatgccttttaaaagaaaagaaaggttacgctgaaagccctaagattctggatgctccggtgtctggaggtgttcctgctgcagaagctggcaagctaactttcatggtgggtggtcttgaggaagcgtatttagcagccaagcccttacttcaagcaatgggggaaaaaacaatctactgtggtggtgctggaaatggctcggctgcaaagatatgtaacaacatggcaatggcaatcagcatgcttggggtctccgaggcctttgctcttggccagaaccttgggatcaaagcaactactctcacagacattttcaactgttcaagcgctcgctgctggagtagcgatacatataatccagttcctggagttatggaaggtgtaccatcatcaaggaactatagtggtggtttcacttccaaattaatggccaaagatttggatttggccatggcttctgcatctggagttggcttcaaatgccccatgggttccaatgcacttgaaatttaccgaaaactatgcgaggatggttgtgaactcaaagacttctcgtgtgcattccgacattactattctggcaagaatgaagagtgatcttggatacgctgcaaaatttcctcctttcgaaatcaataaaacagcaaataaagttaggacctgattatgtcccatgaattgaaacattgaaaccaatatctagaaagtgtgtttccttgtttcattattagattactttctaattggtctaaattcctggaaccgaacaggaccttattggaaagtttacagtataagctgtgtagcattgtaccagagtccagagacatggtggttgtttgttgaccagtggtgatgatctgatcatctggttaaaactgttattggttttgcttctaggcaatcaagtgatactgttctgggacagattcaaccatgagccaag

SEQ ID NO: 130592 - DNA, 1733 bp, Zea Mays
tgctgaaagcctgaaactgctcaagtagcgcgcaacgacaagagcaacgaggaacatcagttaggactacctccacaaattgagcatcggttaccccattgcatcgtcctcttcggcggcgctggcgcccacaccaccgaaccctcttccagcttccttccacccgagcacgccggtcacccatcatcgccgaagccctccccctcctgcttcagctgtgctggtattagattagatcaaagtggaccgcgtcgggttgggtccagtcctttcgctgattgcggttgcagattcctctcctgcgaggcacgagctgagtcctatccctatccgcccttgttgcagcggtgcggaaggcaatggtggggttgggatggagagtcggctcaaaggtgcagagatggggccggagctgcctccggggtttctcttctgctgcagttccgtctcagctggagaatgtcggattcatcggacttgggaacatgggttcccatatggcaaggaacttgatcacggctggatataaagtgactgttcatgatataaatgaaaattctatgaagaaattctcagaggatggaatccctacaaaacagtctccacttgaagtatcagaatcgagtgatgtcataattaccatgcttccttcatctactcatgttttagaagtatacaatggacccaatggcttgctttgtcggggcgaacgcttgggcccatggttatacatagattcatcaacagttgatccacaaacatcaagaaagatatcgacagccatctcaagatgccttttaaaagaaaagaaaggttacgctgaaagccctaagattctggatgctccggtgtctggaggtgttcctgctgcagaagctggcaagctaactttcatggtgggtggtcttgaggaagcgtatttagcagccaagcccttacttcaagcaatgggggaaaaaacaatctactgtggtggtgctggaaatggctcggctgcaaagatatgtaacaacatggcaatggcaatcagcatgcttggggtctccgaggcctttgctcttggccagaaccttgggatcaaagcaactactctcacagacattttcaactgttcaagcgctcgctgctggacgatacatataatccagttcctggagttatggaaggtgtaccatcatcaaggaactatagtggtggtttcacttccaaattaatggccaaagatttggatttggccatggcttctgcatctggagttggcttcaaatgccccatgggttccaatgcacttgaaatttaccgaaaactatgcgaggatggttgtgaactcaaagacttctcgtgtgcattccgacattactattctggcaagaatgaagagtgatcttggatacgctgcaaaatttcctcctttcgaaatcaataaaacagcaaataaagttaggacctgattatgtcccatgaattgaaacattgaaaccaatatctagaaagtgtgtttccttgtttcattattagattactttctaattggtctaaattcctggaaccgaacaggaccttattggaaagtttacagtataagctgtgtagcattgtaccagagtccagagacatggtggttgtttgttgaccagtggtgatgatctgatcatctggttaaaactgttattggttttgcttctaggcaatcaagtgatactgttctgggacagattcaaccatgagccaag

SEQ ID NO: 130593 - DNA, 1669 bp, Zea Mays
tgctgaaagcctgaaactgctcaagtagcgcgcaacgacaagagcaacgaggaacatcagttaggactacctccacaaattgagcatcggttaccccattgcatcgtcctcttcggcggcgctggcgcccacaccaccgaaccctcttccagcttccttccacccgagcacgccggtcacccatcatcgccgaagccctccccctcctgcttcagctgtgctggtattagattagatcaaagtggaccgcgtcgggttgggtccagtcctttcgctgcggtgcggaaggcaatggtggggttgggatggagagtcggctcaaaggtgcagagatggggccggagctgcctccggggtttctcttctgctgcagttccgtctcagctggagaatgtcggattcatcggacttgggaacatgggttcccatatggcaaggaacttgatcacggctggatataaagtgactgttcatgatataaatgaaaattctatgaagaaattctcagaggatggaatccctacaaaacagtctccacttgaagtatcagaatcgagtgatgtcataattaccatgcttccttcatctactcatgttttagaagtatacaatggacccaatggcttgctttgtcggggcgaacgcttgggcccatggttatacatagattcatcaacagttgatccacaaacatcaagaaagatatcgacagccatctcaagatgccttttaaaagaaaagaaaggttacgctgaaagccctaagattctggatgctccggtgtctggaggtgttcctgctgcagaagctggcaagctaactttcatggtgggtggtcttgaggaagcgtatttagcagccaagcccttacttcaagcaatgggggaaaaaacaatctactgtggtggtgctggaaatggctcggctgcaaagatatgtaacaacatggcaatggcaatcagcatgcttggggtctccgaggcctttgctcttggccagaaccttgggatcaaagcaactactctcacagacattttcaactgttcaagcgctcgctgctggagtagcgatacatataatccagttcctggagttatggaaggtgtaccatcatcaaggaactatagtggtggtttcacttccaaattaatggccaaagatttggatttggccatggcttctgcatctggagttggcttcaaatgccccatgggttccaatgcacttgaaatttaccgaaaactatgcgaggatggttgtgaactcaaagacttctcgtgtgcattccgacattactattctggcaagaatgaagagtgatcttggatacgctgcaaaatttcctcctttcgaaatcaataaaacagcaaataaagttaggacctgattatgtcccatgaattgaaacattgaaaccaatatctagaaagtgtgtttccttgtttcattattagattactttctaattggtctaaattcctggaaccgaacaggaccttattggaaagtttacagtataagctgtgtagcattgtaccagagtccagagacatggtggttgtttgttgaccagtggtgatgatctgatcatctggttaaaactgttattggttttgcttctaggcaatcaagtgatactgttctgggacagattcaaccatgagccaag

SEQ ID NO: 130594 - DNA, 1680 bp, Zea Mays
tgctgaaagcctgaaactgctcaagtagcgcgcaacgacaagagcaacgaggaacatcagttaggactacctccacaaattgagcatcggttaccccattgcatcgtcctcttcggcggcgctggcgcccacaccaccgaaccctcttccagcttccttccacccgagcacgccggtcacccatcatcgccgaagccctccccctcctgcttcagctgtgctggtattagattagatcaaagtggaccgcgtcgggttgggtccagtcctttcgctgtagattgcggttgcagattcctctcctgcgaggcacgagctgagtcctatccctatccgcccttgttgcagcggtgcggaaggcaatggtggggttgggatggagagtcggctcaaaggtgcagagatggggccggagctgcctccggggtttctcttctgctgcagttccgtctcagctggagaatgtcggattcatcggacttgggaacatgggttcccatatggcaaggaacttgatcacggctggatataaagtgactgttcatgatatgtaaattcctgccaatccttatactactgttcatgatatgcgtcacagagttcattgtttttttcccttccagttcaaaactggtttcttcttatatctcagcttaatggactgttcttgtttgataaacattgaatctatctatcagaaatgaaaattctatgaagaaattctcagaggatggaatccctacaaaacagtctccacttgaagtatcagaatcgagtgatgtcataattaccatgcttccttcatctactcatgttttagaagtatacaatggacccaatggcttgctttgtcggggcgaacgcttgggcccatggttatacatagattcatcaacagttgatccacaaacatcaagaaagatatcgacagccatctcaagatgccttttaaaagaaaagaaaggtaagttccaccatataacagtaaagacatagggcctgtttgtttcagcttatagattatataatctagattataatctagattatataatctggattataatctatggagattataatctgtatgtagctgtctggtagttcagattatacgtatgcagattaatgttctgtgagacacaatgacaacaatgctcttgtttgtttagttgtcttctttttttacggtttggcattccatcgattcatacaactatttgcaaaataggaaattaaaattatgccaaatacaccattggaaagctacaaatttcgtttgtaaacatcagtcatagagactggtatacaatggcagtctttataagcatttcatcgattatgtggcgcacacataaaccatatagtgagcagcatcaatggagctagctcctatggtaaatagtccctgctgcgacatcaatggatcatcaaaagggagttgtgtttgctcgtcggggttgcgtttggtcgccggagcaacgcttgctcgcggcgaggacaccggagctgcgttcaggctgcggcgtgaaagcacgcccagaggcgacgccgccattcccaaggctgcacccgctccaccgttgccgaagcattccgcagagccattgtagatgccgcgctcgccgacgccacaatgttccccacgtgaagaggatcaacccaggagagggactcctg

SEQ ID NO: 130595 - DNA, 121 bp, Zea Mays
tttttttttactttttcactactagatgcatgctgtctgttggacgtcatgtggaaggtggtgaccagaacacaataacctatactcagaaataaaagaatatttaactagtaaatattgg

SEQ ID NO: 130596 - DNA, 2066 bp, Zea Mays
agagaaaaaatactccactatcagaatgttcgggagcaaagccatcaccatcaggtaaaactctgaagaatcgcatcgtatcgtagggccaggacgcaggacaaaggaagaagggctgagctgtgatcagtaaacgccacaccgacagtagcatcgtcacatcgcattgcaatatcatccaagctccgggcactctactacgtacgcacgtacatacactgcgtttgcagcacacgcacacatacaggcacatctccttcctctagctacgtacacaaatctctggcgccttcgccgctcgacagccctcctcgatctttcttcccggccgcgccaggcggccgggaccgggagcgagcgcgcaggcggcgccggcaggcaatcaaaagtcaaaaccccgagcaccggcgccggcgccgcgctaaactagaaacccaaacgaaccaataaataaaaaagctgaaaacaaagcaaggccacgctagttaaagccgagctgcttctgtctgtctgttgacggctcgctcggtcggtcgctcgtcgtctcggtctcagggcgactccgacgacgagttggtggacacggtgatgagcgtggacgccgacgacgaagacgtccgcggcgtggcggagggcttcaccagcaccacgggggtcttgctctccagtcggcggtggtgctcccggaccagctgctccgccacgccgtccagccgctcgccgttggtctgcgccatcagcttctttcccctgaacagcaccgactccacgccccgctccgccagcgccgcctccgccgtctcgccgggcgcaatgccgttgccctggatgcggacgtagttggtcgctctgctctccccgaacaccatcgacacggcctggctcaccatgtcggcctggcaggctccggcgatgcgcaggaggctggaggacgagagccggcccagcgaggctgcggcgcgcccgccgagggacagcaccacgagatctcccgcgccggcggcgaaggggaactcgcgcttgttgtgcagcacgtgcgtcagcgccacggcggtcgggttggccacggcggccgacgcgccgcccccgcctgcccccgcccccgacgcggcgcgcagcctggtgcgcccgtccagggacgccacctccgcggggcccacgccgcaagccgccgcgcacacctgccacagcgggaagtcgaacgcgtcggcctccacggcatcggcgcgggagaacacgaacggcgccgcggtggccatgtcgtagcacgggatcagcagcggcttggcggcgtcgcgcaccgtcaggtcaccgaacaccttccggaacgcggcctcggggcgccggaacgacatcaggcccccgccacgcccggacaggaccttccggttcttggccacgacgtcgcgcgccgcctcggcgggcatccggcacgcgaacaacgccgccgcgaggaacccgcccgcgccggagccggccgccaggtcgaagaagtccgcgacgcgcgcggcggggttgccggagagctcctgcaggcggcgctcgagccgtaccagcgctgcggcggccagcgcgccgccgtcggcacccccgtcgatggacagcacgcggacgcggcccgcggagcacgcgccgccctccagcggcgacgcgccgaataggaagttggactcgaggatggagaagatctcctggctgaggcggtcggagccgccgttgtacgccagaggggacggcagcagcgtctgatcgagcagtgcgagcgaggcggtggccatttcccttgcgacgtggagtgagacggcttcttgtttgctctggtatctggtctgtcggcacctggattgggtcgcggacggagaatgcgattgattgggaaggcaggtgaggctgaggtgagtgtgcggcaccgtcttcccggcagaatttatactggagccgcgcactctagcttcccgccacggcgcatggtagcacgcgctcgtgcccattgacgctgctgagccgcgtgtccttttctgtcctcgcttcaccactcaatgcttcggttttgtggcgcgcttggt

SEQ ID NO: 130597 - DNA, 978 bp, Zea Mays
ttggttttaggccatcgaatctgtttcaagttccagcaatggagcagtgaagcacacattcatgaggattgacagatgaatcgacgagagccatggaagcagcctttgctcaagaaaggtgacatcgtggtcgtggagatctccaacctctatcaggtggctatgctggtcaatgatctgtgcaggtcgaagagcgtgaacgacctatcctccccatcatgccaaacccacaaggacgacgacgacaacaacctagaggacgaggatgagtggtaggacgggaaaaagtttaatgcggtggccaccttcaagatcctcggcgaggttgacattgctcaccttagttagactttagaaacccagtcagctgcttctgcgttggtggtgctgagttcgtgcatttcagagtgttcgctgctactgttagtgatactgctcccctttttggttgttgccacgagcttagatttcataagctaaccgccgtcgttagtgaaacagctcattatgatcctaattgttctgtaaattttcaagtttaaatagccatgcctattttactgattgaacagatgcaacacgttattgtgtaccatactttgtgtaagtcgtcgacttggttgacttgtacctgtggtacgtagcatgctatctgtaatactttgtcaactggtgtgttctcatttatgtcggcgcttgttccgtgagtttcattcatgtgagtttttattttgtctaggctcccctcattgtcttatgtgattctgcatgtattcagatctcagatacccacatcatatcgaggataaagttctcaaatgaaattgtgttagtaatattgattctatatcacccccatgcgtgaaaatagcattacaaacttggaactaagatattctaaacaaccattgaaccttggtcatgttttccaattagcatctaaaaagtactttaacaactagctaagagtacttctat

SEQ ID NO: 130598 - DNA, 1459 bp, Zea Mays
ttatttgtaacatgccaatcaaaagctatggtattgttttcatcttattgggttatcttttgcttatttagatcaaggcgatcatggaagccaaatgttcaggagaagcgtcttttcagctatgttcatgatcagcacattagagtcaaggttaccacacacgcacttcgatgtattgacaaagctggtgggatagatgaatacctcctgaagacaccttacaataaaatggataccgagatggggatagtgtggaaagcaaatattgaaaagatgtattcagatttggctgaaatagaagtaggcttcttccctcccgaggttgaggctaagattaaaaagggcttagacgaggttcgcgctgcgaagatagacttttgtagggaaggaagacgagctttggcaaggcaaagccagctagaagcaagtagtgttggtgatgaccaaacgagtgaagtcatagatacaaatgaagaggtatctgatgctgctgctaaagtctgagcctaaacctatgtgcctgtcttgaatgatcagaggaggcagcaaatcattggatgcacctgggcaaataatggaaggcttgctacttgcgcactaactgtacccccttttcgggagcagcagtgtatgttaagccagcatatcttgtatatcaatgtcttgccgttgtaaagcagcttttatgtgttggaaactttgtacaattattgagatctcaaaagcctgaattgtgggggtagtttgtcttttagaatctatcattttatgcagcttaactgaattgtcgaaataataatgctaaagtagctagaggtctgacattctagctcatttctgttccactcctatgttgcttaactgaatttgtagggccgagtgatctgggtacagttgttattttgtttttgcggataactgtgacacgatttctatttgcttcaactcatctcatggccaatgttcatctcaggcgcggaacttccaatttgacgccttccgatatatattacgtggatcacttgttaaggctgctggaaaatgtttctgatgttccatccgcccgcaaaggtacttgtcaagaacttgggatataatatgaacagaaaacgctacatttgccggctccatatgaacaaacacaagtccgaaattacacgtccatcattagcacatctattagcttccatctaggctagcttggcgaggacgtcgccgagcgcatctttggttgctgcgaagtatttctcggcctccggggtgctcttgatctttgcggcagtagccacaacgacaccgtggaatgtcttcgcagatttgaaccgagaatctgcaactcaaatgcctagagttagagttagagctaagctgccgatggttcagagcatgttcatagaactgatgaaacattcgaatttcataaggagcactctgcttttccgcagaaaaaaaaaggaaa

SEQ ID NO: 130599 - DNA, 1534 bp, Zea Mays
gggcatccgcagaagttgaccacgtacagcagcggcagcgcgggctcctcctgttatataacgcccgcctctcgccgctctccagcttcttcttaatttctcttctatgatacaggggtaggagaaggaggaggaggagtagaagcagctccacacctgtacgtagctgccgcgcgccggtgagcgaggtcgttcttgagagctgtatatatatatatagctccgcgacgacgccgatgatggccatcaagtcgctgagcatggtggaggccagcctgcctccggggttcaggttccacccgcgcgacgacgagctcgtgctggactacctggccaagaagctcggcggcggcggaggccctgtggtggtgagcatctacggctgccccaccatggtcgacgtcgatctcaacaagtgcgagccctgggaccttcccgacatcgcgtgcattggtggaaaagagtggtatttctacagccttagagatagaaagtatgccactggccagcgtacaaacagagcaactgattcgggatactggaaggccacagggaaagaccgtccaataagccggaaagggttacttgttggtatgcgcaaaacccttgtgttttatcaaggtagagccccaaagggaaagaagaccgagtgggttatgcatgagtttcgcatggaagggcgagatgatcccatgaaattacctttcaaggaggactgggtcttgtgtagagttttctacaagagtagggcaacagttgcaaagccgcccacagagagcagcagcttcaatattgatgcagccacaacttcattgcctccccttattgacaacaacttcaatatctcctttgaccagcctggctcatcatcagtgcagaacctagagggttatgagcaagtgccctgcttctccagtaacccctctcagcagccatcgtcgtcgatgaacgccgcccggctgccgccgtctgccgccatggctgatccggagcagcagatggggaagtcaataatcaaggatgttctcatgagccagtttagcaggttcgaaggcagcgtcaagagggaggcgcctccaagcaatttttctcaggatgggtttgagtacttagctgagagtggcttcacgcagatgtggaattcgttcaattagttgattatgttttataggaagattatatatatattattgttatggagagcgatgcggatcgaaatgcctcgacgataacaggatggatatatagatgagtgctacaagaggcttgggtgtgtgtgcctcctgtgtggtattgcatgtagccgtagtagtagtaggtatatatatacatatagtagcagtaccatctcagtacacatccttcaaaaagaaggagaaatgaaaagagagatatatatatgtctgtatgccctatgccatcaattaatgacgacagatgtgtaaatacattatttgtgtactatggagaaatcagaaggaaaaaaatacagtgcgtacgtgatgacaaaaaacaagaatagaatcttattcat

SEQ ID NO: 130600 - DNA, 1140 bp, Zea Mays
caataaggaaataattatggaccacagtcattcagatgatagaatattggatgatttttgtggacaaattgaagagatgcccttaaatgctgacaaccctgaagaagtttctgatatatctgacagtagagacgataattcagatgtgcttcatgttgatattgaagaccgtgaatctagccctgttaattgggagatagatgcttcagaaactcaaactactattcctggaagtagtgaggtgcaaaatgaccatgcaggaaagaggacctctactgtggatgatagctcatcgtcttgttcatctgactcagtgccttcagttactatgaatggatcatataaaggaggtgcctggacaagcgtcagatcctcatccaataagtatatctttgtgagctcctttatctttctataggttggtattgatcatgctgtactgtgattcaagggaaacaacaggaggaataaggatactgaagcacgggcaggatttgcacaaggtggatcatgttcatcgcataatggttttataggctctggcagcaatgcctctggccactcaaaggaaagacacgaaccatcgagttccccgccgaggaggacgaagacgaggacgccgaccggttagcacgctctcaggcgccgggggcggatggggtaattgcctggcagcgggttgtcgtgctgaagcccgacccgccgaaccctaaccctagcgctgatggggaggggatcggaaggcggcgtccgggcaggatgccgccgtcgccgcggcgcttgcgacgacctcgtctttccaggcggcgtacctccacctgcaggccgcccacacgacgttcctgccggatgcggacgccgccgctgtgtcgcacctccggaggctgtcggagctcaagcggatcgcgaggagcgggccagtgggcccgcccgtgccggacggtggttgggccctcacggcgcacctcgaggtccaagtgcgcgagaaccaggcactgctgcgggtcgttcgacgccgtggtgaaccgcctacaggccgcgctcgacgtcaaggccgccgcgctgtggctggacctcgaggcgctcgacgacgccaacgcgcggctcgtgggctgcctcgaccgcacgctcgcgcctcca

SEQ ID NO: 130601 - DNA, 1911 bp, Zea Mays
cggctcctcttcgccgtcgcaaccgatttatatatggcgatggaggcgtcggcggcctccgacgaaaccctagccgccgtcttcgcccagctcaagctccacaccgtcgctctcctcgacctcctccgcactcgccgccccatctctagctccggctcctccctacgcgaaatggccgctttcctccgcgccgccccggccccggcgctgcagctctgcttcgattatacagtgtttccactgctcctgctcctggatgcggcggtgcagtgcaggaagcaaggcaatgcgccggggcaggttgcagggggcattgatataggtgatgccgtcgccgaagctggtctgacctgccttgaggtcctcctcaccaagtgccacctcacctcggtcaatcagatggtagcaatgctgaaaaagttgacttccggggctatgctttcaccttcagaggcttcagaggaattccgtggtgcaattattagatgcttcagggctttggttttgcagttacagccatgcttggaccatttttgttcttgcaaacacggaatagtgttacctacgatcccaaccagtacatgcttggaggttagaagtgtagtccgcccaaatcactctgcgcagccagaggagtgcttgcttgcatttcttctgtctaaggaacaagatctcagtgccggttgttaggaagtgcaccgaaatgttgaggcgagcaatttgcatatctggcggcgatttttatgtacgcaggtttcataaggatggacctattgtttggaggttgctggctttatctccattccgacgtctgtcaaagatggatgaaaaagcaatcattttaccatatagggatacctcacttaactcagaggaacctatggctgagatctccagccaaaagattcagattgcagtcctggacatgatcgctgcaatatcttcgaacaagagaagtgctgttgcactagaaagcgtactaaagaaggtctgtggccttgtggtaggcattgcctacagtagtttgacaggtttgcaggaagctgctataagggcattggcaggccttgcctgcatggatgctgatcttgtctggcttctccttgcggatgtgtactactcactaaaccaaagggaatctttacttcccaaccaagatctagccctggtatcagatcttttgccccctccagtgtcttcgagagaatacctctttgtacagtatggaggtgagggtgtcaggtgtgatgtagatccctcatctgttcattatgtgttcagaaggatgcagggtgtgtgatcttgtgtgacctgaaaatcaggttcctgatactgtgtatttgtaatcttgctgagtttctttggtcatgctagcaccctatgtcacacattgaacataatatcacctgctacagagaatggtaaactttttcatacgtgttctcgcactgaaaatcatcaaggttggtcacatgtctgaagaatgattatgacaagtctttaccactttgatcataattatattaagcaaacatcaggactcatgatgacaatgaaggatgtgatgggtttgtatctgttagccatataaggttgcacgttaagcatgcccctgacttgccggacgagcagcaagacttcgggacctagattggctaaggcactaagaatagaatagcttatctaccgatatgtaaagtcttatttccacctttcgaattcttttcctcggtagctaagcttatttagttgcctaatggtcgatgtaatctttttattgtgtgattcattccactttcatggtatttccgctcttgttacctccctctaccgcttcttcatctacatctaacctcatgcctggcgacctctaataagtaactgttgatccggccacataattggaatgcc

SEQ ID NO: 130602 - DNA, 2997 bp, Zea Mays
cggctcctcttcgccgtcgcaaccgatttatatatggcgatggaggcgtcggcggcctccgacgaaaccctagccgccgtcttcgcccagctcaagctccacaccgtcgctctcctcgacctcctccgcactcgccgccccatctctagctccggctcctccctacgcgaaatggccgctttcctccgcgccgccccggccccggcgctgcagctctgcttcgattatacagtgtttccactgctcctgctcctggatgcggcggtgcagtgcaggaagcaaggcaatgcgccggggcaggttgcagggggcattgatataggtgatgccgtcgccgaagctggtctgacctgccttgaggtcctcctcaccaagtgccacctcacctcggtcaatcagatggtagcaatgctgaaaaagttgacttccggggctatgctttcaccttcagaggcttcagaggaattccgtggtgcaattattagatgcttcagggctttggttttgcagttacagccatgcttggaccatttttgttcttgcaaacacggaatagtgttacctacgatcccaaccagtacatgcttggaggttagaagtgtagtccgcccaaatcactctgcgcagccagaggagtgcttgcttgcatttcttcagtctcaaaatgcttcagctgccgtaggacattggctctcacttcttctacaagcatcagaacttgaggcatcaagggggcaccggggaagtgcagatgttaggaaggaatcattgcacacgctgcgcattcttattggcaaggtaggctctgctgatgcacttgcctttttccttcctggaattgtcagtcgccttgggaaggttctctacacagctaagactatgattagtggtgctgctgggagttctttgagcattgaacaagccattcttggattgaccgaggctttgatgatagtactaaatgacaaggaaaatcttagtgcacttggtaagcacaagaatgagaatcattctggtggcagtgagtcaactgagcatatattgcagatgcttcgccagttgccaaccaaaaatatatctgataagataagccatgatgagattacagatgattctgtctccaatgtcaataattcctttgctgatagaaaggcactgcatgtgaagcggaccaaaaaatggcttgaggaaacaactagtaatgttgataaattgctgtctgctacattcccacatcttgctattcattcatctgagaaggtaaggaaggcagtggttagtggtgtaaaagggcttttgtctagttgcagttctacattaaaaagaaccaagatgctacttttggaatgtttatgtgttctggcatgtgatgatgctgcagctgtgtctgaggctgcacaagatgctcttgatcatcttttcaaccaaggccacaatctcgtaacagaaaaggagatttctgatacctttactaggctggttgaaaggctaccacaagtggtacttggaagcgaggagacaaccgcactttcacatgctaggatgttgttggctctgaccttttatgctggtccccagtttctgataaatcatcttcaccgttctcctgtcattgctgctcgtttctttgattgtttgggtttatgcataggtcatagctcacagttttctggttccatggacaagctaattgtatcaaagccactatctattgggtatctttattcagttgctgagttgaagagtggcgcctattctaaagatacaactaacatatctctgcatgccacgtcaacatctgcagcctccaaaatatctgttatccatgataatgctttgccaaatgcattacttggtacagttgaatatgagttgccccatgtgcctccatggttttttcatgctggtagccagaagctttatggggttcttgctggaataattagacttgttggcctatcaacagtgtcaggggaaggaactgctgcaaccttgtctctctttgttgatattctgcttgatcagtttaggaggttgagcactgagctgagagacaaagatgtttacaacgatggtctgcagcggtggtacatgaaaggtgaagctggacaagcattgcgccaggctagttcagctgtctgcatgctcaatgagctcatgtatggtttgtcaggtcgatcccttggtatgtttttacaacttttcagcaacggatcagcacagatgccaaggacagtttgtcagaaaaatcaactgcttgcttgtgttaaacataatgcagttactaacaaaagagaagtgtggggttttagtgaacaaaagggcactaaagacaacattcttcattgcatcagcagtattctgcatgaatatgtatcaccagaagtgtgggatcttccaacagagaaggacactgagctacacctaatagagttgaacctgccattgcacttctaccgtgatacaactgcattgcacacagtagtgcttgaaggaattggagtcttgggtgttcttcttggtcaagattttgcacttagtgggtttatgcactcttccctttatcttctgctccgtgaacttatcagctcaagtgctcagataagaactgcatgtgatgctgtcttgagagcccttgctactgctggcggtcattgttcggttggccaatttgtcgttgcgaatgcagactacattattgactctctttgcaggcaattgcgtcacctggacctgaacccccatgtccctgatgttcttgcttccatgctatgttacatcggtgcttctcgtgatatcttgccattcttggaagaaccgatgcaatcaatttcttctgagcttgaggtacttggcaggcatgatcacccacgtctaactgttccatttctgaaggcagtttctgagatttccaaggcatgtagacatgaatccacttgtttgccagatgaggcacaatcattttatgagaaggtcagttctgagggtcaagaagta

SEQ ID NO: 130603 - DNA, 1200 bp, Zea Mays
aataaatgagacgtctctacagccgtctctatggggttttctgtaaaatttgtatccaccgggctctctgtggatagcccgtctctggtgcgttgctcgatggggaagagacggggacggctcaggctgtacatgttcgagtgtctcttccagatccgatgcggattgccagcttcattccctccaaatttctatcttcgcgcgggttttttcatttcgcgttgcgctttccttttgggcccattctgaactgaagcagtgccaggagagatcggccatgcagcagaagacgggcgccgctgcaggcatcggcttgcgacggtcgacctccactgccccgacaagccgccgctggatcccaccttcccccgctgtggcccctttgcccgcagccgccccgtccgcggttgccccatctggcccgtatgcaaccaccagcgccgcccaggcaggctccccgtcagcgtcaccagacgacgcgctgctctcccgcggcgcgcggatgggtttccgcgtcggcaccccgcccgacccgtcgtcttgtccaggcggtgcacggctctacaacgcaccaacagcggcaatgttcccctccaccaccggcccgtcgttctttgatttgcttcaaagcttcgagggcatcatgagctgtgaagatgcttatgaagaagatgagatggagatggagttaggaccgtggcacgactaatctagaaacaaaaagatgggagagtggctacaatatttgagttgtgcgtcttttgcaatggtgttcctctctgttcactagtttctctgatcaccaaggatatcatggcttctctagtcaccaaggagcttcggcaccggaacacctttgatgcaggacaatgaaggggcgacgaagctagcttcgtcatagcaacacatggagacaatgcaaggagaaagagtcatcctgaatgctgaaagcaaaagataatgttgcccttgtattatttgtaaattctgtgtaatccttgtgggtgtacatgtaatttcgtacgaagctgtacgattccctataaatagatgaatagtgtcatgcataaagtatcttttgaagggctggacaatagctgtgtgtaatcctttctctagagcaccttcgtcttaactcactttgtgaagtcgaatgtacgattgtaaaattcattatatgaaagaggagaaatgtgatat

SEQ ID NO: 130604 - DNA, 1295 bp, Zea Mays
aataaatgagacgtctctacagccgtctctatggggttttctgtaaaatttgtatccaccgggctctctgtggatagcccgtctctggtgcgttgctcgatggggaagagacggggacggctcaggctgtacatgttcgagtgtctcttccagatccgatgcggattgccagcttcattccctccaaatttctatcttcgcgcgggttttttcatttcgcgttgcgctttccttttgggcccattctgaactgaagcagtgccaggagagatcggccatgcagcagaagacgggcgccgctgcaggcatcggcttgcgacggtcgacctccactgccccgacaagccgccgctggatcccaccttcccccgctgtggcccctttgcccgcagccgccccgtccgcggttgccccatctggcccgtatgcaaccaccagcgccgcccaggcaggctccccgtcagcgtcaccagacgacgcgctgctctcccgcggcgcgcggatgggtttccgcgtcggcaccccgcccgacccgtcgtcttgtccaggcggtgcacggctctacaacgcaccaacagcggcaatgttcccctccaccaccggcccgtcgttctttgatttgcttcaaagcttcgagggcatcatgagctgtatgatgattcagccacacaaccagcccaaaaatgctcattttattggacatctgggacatacactaaataaccctattaacattcaggtgaagatgcttatgaagaagatgagatggagatggagttaggaccgtggcacgactaatctagaaacaaaaagatgggagagtgatgagtgcatggctcaaacactctgttgactcaattaggggaaacagcaaaaaatctgaacaatattggtcggatgtggcacaagagtacaacctgactactccaaagaacagacagaggactaaaaatcaggttaaggagaggtggcagtggcacaagataaataagtgggctagcatgttcaatgactgttatttgaagactaagaggaaggagacacagaaggataacaatgtagagggatgtggacttgatgatattgatcttcctcggtcaatgggacagaagaaggctaaacatgctgcatgtgaaagaaaaggaaaaacaaaagatagtgccatagacatcgatgagcttgatagatttgagaagatccagaatgatgttcgtgctaatcggcttaagctactagaaatgcaaggaaagttaaataacgacaagatggagctatcaaaaattgctctccaataa

SEQ ID NO: 130605 - DNA, 963 bp, Zea Mays
atgtcatatacgtactgatacagggcgtgccgactttccagggcgccaattcccctccaagatccgtcttctccggccgctccacccaattcgtcgtcctccccgcctccggatctgaacatgagcgacgcgaccacggcccccgccaccggagccggggaccacgttgtcgatgccgccgcgcacaagccgccggctgccccgtcgccggacatggcaagcatcagacggggcgggagctccgtgaccgagacagtcacccaggcaacgcagcagcagcagtcgcggctggacgacgaccagctggcggagctgcgggagatattccggtccttcgaccgcaacgccgacggcagcctgacgcagctggagctgggctccttgctccggtccctgggcctgacgcccagcgccgaccagctcgacgcgctcatcacccgtgccgacaccaactccaacggcctcatcgagttctccgagtttgtggcgctcgtggcccccgacctcctccaagaccggtccccttactcggaggaccagctccgcaagctcttcgccatcttcgaccgcgacggcaacgggttcatcaccgcggccgagctggcgcactccatggccaagctcggccacgcgctcaccgtcaaggagctcacgggaatgatcaaggaggcagacaccgacggcgatggccgcatcaatttccaggagttctcgcgcgccatcaccgccgccgcatttgacaacatcttctcctgaccgaccgaccgaccgaggccgcaaacaggatgcgttgtgtcgatcatcgattcagttcttggtgattctcagttttcaatttgttcgtcttcttttggggagattaatttaggaagctatagatgaggtgaggtgttcttatgaataacagatcaaacaaaaaaggaatcaatttagggacaaattacatgcatggttgattgtgtt

SEQ ID NO: 130606 - DNA, 1419 bp, Zea Mays
agtgattgcaatgtatttccagcatcacaaatggctttggaatgaaatttcggtttccaccacatagattaattattcatagaaaggaaaacatttcatttgaagctgcgcttagttcaggcatcacctctccaatccaggaacagcagcacgagaagcaaggcagcagcgccgctactccgccttgacggtcttcttgggctctgcgaagcagaagaagcaacagccaaataaaccaatagatcatgccgggataaggataagacgaggcatggattctgaccgtggagttcaggcgggcgggcatccttgccccaacccacgccgcgggtagcctctaggtattggtcgacgaggtggcggcacttctggtggtggttgatgccctcgatgcggtagcaccagcggaggcgctcccggatgatcttggcggtctcgatatggatccacttctctcgcaccaggtgttcccggtactcgagcatcgccaccgggtcggcatacgggttcttcgggtcgaagttatccggcggctgctcgtcgaactcaaccttcgccttgcgcaccatcttctccgatcgccgccgccgctgccgctcgctaggtccttcgattgggtggaggatgggattggtgcgctacattcggtcggccggtcggatgggacttggaagacgaagctgaatgggtccacgagcccattatgcgaactaggcctgtgggctgttactgactagagtcggcctaacaaaatgattagagttggcccaatagaatgacgagtcagcccaacgaaatgaagcgtaggtgggccaagagacgactaatcggtaggaggcaccgattcacccaggtggagggcggattcgagaagagccggcgcgatgagctcgccggcaaggtcgaccgtctcggcggcgagtgggggagccgtctcggccgccgaagacgttgccgattccatcgacgcgctctaccgcaaggacgagaccatggctgaactcaagtttgaggtgatggaagcgctgcggaggtgaggtcgctcgacgatgacaattggatgttcgcgcgcgtcgcggttccgcatcaatctcgaatccagaactggtgcttacatgcccaagcaacacgggaaactctcggagctggggcaagcatccaagaaaacaaggaacttctagggtgtagatgtttgtgcttgcaagaagcctaattcatgactccatgatgatagtgaaggtgggattccatctaggctgtagcgtcaaggatgattttgtccagttccaaatcaatctagttgcttcctgctagttcaatttcaagcacatgtaaggattttcgagtgattgagatgtcaatgtcatggtattgtactattgttcatgacttgtgccctttctatcttttacaaactca

SEQ ID NO: 130607 - DNA, 342 bp, Zea Mays
atgcagtggaaaagtgaaaacaaaagcaccgtctggataagcgtggatcaatcattcaagctctatttgcgcaaccaagttgatgaagctattggtgcatctgcacatctcagaggtcgtaattttcctaggagagctgctggtgggtgtgtgagaaggaatgaagaccttgaggaagagaagactaatttagcaaatgaagatgacgaggatgaggaatatattcttgatgatcttgatgtggaagataaaattgaaggaagcaatagtgaaaaagatggtgatgatcaaggtgtggatgctcatggtcttcatattaatgagttcgatgatggttactga

SEQ ID NO: 130608 - DNA, 1798 bp, Zea Mays
cttgcacaccagcagcaacaaaccacgcaacggctagtacggaagaagaggggcgagcggcgagcagcgccgttccgtcttcgccgtctcctcgtccgttcgccaagacaacggtcatattaccgttgtcctgccaaaattccaacactttaaaactgccacccaacgcgctcctccgccgccgtctccagcacacgcttccccttccctcccgctcccattcacgtcgtctctttcctcgagcctccgcttcgccagcgacgcgcccttctcacccacctcgccgaggaagtattcaccgatggagacgccgctgtcttccaggaggatcacccgctcgctcgccgccgcatctgcccagaagagcgccgccgccgggccggactccgccgccctcttctcccgcgccaagaacgccgccgctggggagacccagcctcgcgccgccctgcacgacatcaccaacgactcccccatcgtcgggctcgcggcgggcgccctccacgccaccgataccacccccgcctccaccgccgccaagacccgccgcagggccccgcgtcgcacgcccggctccggggaggcgctcctgcgcggccaggtcaaggcgctcctccacaaggtcgaagaggagcagggctgcgccgccgcggccatcgtcaggcccgcgcgcatccaggcgctgctcggtgtatccaggtcgccggcccagcttcttgcgccgacgccagccaacacgccgcagatcgagcccgtccccactcccagggaaggtctcctcctgcttgatggcgctacggtcgtgccctgcgtcctagacgaagaggaactgctgattcctaagcttcaggtcattgcagcttccctacctccacctcatcaggcagaggagaagctcggggactgccagctgaaccgtgcgctggtgttcgatgactcccctgagaaatgtgaagagtccagtggatcagccgtctcgtcaaccttctccctccaggagagcagcaccggcagctacgtggacaagtcatcatcacctgaggacgacagctcctctgcctggtccattcaggtccatgccagctctgagaagggcgacgaagaagagctgggcgtggaggagctggcagcagagtacactgacgaagaggaggaggaggaggaggaggactgggacgaagacagcgatgacgactgctacgatgatctgtgcgaggagatgagcaggatgaccgtgttggaggaggaggagaagaagaagaccgtgctgccgcagttcgaggggaagcacaccaggttcatctacaacagtgacgacgagatcgagcgggtggaggaggcggatgcagctgaggcgacggcggagcttcgcgcattgatgctcaggggcctgctggtgccggaggggaggcacctgcgcttccacgacgaggatgccgacgaataagaatctcagttgtgttgtcaagtggttggttgtctttcgctgacaccagccaaaattcttttgcggggctctgagtccagttctgtacgttgattcatgtctccgttcttaagagaaataatccaacttttctgaaaatcaaaaattttgtggcattcgattacatggcaagtcttttatgtgctgtgtgctatgtgggaactctcatgtttctgattttttttgtaccttcaaattttcttctagcgccaaacgatttctacaaccctaaacctctgggactcaggaatgttgacgatttttttgattttttttattttgcggaacgacctggcctactgagggtcgaca

SEQ ID NO: 130609 - DNA, 811 bp, Zea Mays
cgtctccagcacacgcttccccttccctcccgctcccattcacgtcgtctctttcctcgagcctccgcttcgccagcgacgcgcccttctcacccacctcgccgaggaagtattcaccgatggagacgccgctgtcttccaggaggatcacccgctcgctcgccgccgcatctgcccgtgagtcctcttctcccaccttgactctctgtttcttgatctttggatcgcttctgcagtctcgacgcgttgttggatgtgtttcctgacgacgcccaccttcggttctccgcagagaagagcgccgccgccgggccggactccgccgccctcttctcccgcgccaagaacgccgccgctggggagacccagcctcgcgccgccctgcacgacatcaccaacgactcccccatcgtcgggctcgcggcgggcgccctccacgccaccgataccacccccgcctccaccgccgccaagacccgccgcagggccccgcgtcgcacgcccggctccggggaggcgctcctgcgcggccaggtcaaggcgctcctccacaaggtcgaagaggagcagggctgcgccgccgcggccatcgtcaggcccgcgcgcatccaggcgctgctcggtgtatccaggtcgccggcccagcttcttgcgccgacgccagccaacacgccgcagatcgagcccgtccccactcccagggaaggtctcctcctgcttgatggcgctacggtcgtgccctgcgtcctagacgaagaggaactgctgattcctaagcttcaggtaatgtaactgtcgattctgcacttat

SEQ ID NO: 130610 - DNA, 354 bp, Zea Mays
gtgatatacaaatatcatttctcattcaccaaattatattatgaacaatgatgaacaaaatgtggctagctgaacaggctctacacacctcagtatccatgtcaatgctcctcaaggcctcccattcactaacacttgtcctgcagaatgatgacaagggcagttcctcgcctgcaaagtcattgtaatatagatatgcgcttttcctcagtatccatgccaatgctcctcaaggcctcccattcactaacacttgtcctgcagaatgatgacaagggcagttcctcgcctacaaagtcattgtaatatagatatgagcttttcctacggaggtgggcgggtccttctgtaggt

SEQ ID NO: 130611 - DNA, 743 bp, Zea Mays
ctccaaatatgataagtttccctgtgaaaccatgctattttagccacgctggagttggttaaagcaccagttaacaacttccttttatgcataaaacaggagatgaacctggaggcacctccagcattgggaggtggatgtgcagcccccatgctaggagattcgatggaaaaggctccaagctcaccttggatgcctttctccatgctgtttgcagcgatctctaccaaagtgtctcctgagaatatggacgtgattattggttgctatgaagagtttaagagcaagaaaataagccgaggtgaactagtgaagaagctgaggcatgtagttggtgatagagtgctaatatcgacgataatgcgtctccaagataagcagttacctccagtggataagcgtgaggaaccagacacatcggcgtccaaggtggtggcggaaccatgagatgggtgtcaggaggtgggcgaggaatgcagaaagggaggaaccagccgacttgacatagaaaaccctgtgggaagcagcaactatgaagcctcttgcatcagtcttgtgcatggaggctgctgtttgttctctgtatcgtaggtgtctacgtttgcgaggaaattgtatccggtgtttctctttcttcaaattaaaccacgcacatgcagctgccgtactttttggaccattgaagtgtttcgtccgtgaaaaaggctccttttaccttcccgtttgccttcctaagagcatct

SEQ ID NO: 130612 - DNA, 812 bp, Zea Mays
caataattgacatgattgcattattgagattataacttggagctgattatattcgttatctatgatagaaacctccaaatatgataagtttccctgtgaaaccatgctattttagccacgctggagttggttaaagcaccagttaacaacttccttttatgcataaaacaggagatgaacctggaggcacctccagcattgggaggtggatgtgcagcccccatgctaggagattcgatggaaaaggctccaagctcaccttggatgcctttctccatgctgtttgcagcgatctctaccaaagtgtctcctgagaatatggacgtgattattggttgctatgaagagtttaagagcaagaaaataagccgaggtgaactagtgaagaagctgaggcatgtagttggtgatagagtgctaatatcgacgataatgcgtctccaagataagttacctccagtggataagcgtgaggaaccagacacatcggcgtccaaggtggtggcggaaccatgagatgggtgtcaggaggtgggcgaggaatgcagaaagggaggaaccagccgacttgacatagaaaaccctgtgggaagcagcaactatgaagcctcttgcatcagtcttgtgcatggaggctgctgtttgttctctgtatcgtaggtgtctacgtttgcgaggaaattgtatccggtgtttctctttcttcaaattaaaccacgcacatgcagctgccgtactttttggaccattgaagtgtttcgtccgtgaaaaaggctccttttaccttcccgtttgccttcctaagagcatct

SEQ ID NO: 130613 - DNA, 2631 bp, Zea Mays
ataatgcaagtggggtcacggcaaaggtgtggcgcgtgcgtggacctcgccctcatctcgtctcctccggcggtccggcctgtccaataattctagtattccaccgccgcacacctcctgtcttccttcaccttcgcgctccgccgccgccgtcgattcgtgctgctctcacccctaacctgtccaacatcgccggggagggaagcagcagaagaagctccccttacctccggctatcgcctgaggataaagtggggtctgtaggggagtcttaggggggagcaaaagggataggatagggagagatgaagcaatcaatttcttcgtccgccttcgcccctgcttacgtccccgctactaaccctaggatcattctgtcttttctcgtttcttatccgactcttcttcgttttatgcctatcagttatgaggttgaacgccttcagaagcttctctactagattagtgtaaatagtagacttgttcgagtttagcttggctggaagaattagtctctggtccgtgtttatatctgctagcaataatggctgcgatgaacggagaggtattgggtgaatgtggaaggaacataaatagtctcaagagaaagcgggagagccccgctgcatatgctgctggcgtattctgcacctctgaattgcatcagcatactgtcaatgattctgctgttaggtttcatcttgataaagaccgtaaggcaaagatcgtgtgccacttcaacaagcaggttttgcagagctataagaaattcatgagtagtgcaccacctaagcgtattttgcttcgccaaggtgctgtctggaaagactttccagaaaagattgtcaaattggcccaagctgacttcagggcaaaaaagatgatcacagaaacaggatatcagaaccagctatttttgctggattttgcccatatgacattcatagacacaaagacaggttttcagaggccaattgcttggatcgatgaaaatgaaaagtgctacttcccggaatcatttatacaagatcagaagttatttatgaagaaagattttggcaacggaaatcatgagtacattagtgaagagcgaaatgggacacgagaaacgaatcaccagtttggagcatcagaaagttctgctgaaagctcaaactttgagtcaagtattggagatgtttctagtcctaagagagctagggctgaaaagaatttcattgtaaaaaaatattgtgatatgggagaagctattggagaaaatgagtcatgcactttgttgcctacagcctgtaacctactaccacaccaagctaatctgggtgaggtatcccgtgctcagcgcactattgaagccgtggagaagctgttgctgcaggggatgggttcagttattgaatccaaggacattattggaatctacaggactccattattggatgaccacggacaagtccgttaccatattcaccaaaagcaagtacaggttaccggatgtcatcgtggaaacgcaaatgtccgttatgcatggcttccttgctccaaaagcactgtgcatgtaatgatgctgaatggtgttttgcaagttgataagcctcccaataagtgtgcagcctatggagagggcactctccttacaccagcaaatcgttcggatgcctgtgtgaaatactctgatgttgatgaaaatggcattgtccgtatgatgttgtgccgtgtaataatggggaacgtagaaatagttcaccctggatctaagcagtgccaacctagtaataagtattttgatagtggagtagacgaccttaaaaatccacggcattacgttgtgtgggatatgaatctgaatagtcatatctattctgagtttgtagtcactgtcaaattgccttctaaaaccaaagattcctttgtatcgcaagaaaactgtcagaattcgtctgatctatcactggtgttgaactctagttcacctgattgtatttcacaggagatgaacctggaggcacctccagcattgggaggtggatgtgcagcccccatgctaggagattcgatggaaaaggctccaagctcaccttggatgcctttctccatgctgtttgcagcgatctctaccaaagtgtctcctgagaatatggacgtgattattggttgctatgaagagtttaagagcaagaaaataagccgaggtgaactagtgaagaagctgaggcatgtagttggtgatagagtgctaatatcgacgataatgcgtctccaagataagcagttacctccagtggataagcgtgaggaaccagacacatcggcgtccaaggtggtggcggaaccatgagatgggtgtcaggaggtgggcgaggaatgcagaaagggaggaaccagccgacttgacatagaaaaccctgtgggaagcagcaactatgaagcctcttgcatcagtcttgtgcatggaggctgctgtttgttctctgtatcgtaggtgtctacgtttgcgaggaaattgtatccggtgtttctctttcttcaaattaaaccacgcacatgcagctgccgtactttttggaccattgaagtgtttcgtccgtgaaaaaggctccttttaccttcccgtttgccttcctaagagcatct

SEQ ID NO: 130614 - DNA, 2629 bp, Zea Mays
aataatgcaagtggggtcacggcaaaggtgtggcgcgtgcgtggacctcgccctcatctcgtctcctccggcggtccggcctgtccaataattctagtattccaccgccgcacacctcctgtcttccttcaccttcgcgctccgccgccgccgtcgattcgtgctgctctcacccctaacctgtccaacatcgccggggagggaagcagcagaagaagctccccttacctccggctatcgcctgaggataaagtggggtctgtaggggagtcttaggggggagcaaaagggataggatagggagagatgaagcaatcaatttcttcgtccgccttcgcccctgcttacgtccccgctactaaccctaggatcattctgtcttttctcgtttcttatccgactcttcttcgttttatgcctatcagttatgaggttgaacgccttcagaagcttctctactagattagtgtaaatagtagacttgttcgagtttagcttggctggaagaattagtctctggtccgtgtttatatctgctagcaataatggctgcgatgaacggagaggtattgggtgaatgtggaaggaacataaatagtctcaagagaaagcgggagagccccgctgcatatgctgctggcgtattctgcacctctgaattgcatcagcatactgtcaatgattctgctgttaggtttcatcttgataaagaccgtaaggcaaagatcgtgtgccacttcaacaagcaggttttgcagagctataagaaattcatgagtagtgcaccacctaagcgtattttgcttcgccaaggtgctgtctggaaagactttccagaaaagattgtcaaattggcccaagctgacttcagggcaaaaaagatgatcacagaaacaggatatcagaaccagctatttttgctggattttgcccatatgacattcatagacacaaagacaggttttcagaggccaattgcttggatcgatgaaaatgaaaagtgctacttcccggaatcatttatacaagatcagaagttatttatgaagaaagattttggcaacggaaatcatgagtacattagtgaagagcgaaatgggacacgagaaacgaatcaccagtttggagcatcagaaagttctgctgaaagctcaaactttgagtcaagtattggagatgtttctagtcctaagagagctagggctgaaaagaatttcattgtaaaaaaatattgtgatatgggagaagctattggagaaaatgagtcatgcactttgttgcctacagcctgtaacctactaccacaccaagctaatctgggtgaggtatcccgtgctcagcgcactattgaagccgtggagaagctgttgctgcaggggatgggttcagttattgaatccaaggacattattggaatctacaggactccattattggatgaccacggacaagtccgttaccatattcaccaaaagcaagtacaggttaccggatgtcatcgtggaaacgcaaatgtccgttatgcatggcttccttgctccaaaagcactgtgcatgtaatgatgctgaatggtgttttgcaagttgataagcctcccaataagtgtgcagcctatggagagggcactctccttacaccagcaaatcgttcggatgcctgtgtgaaatactctgatgttgatgaaaatggcattgtccgtatgatgttgtgccgtgtaataatggggaacgtagaaatagttcaccctggatctaagcagtgccaacctagtaataagtattttgatagtggagtagacgaccttaaaaatccacggcattacgttgtgtgggatatgaatctgaatagtcatatctattctgagtttgtagtcactgtcaaattgccttctaaaaccaaagattcctttgtatcgcaagaaaactgtcagaattcgtctgatctatcactggtgttgaactctagttcacctgattgtatttcacaggagatgaacctggaggcacctccagcattgggaggtggatgtgcagcccccatgctaggagattcgatggaaaaggctccaagctcaccttggatgcctttctccatgctgtttgcagcgatctctaccaaagtgtctcctgagaatatggacgtgattattggttgctatgaagagtttaagagcaagaaaataagccgaggtgaactagtgaagaagctgaggcatgtagttggtgatagagtgctaatatcgacgataatgcgtctccaagataagttacctccagtggataagcgtgaggaaccagacacatcggcgtccaaggtggtggcggaaccatgagatgggtgtcaggaggtgggcgaggaatgcagaaagggaggaaccagccgacttgacatagaaaaccctgtgggaagcagcaactatgaagcctcttgcatcagtcttgtgcatggaggctgctgtttgttctctgtatcgtaggtgtctacgtttgcgaggaaattgtatccggtgtttctctttcttcaaattaaaccacgcacatgcagctgccgtactttttggaccattgaagtgtttcgtccgtgaaaaaggctccttttaccttcccgtttgccttcctaagagcatct

SEQ ID NO: 130615 - DNA, 2752 bp, Zea Mays
aatgcaagtggggtcacggcaaaggtgtggcgcgtgcgtggacctcgccctcatctcgtctcctccggcggtccggcctgtccaataattctagtattccaccgccgcacacctcctgtcttccttcaccttcgcgctccgccgccgccgtcgattcgtgctgctctcacccctaacctgtccaacatcgccggggagggaagcagcagaagaagctccccttacctccggctatcgcctgaggataaagtggggtctgtaggggagtcttaggggggagcaaaagggataggatagggagagatgaagcaatcaatttcttcgtccgccttcgcccctgcttacgtccccgctactaaccctaggatcattctgtcttttctcgtttcttatccgactcttcttcgttttatgcctatcagttatgaggttgaacgccttcagaagcttctctactagattagtgtaaatagtagacttgttcgagtttagcttggctggaagaattagtctctggtccgtgtttatatctgctagcaataatggctgcgatgaacggagaggtattgggtgaatgtggaaggaacataaatagtctcaagagaaagcgggagagccccgctgcatatgctgctggcgtattctgcacctctgaattgcatcagcatactgtcaatgattctgctgttaggtttcatcttgataaagaccgtaaggcaaagatcgtgtgccacttcaacaagcaggttttgcagagctataagaaattcatgagtagtgcaccacctaagcgtattttgcttcgccaaggtgctgtctggaaagactttccagaaaagattgtcaaattggcccaagctgacttcagggcaaaaaagatgatcacagaaacaggatatcagaaccagctatttttgctggattttgcccatatgacattcatagacacaaagacaggttttcagaggccaattgcttggatcgatgaaaatgaaaagtgctacttcccggaatcatttatacaagatcagaagttatttatgaagaaagattttggcaacggaaatcatgagtacattagtgaagagcgaaatgggacacgagaaacgaatcaccagtttggagcatcagaaagttctgctgaaagctcaaactttgagtcaagtattggagatgtttctagtcctaagagagctagggctgaaaagaatttcattgtaaaaaaatattgtgatatgggagaagctattggagaaaatgagtcatgcactttgttgcctacagcctgtaacctactaccacaccaagctaatctgggtgaggtatcccgtgctcagcgcactattgaagccgtggagaagctgttgctgcaggggatgggttcagttattgaatccaaggacattattggaatctacaggactccattattggatgaccacggacaagtccgttaccatattcaccaaaagcaagtacaggttaccggatgtcatcgtggaaacgcaaatgtccgttatgcatggcttccttgctccaaaagcactgtgcatgtaatgatgctgaatggtgttttgcaagttgataagcctcccaataagtgtgcagcctatggagagggcactctccttacaccagcaaatcgttcggatgcctgtgtgaaatactctgatgttgatgaaaatggcattgtccgtatgatgttgtgccgtgtaataatggggaacgtagaaatagttcaccctggatctaagcagtgccaacctagtaataagtattttgatagtggagtagacgaccttaaaaatccacggcattacgttgtgtgggatatgaatctgaatagtcatatctattctgagtttgtagtcactgtcaaattgccttctaaaaccaaagattcctttgtatcgcaagaaaactgtcagaattcgtctgatctatcactggtgttgaactctagttcacctgattgtatttcacaggagatgaacctggaggcacctccagcattgggaggtggatgtgcagcccccatgctaggagattcgatggaaaaggctccaagctcaccttggatgcctttctccatgctgtttgcagcgatctctaccaaagtgtctcctgagaatatggacgtgattattggttgctatgaagagtttaaggtctggtacacttttttcatcttttgacctgaagtcaccttcccttgtgtggtatccaaaatcacttgtagactgtatttgccagagcaagaaaataagccgaggtgaactagtgaagaagctgaggcatgtagttggtgatagagtgctaatatcgacgataatgcgtctccaagataaggtgtgaattgttctgcttgaaccttgctgatacagttatcttggattctttttggaagactgaaatccttttagccgtaaggtgtgtcagctggtggggttctgggatggaccgccagtccgccacgcaccgaacttctgaaggcctatatcttttgctgtgaacaagctacttttcaagagcatcagaacagcagtggtttgataacctgattctttttacactgttttctgaggaaatgcttcttttgtgtgtgtctatttggcagcagttacctccagtggataagcgtgaggaaccagacacatcggcgtccaaggtggtggcggaaccatgagatgggtgtcaggaggtgggcgaggaatgcagaaagggaggaaccagccgacttgacatagaaaac

SEQ ID NO: 130616 - DNA, 810 bp, Zea Mays
acaagatagtactgtaacactagagacaactgttgctaacttgatatacagaagagttccactgttggagcagcaagagtgcagtaattcagattctgtgatttgactcaataattgacatgattgcattattgagattataacttggagctgattatattcgttatctatgatagaaacctccaaatatgataagtttccctgtgaaaccatgctattttagccacgctggagttggttaaagcaccagttaacaacttccttttatgcataaaacaggagatgaacctggaggcacctccagcattgggaggtggatgtgcagcccccatgctaggagattcgatggaaaaggctccaagctcaccttggatgcctttctccatgctgtttgcagcgatctctaccaaagtgtctcctgagaatatggacgtgattattggttgctatgaagagtttaaggtctggtacacttttttcatcttttgacctgaagtcaccttcccttgtgtggtatccaaaatcacttgtagactgtatttgccagagcaagaaaataagccgaggtgaactagtgaagaagctgaggcatgtagttggtgatagagtgctaatatcgacgataatgcgtctccaagataaggtgtgaattgttctgcttgaaccttgctgatacagttatcttggattctttttggaagactgaaatccttttagccgtaaggtgtgtcagctggtggggttctgggatggaccgccagtccgccacgcaccgaacttctgaaggcctatatcttttgctgtgaacaa

SEQ ID NO: 130617 - DNA, 680 bp, Zea Mays
tacagcaaatgccttctggacgggaaccttttgcaaacgaaaattcacaatattggagcaacacttgtaggagttgacaagtttggaaacaaatactatgagaaactacatgacactcagtacggaaggcataggtgggtagaatatgcagagaaaggtcgctacaatgcatcccaagtgcctcctgaatggcatggatggctgcaccacatcacagatagcactggggataagctgctgaaccagaagactgctaggtaccttgtagagcacaagcagaactactccggtgagggtgaagagctgatctaccactccaaggggcatgctttgaatccgggacaaagggactggacgaggtatcagccctgggagccaaagaaagagcaagcctagctattgagtacattgtggggaagctactgaaatgtttgcatggcgttgggtcaggtatcaccgagctgaatggactctgagttatgtttgaactgggcccaaataatgttgtcctgaatatcaatatcatctttggacatgaagtgttgttgttactgctgtaaaaacagctttggggaaaatctcatgcatttgttactaccttcggttatatttgaaagtatacgagagattatatatctttttatctggttgggggagctgtctacccagctgttgagtgt

SEQ ID NO: 130618 - DNA, 366 bp, Zea Mays
atgaggttgttcttcgaagatgctaattcccctcaagcatcacatgaaaatgaaatatttgctaaatatgttgaggattcagttcgcaaagctttcttgcacgctaaccttgctcttgctgatgattcagtcatcaaccattcttctggtaccacagtactgtcattcttctggtaccacaacgctgacattattgatccatgggagcaagcaaatgttgaggattatcgtacagtctcgtgtagaaaaggaataccagtggatatgtcaaaggatcaaaggccgacatatgatgcagagcatcaaagggccattgagtgtggtggatacatgaagatggctacctcaacggggtactgtctgtga

SEQ ID NO: 130619 - DNA, 702 bp, Zea Mays
gagtgagctttggctttcatcagtgcctcacacatctttgttgcttctgccagttctaccatggtcagacggtgtccggggtctcgtcatttccaggacaacaaggagaccaacatggcctagagaagttgaagccttagcaagacagtttctacaaaatccttacaagccctcctcgctagctttgcgtctggtccagattagccgcctctagctccctccccaaatcgccccacccaccgtcatcctcaccagcgtcgcgtctcgtgaaagatggtgctgcaatctgaaggacatggattagatgggtgccacacgctgcttttatatggatctaatgattgtggccttgaacactctcgccagacatgtctcgtgtttttacatggattagatgagtacatggatctttatttaatcctaaggtaattgagattgcgaagaagatgaaagaggagagggtcaggttgcttgcttcagaatattttgcttacatctgatatgactagatcaaatcagttgcattgtgacatgttggtaggatgtcagtttcccttttaacttgactcttgtttgcctcttgtgtaatatccctaagatgaacattttggtaatctgggtgctcattcaattggttgatttgatcttcaagtatttaatcgagtatttaatctaggtgctcatataagtggttgattttca

SEQ ID NO: 130620 - DNA, 226 bp, Zea Mays
ggtggtgcacctaagggtccacaaatacgggaccttagaggaggagttgaaattgtcattgcaactcctggccggttgattgatatgctggaagctggtcacacaaacctacgtaaagtgacataccttgtgttggatgaggcggaccggatgctagatatggggtttgagccctaaattcagaaaatagtagcacatatccgcccagacaggcaaaccttgtact

SEQ ID NO: 130621 - DNA, 316 bp, Zea Mays
ttcatgtggtggtgttgataatgcactcatcaagggggagattgtgaacacaaggttgacttgtcccttatggtttcggttgatgatgagtgattatcaatgggtagcgtcttgggtcgagtcgtggactaaccaaggagtgagttattatgtatgtgcaaccatatcggtcggcttgtgatgtgtaggtgtggagcacagatactatggtcgacagctaaggtgaaggtcatgcaggctcgtgctgatggaccgggagcggtgaaggacgagtgatgggtcttggttgacggaccgaagcagccaggtgactagc

SEQ ID NO: 130622 - DNA, 225 bp, Zea Mays
atggatttaggttatgggaggcacgtggagctcgagcgtgtcttttgtcctcatgcacactctgatggaaagaaaaatggttctagatgctctttttggagatgggaggaggactacttggacatgattagcaagatgcagaagaaacaagaagggttggaggatgaaacaaagaaggattacagattcaggaagggtgaacaagatttggagatgtctgtttag

SEQ ID NO: 130623 - DNA, 2618 bp, Zea Mays
cctggtgaattgatgaagaggctgttgttagagtccgggtcgaggaggaggagctggctggcgacggcgtccgcgagtaagtccacgatctcgttgccgaggaagactatgcgctcccggaagaggaggcccataacgtcgccggcgccggcgccggcaccaccgcccgcggcatccgactccgctcgtcacagcggtgcgtgcggtgtcagtgaggcgcaaggcttgaggctgagtgccccttgctgcgcccactgggagggagcccaagcgcgagcgcatggccgcttgacacgcagagcggctgctcttcccgccgcgacggagagggacgcggtggcactggaacttccggccgccatatatgtaccgaatgggactgagccgaactgctctgcagtagcggccggcggcggtgttccccaccagagagaagggagcagagccgaggagaggaaatggataacacacaacatacctttcagagttttgatgagttttcccttgagacagcatgactgcaggcgggaaagaggaccttgcgttgcgtgggcctggtcttatgtggactgggccgtcattctctttgggcctaaaaatatagtcttggactcttggtccacttaagcgcgagcagatatgttagcacttagcagcattctttggtccaacaagtcgagagaagcgggccgtacgccaccacggcaacggagaagaggactttcagctgcggcggctggccggcgcggcgacggggatgggggatgggcgcacaggcggcgccaaccgtccggcgtggctgcagcagtacgaactgattggcaagattggggaggggacctatggcctcgtcttcctcgcgcgccttaagccgccccacccggcacctggccgacgcggcccccctatcgccataaagaagtttaagcagtcaaaggagggggacggagtatcacccaccgcaattagagagatcatgctcctgcgcgagatcaaccacgagaatgtcgtcaagctcgtcaatgtgcacatcaaccacgctgacatgtccctatacctcgcattcgattacgcagagcacgacctctatgagattatcaggcatcacagggagaagctgagttcctccattaacccatacactgtcaaatccttgctgtggcaactgctcaacggcctcaactatcttcacagtaactggattatacatcgagatctaaagccttccaacatactggtcatgggagaaggagatgaacatggaattataaagatagccgattttggacttgctaggatatatcaagctccactgaaaccattatgtgataatggggttgttgtaactatctggtatcgtgctcctgagctgttacttggggggaaacactacaccagtgctgtcgatatgtgggcagttggttgcatttttgctgaactgcttacactgaaacctctattccaaggtgtggaagcaaaaaatcctccgaacccattccagcttgatcaactcgacaagatttttaaggtcttaggccaccctacagttgaaaagtggcctacccttgccaatcttccatggtggcaaaacgaccaccaacacattcaaggacataagtatgagaacccaggtttccataacattgttcatttaccaccaaagagtcctgcatttgatcttctctcaaaaatgcttgagtatgatccccgaaagcgtataacagctgcacaagctttggagcatgagaccttagtaaccaggttcccggatcgatgggatcgaggaacgggaacgtggtacgcgatactttcggatggacccactacctggacgaaacgcgcttttaccatcccagccaggggagaaaattgtacagtatcctattcgtccagtagatactacaacagattttgaaggaacaacaagccttcaaccaactcaaccgccatcagggaacgctcctcctggaggtcaatctgtagcaagacccatgccacgacaaatgccgcagcaacctatggttggggggattccaagagtggcaggtggagtaaccatggctgccttcaacgctgcctcacaggctggcatggctgggctaaatcctggtaacatgcctatgcagagaggcgcaggtggtcagtctcatccgcaccagttgagaaggaaggcggatcaagggatggggatgcagaaccctgggtatcctcagcagaagagacgattctgacgctatcaagatggagccatctgctgtatatcaggtgtttgaaacacgttgcctgtgtaagctgctgtagttttgttatcagcatccgaatgccaatgctggcacctgtaaaacacattaatcagtcgagagtccagataccagttgtccttatgggttatgatctaagctgctcgaatttggctgatttggtttgcaacagaaaggtcttgcttttgctcatggcccagtggaattatccacatgcgtaggaaatttagcatctatttggcttgagaaaagattttcattaaattctagtggcagtaaatatttttatggccacaaactacacagaattgagcagttgagcttgtgttgattttgatttttgatagggacatgcaa

SEQ ID NO: 130624 - DNA, 2560 bp, Zea Mays
cctggtgaattgatgaagaggctgttgttagagtccgggtcgaggaggaggagctggctggcgacggcgtccgcgagtaagtccacgatctcgttgccgaggaagactatgcgctcccggaagaggaggcccataacgtcgccggcgccggcgccggcaccaccgcccgcggcatccgactccgctcgtcacagcggtgcgtgcggtgtcagtgaggcgcaaggcttgaggctgagtgccccttgctgcgcccactgggagggagcccaagcgcgagcgcatggccgcttgacacgcagagcggctgctcttcccgccgcgacggagagggacgcggtggcactggaacttccggccgccatatatgtaccgaatgggactgagccgaactgctctgcagtagcggccggcggcggtgttccccaccagagagaagggagcagagccgaggagaggaaatggataacacacaacatacctttcagagttttgatgagttttcccttgagacagcatgactgcaggcgggaaagaggaccttgcgttgcgtgggcctggtcttatgtggactgggccgtcattctctttgggcctaaaaatatagtcttggactcttggtccacttaagcgcgagcagatatgttagcacttagcagcattctttggtccaacaagtcgagagaagcgggccgtacgccaccacggcaacggagaagaggactttcagctgcggcggctggccggcgcggcgacggggatgggggatgggcgcacaggcggcgccaaccgtccggcgtggctgcagcagtacgaactgattggcaagattggggaggggacctatggcctcgtcttcctcgcgcgccttaagccgccccacccggcacctggccgacgcggcccccctatcgccataaagaagtttaagcagtcaaaggagggggacggagtatcacccaccgcaattagagagatcatgctcctgcgcgagatcaaccacgagaatgtcgtcaagctcgtcaatgtgcacatcaaccacgctgacatgtccctatacctcgcattcgattacgcagagcacgacctctatgagattatcaggcatcacagggagaagctgagttcctccattaacccatacactgtcaaatccttgctgtggcaactgctcaacggcctcaactatcttcacagtaactggattatacatcgagatctaaagccttccaacatactggtcatgggagaaggagatgaacatggaattataaagatagccgattttggacttgctaggatatatcaagctccactgaaaccattatgtgataatggggttgttgtaactatctggtatcgtgctcctgagctgttacttggggggaaacactacaccagtgctgtcgatatgtgggcagttggttgcatttttgctgaactgcttacactgaaacctctattccaaggtgtggaagcaaaaaatcctccgaacccattccagcttgatcaactcgacaagatttttaaggtcttaggccaccctacagttgaaaagtggcctacccttgccaatcttccatggtggcaaaacgaccaccaacacattcaaggacataagtatgagaacccaggtttccataacattgttcatttaccaccaaagagtcctgcatttgatcttctctcaaaaatgcttgagtatgatccccgaaagcgtataacagctgcacaagctttggagcatgaatactttcggatggacccactacctggacgaaacgcgcttttaccatcccagccaggggagaaaattgtacagtatcctattcgtccagtagatactacaacagattttgaaggaacaacaagccttcaaccaactcaaccgccatcagggaacgctcctcctggaggtcaatctgtagcaagacccatgccacgacaaatgccgcagcaacctatggttggggggattccaagagtggcaggtggagtaaccatggctgccttcaacgctgcctcacaggctggcatggctgggctaaatcctggtaacatgcctatgcagagaggcgcaggtggtcagtctcatccgcaccagttgagaaggaaggcggatcaagggatggggatgcagaaccctgggtatcctcagcagaagagacgattctgacgctatcaagatggagccatctgctgtatatcaggtgtttgaaacacgttgcctgtgtaagctgctgtagttttgttatcagcatccgaatgccaatgctggcacctgtaaaacacattaatcagtcgagagtccagataccagttgtccttatgggttatgatctaagctgctcgaatttggctgatttggtttgcaacagaaaggtcttgcttttgctcatggcccagtggaattatccacatgcgtaggaaatttagcatctatttggcttgagaaaagattttcattaaattctagtggcagtaaatatttttatggccacaaactacacagaattgagcagttgagcttgtgttgattttgatttttgatagggacatgcaa

SEQ ID NO: 130625 - DNA, 345 bp, Zea Mays
atgaagaagaggcagtcctatcagtcgtcgtcggtggccatggcgatggctatcgttagttcctcctcccccaccaaccctcccgcttcgggaccttggccctcatggtcgcctcctctctcttgggtgcgtctcctcttgcggcgtcgatggctgttctcgatgtggggagtgggcggattcgaggcaagagccatagtgcggcatggaggggggggggggggagctcggatagcggtggcgactggcgacgactgcggagatgcgggcacggatgacgggatgaggacgagcggtcggtggtctcgagagggcgaggatcgagagtggggttgtgaattgtga

SEQ ID NO: 130626 - DNA, 516 bp, Zea Mays
ggcacaaagaagtcccaaagttgaaccaaaagcactgaaattcagttttcaatctgccacactaagtctgaaaatccaaacctgtcatccccactttggactagttttactcctaattccatatggctttaaggttaagtaacttaaacaagtttgtacatctaagatagccctacaactgtgctacagtgaccagcacaaaaatgcctataaatcaaaagttacaacagcccaaagttagctaattgacatttttttctataaaacttggacatctccactcatgaaagttgttcaacttgccaagacctaccactttggtatatggactttcagcaacttctctctcgattttgatttctactttttgggctagtttaggttttcaattgaaattttggacctagtaaaatgcatttaaggtgtatcaaacaaaatgatgctgatgcatatgatgacatgtcaaggttttagttctagtaacaccagggatgttacacagggcagctggagctg

SEQ ID NO: 130627 - DNA, 1031 bp, Zea Mays
gtggcttgcgcataccgcacatgtttccttcctcactgttcggtcctcccgcccctcccacggcctcacctctcctcgccgacggaatcgaaagcaggggcttctgattggtcgtactcatggcaatgttggtgcctgatcttagtttctcggcatcgatctctagtgtgaagctcccaaggtacggggcatcaaagagtgagacattctttgttaagaagcccccaacattccgtgcagaagctaggccagcggaatctggcaaatatggtactaataatggccgggcaacaaagatggtaccaacaactgagttcaggaggaccagtggtggtcttgtaagatcagggacagttaatggttctccaaatagcgctgtcaatggctcgaccaaggtgttgattaatggttctgcaaatgccattgacaatagctcaaccaaagcagtcattaacggtacgccgaaggtggctgtaaatggtactagtctggtgaaaagcagcaagacttctcttgttaagacgcagaagcaagtgagacccaaagatgacccctttcaagaggaattgaaggttttgccttctgatgagggattcagctgggcaaaagataattacaattctgtgcagaggagcatagatatatggtcttttgtgctttctcttcgagtccgcgtgctatttgacaatgcaaaatgggcatatcctggtggattctcggaagaaaagcagaaagttcgaaggcggaaaactgcttcatggctaagagagcaagtattacagcttggcccaacgtttattaagctcgggcagttatcctccactagatctgatttatttcccagagaatttgtggacgagcttgcgaaactgcaggacagagtacctgctttttctcctgagaaggcaaaagctttcatagagaaagaaatgggttgttccattgatgttgtgtacaaagaatttgaggaacgcccaatagctgctgccagtcttggtcagcgtttgaaggaattgtatgattctctctaa

SEQ ID NO: 130628 - DNA, 1485 bp, Zea Mays
atgggcggcgcctactgccgccgccgctcgccgctcgagcagcaactcctcccggcagtgctggtgctgctcgtcatcgtcgccgccagcagcagcttctggggtgtggccgccaaggagacgggccggaatgtgatcacgcacatcaaggggttccgaggcccgctgcctttccatctcgagacagggtacgtggaggtggacgacgagaacggagcgcgtctcttctactacttcatcgagtcggagaggaacccggcggaggacccgctcatcctctggatcaccggcggccccggatgctccgcactctctggactcctcttcgagatcggccccctcaagttcgatgtggcggggtacacggaagggacgttcccgcgtttggtctacttcgaggattcgtggaccaaggtgagcaacatcatcttcctggactcgccggtgggtacaggcttctcctactcgcgggaggaggccggcctcaacgtcagcctgacggaatccgggcggcagcaccatgtcttcctccgcaagtggctggcggagcaccccgagttcgcgtcccaaccgctctacatcggcggcgactcctactccggctacactgtgccggtgacagcgatggacatcgctaccagcagcaggtcgagggacgacgatgatggttatccgaagccgaacctggtgggctacctggtgggcaaccccggcacggacgaccggtacgactcggggggcaaggtgccgttcatgcacggcatggggctcatctccgacgagctgtacgaggccgccaggctgggctgcggcggcgacttctacaagactccggacctcacaaacacgcgctgcgccagcgcgatgattgctatctacatggtgaccgtcggcgtgaaccccatgcacatccttgagcctttctgcgggccgcaggggccgggggtccggagcatcttccaggacaacggcagcaggcggtcgatgctggtgcaggacgatgtcccccacccgggattcttcaccaaacagccggtggagtgcaggaacaacgggtaccggctgtccaacatctgggcggacgacccggaggtgagggatgcgctaggcattcacaaggcttccatcggctcgtggagtcgatgcaccatgctgccgtactacaggcacgacgtcagcaccgccatcccctaccatgtcaacctcaccaaggcagggtacagggcgctcgtctacagcggcgatcatgacctgggcatgaccttcgtgggcactcaagagtggatcagaaggatcggctaccccatcgtcagcgattggagaccatggttcgtcaaccgacaggtcgcagggttcacaaggacatacgcccacaacctcacattcgccacagtgaagggaggagggcacacagctccggagtacaggccgaaagagtgcctggccatgttggatcgatggacatcgtcagcagctggccagctc

SEQ ID NO: 130629 - DNA, 1738 bp, Zea Mays
aaagaattcggtgctgctagggtactgcgcccctgaactgaacgagccttgttccttccgaatccctccgagaaaaggcggctccaaaaaccagatctcctcagcaaaatctgtacaagatccgcccttgatttggataacacgagcgaacgtgtggtgggccgtcgagtgaaacaagattcgccatgcggcggaacaggaaggattccggctatccgacggcggctccaggggaggaggatgaggcggaggaactgactgaggagggcgacgaggaagaggaggaacagacggaggagggatgtggtgaggaggatgaagttgaagcggagacgccggcgcaggaagctgtggagccgccgaagctggctgagggctacttcgagatcgaggccatccgccgccgccgcctccgcaagggccagctccagtacctcgtcaagtggcgtgggtggccagagagtgctaacacatgggaaccccttgaaaacctgaaggcctgttctgacattgttgatgctttcaataagcggtcaaggtcgcccagatcctgtggaaagcgaaagcgcaagactccaacaactccaacatccgatcctaacccttctcgtggcaaacgtggtcgaccacctcggtcggaggcccggagcatgcatagcatacatgcctcagaagtgaagaaactgccctgcaggacaagtagtaggagagcaaataataatagtaacaagacctcacctgggggccttggcgcagcagtgaatttgcttgggcaaagaatagtacaggagggtagttctggtgtggtctcagttgggtttccatctcaagaggctcccttatctgttagcttgactgatcaacaagatgcgcagcaccctgctaatggttcattgaagatggacaatgaaatacgagcaatcacacctcagggtggacaggtgacaggtgctaagaagcgcaagtctggatgtgtaagaaggtttaagcaggatgaagtaacacatgagcaaggagatatccgtgatcgaacaagtgacaagccaggcaacgagactgttgattccacagaaggagatcctggtgataagaacaaaggggaggactctggtaaccaaattcatatgcctaagatcattaagatcattaagccagtgcgctattttgccacagttatggatggtgtgcagcaagttgcaataacattcaaggctctcaggtctgacggggaaatggtattcgtggacgataagcagttgaaagctaaggagcccctggtgcttattgattactatgagcaacaccttcgctacaaccccacctcgtgataaggatgcattgacgctgctgggtttcagttgcatgtgctgcacctatgtttggaacaaatggaaatgtatttaaatgtagcattttttgtgctagatgcatttgtagtattatttgagtaagtagataattagtaagtagccaatgctgagtgcaagtgaaacatgatagcatggtttgtcaaactaactgctcgatattgttactgttttcaaattgtcttattaatcgtgataatcatgattaatcgttcaagtcgatttggaccaatagtgattaatcgtcaaagtcatccgattaatggtgattaatcatgattaatcgtacaaatcggttagctagaatgactagcaagttgtacgacttcaaaacattattgcgtgtattatatgctaagttagttgcttca

SEQ ID NO: 130630 - DNA, 1579 bp, Zea Mays
actgaagtaatttctattcgcactatgattttgaacacaactattccattctcttgttaaatagagtgcgtgttgcagcatttgcaatttggtggccaactttggtaggcattgagtcatgtattcgtcttactttatgtttgtttcattaaatagattcatcgtataatttgtggttgctctttttttttctttgatggagaactatgggtttgaaagctgaatgttgtttatagcttgtttactgcatttatgttactgctgatactgtattcctatcaatttgatgtgatttataaggcgtgggtggccagagagtgctaacacatgggaaccccttgaaaacctgaaggcctgttctgacattgttgatgctttcaataagcggtcaaggtcgcccagatcctgtggaaagcgaaagcgcaagactccaacaactccaacatccgatcctaacccttctcgtggcaaacgtggtcgaccacctcggtcggaggcccggagcatgcatagcatacatgcctcagaagtgaagaaactgccctgcaggacaagtagtaggagagcaaataataatagtaacaagacctcacctgggggccttggcgcagcagtgaatttgcttgggcaaagaatagtacaggagggtagttctggtgtggtctcagttgggtttccatctcaagaggctcccttatctgttagcttgactgatcaacaagatgcgcagcaccctgctaatggttcattgaagatggacaatgaaatacgagcaatcacacctcagggtggacaggtgacaggtgctaagaagcgcaagtctggatgtgtaagaaggtttaagcaggatgaagtaacacatgagcaaggagatatccgtgatcgaacaagtgacaagccaggcaacgagactgttgattccacagaaggagatcctggtgataagaacaaaggggaggactctggtaaccaaattcatatgcctaagatcattaagatcattaagccagtgcgctattttgccacagttatggatggtgtgcagcaagttgcaataacattcaaggctctcaggtctgacggggaaatggtattcgtggacgataagcagttgaaagctaaggagcccctggtgcttattgattactatgagcaacaccttcgctacaaccccacctcgtgataaggatgcattgacgctgctgggtttcagttgcatgtgctgcacctatgtttggaacaaatggaaatgtatttaaatgtagcattttttgtgctagatgcatttgtagtattatttgagtaagtagataattagtaagtagccaatgctgagtgcaagtgaaacatgatagcatggtttgtcaaactaactgctcgatattgttactgttttcaaattgtcttattaatcgtgataatcatgattaatcgttcaagtcgatttggaccaatagtgattaatcgtcaaagtcatccgattaatggtgattaatcatgattaatcgtacaaatcggttagctagaatgactagcaagttgtacgacttcaaaacattattgcgtgtattatatgcta

SEQ ID NO: 130631 - DNA, 132 bp, Zea Mays
atggcacctccctccctctctgctcgtgcgcaggaaacccctcacgcgcagggaagaacaacagtccaccctccaaaacaccaagcagcggcagcaacctccatggcacccctgcttccatcccatagctga

SEQ ID NO: 130632 - DNA, 741 bp, Zea Mays
atggaaatgaacaaattaatgaagaccttggttgtgaatcaatgggagatttcttatgtgataatgaagattcacgcaacaacgcagaaaagaagaggaaaggaaggtttggcccgtaaaaaggctgaatgtgagaaagtagctcttcaacaacgcataactgaattggagcagcaaatgcaagaggaaaggatggcaagggaattgcaagatgtggaactcatttcacataatggttcaaattcacgacagaatgggagccgaaggtatgaagagcatgatgtggaagcgcatcatgacgctcaatttgtagaagatgaagattgtgcagaaaatcacatcaatcatcactgtgatgatggtgagcaacaccatcaaaacgatcctgttggtgcagccccgacagtgcaacaccatcaaagcagtcctgttggtgcagccccgacagttggaaaggatgtaatattatatgccattattggacctgagcaacctgtggctgagggaacaattatttcaactaatcctaacactttgctgggaggtgtgcctcttggaaaagaatattgtgaagttattgtgaacattgtattgaaaagggatgcaattttgccttgcccttatggttatgtagagacgatggctgatgctcatcaaatgtcagttgcttggctttataagaggatgaagattagcaaggcatcaggatcaccccaaggtattagaggtggatggcactag

SEQ ID NO: 130633 - DNA, 1265 bp, Zea Mays
aaagatcgagcttttaatttgctttgttcacgaattgttgtttttgcatgcaccatggacgacgacctgaaacatctgagggtcagcttctctggggtgaggcagggcggcgagacagtaccactaccatcacagcgaaggacgagttcacgcagaggctctcgcatttctgttttagcgagtgatgcggcagaggagtacgacgcggcgtacgcggccacggtggcagcagtcgcctacgccatcgccgcgcgagaggagaggctgtcagcgtctcaagagagcacgccgtatgctgccgcggacaggcttgcgcgtggaaacaagcagtccagcaagtcagcacgcacaaccaagagaggcgagagcctggagaagccaaatttcgaaggcagaaggtcctcttcctcgagatggttcactggcaaagagcccatagacgatgactaccaagatgaacaggctaacgtgtcagtgaaacggccactaagaccggctcagaagaagccagcaccagcagagggtgcggcctcagacgaaaggctccctgctctcgctgatcctgcactacgcgtaaggaaggacttcagtttcacccggaaaccgtcagagaagagaggaagtaggcgattcgagcaagatcaggggaaccagacaacagcgccgccgccgccgccgccaacggcacggccatcggacaaggcgtcgagctcgtattcggcggccggtagtagggacagcggagctgccaccacgtccggtggaccaatggcgttctccagcgaaaacgaagccatggcagatgcgtgggagaaggagaagctggcgagaatcaagaggaagtacaacgagacgatgcagacgattgctgcatgggaggccgagaagaaggccaatgccaggcgccaaaagcagctgaaagatgagagtgagtcggagaggaagcgtgccaaggcgctggaggagtacaccgaggagatgtcgaggatcaacaaggtggccgctgcgtcgaggctgacggcggaggagaagaagaggagtgccgagaggaaggccagggacaaggcgcacacaataaggtccacggggaagcttcccggggcatgtgggtgtttctaatgaaaccgcacgcgcacccgtccatgatgagtcgacgtgcatgattgtgtgtgtgtgtataggcctcgatctcgatcaacacatggatccatttggtactaaatcgaaagggaacgacatgaatatttgagcatagacgtgagggc

SEQ ID NO: 130634 - DNA, 1244 bp, Zea Mays
aaagatcgagcttttaatttgctttgttcacgaattgttgtttttgcatgcaccatggacgacgacctgaaacatctgagggtcagcttctctggggtgaggcagggcggcgagacagtaccactaccatcacagcgaaggacgagttcacgcagagcgagtgatgcggcagaggagtacgacgcggcgtacgcggccacggtggcagcagtcgcctacgccatcgccgcgcgagaggagaggctgtcagcgtctcaagagagcacgccgtatgctgccgcggacaggcttgcgcgtggaaacaagcagtccagcaagtcagcacgcacaaccaagagaggcgagagcctggagaagccaaatttcgaaggcagaaggtcctcttcctcgagatggttcactggcaaagagcccatagacgatgactaccaagatgaacaggctaacgtgtcagtgaaacggccactaagaccggctcagaagaagccagcaccagcagagggtgcggcctcagacgaaaggctccctgctctcgctgatcctgcactacgcgtaaggaaggacttcagtttcacccggaaaccgtcagagaagagaggaagtaggcgattcgagcaagatcaggggaaccagacaacagcgccgccgccgccgccgccaacggcacggccatcggacaaggcgtcgagctcgtattcggcggccggtagtagggacagcggagctgccaccacgtccggtggaccaatggcgttctccagcgaaaacgaagccatggcagatgcgtgggagaaggagaagctggcgagaatcaagaggaagtacaacgagacgatgcagacgattgctgcatgggaggccgagaagaaggccaatgccaggcgccaaaagcagctgaaagatgagagtgagtcggagaggaagcgtgccaaggcgctggaggagtacaccgaggagatgtcgaggatcaacaaggtggccgctgcgtcgaggctgacggcggaggagaagaagaggagtgccgagaggaaggccagggacaaggcgcacacaataaggtccacggggaagcttcccggggcatgtgggtgtttctaatgaaaccgcacgcgcacccgtccatgatgagtcgacgtgcatgattgtgtgtgtgtgtataggcctcgatctcgatcaacacatggatccatttggtactaaatcgaaagggaacgacatgaatatttgagcatagacgtgagggc

SEQ ID NO: 130635 - DNA, 150 bp, Zea Mays
atgaagaacaccagcagagcgaagaggcatatcagggcacacacaaggaaaaggccccaaaagcttccgaggccaagcctggttgctcccacttcgctgtcatctgaggagcaactagaccgtgagaaccactcgtcgtggatcctctga

SEQ ID NO: 130636 - DNA, 810 bp, Zea Mays
atggcggcgaggccggtcgctctggctctgccgctgctggccctcgtctgcgccctggcagcgtcggccgacgcgacgcagttcagggtgggcgggcagagtgggtggagcgtgccgggcgccggctccgagccctacaacacctgggcggggcgactccggttccagatcggcgaccagctgctgttcgtgtaccccaaggagacggactccgtgctcctggtggacgccgccgcctacaacgcctgcaacacctcgtcctacgtctccaggttcgacgacggcagcacggtgttcacgttcgaccgctcgggggccttcttcttcgtcagcggcaacgaggccagctgccgtgccaacgagaagctcatcgtcgtcgtcctcgccgaccgctccggcagccgcaccccgacgccatcatccgcgccgctgccgagcccgccctcgcctcctgctgctgcccccgcacctgcgacgagcccatcctcgtcgccaccctcgtccgctgctcccgcagccacccccacctcgccgacgtccccagctttagctccggcgcctgcccccacgacaacccctagctcgccaccggcgcccgttcccacgacaactcctagctcgccaccggcgccgactccgacaacaccagcaggaggaggctccccaccgccaaccgcttccgccagcgcgccggccgctgagggcggcagctccacaacgccgccacagccttccacggctgcccccgttgtcgcgggcttcgtcggctcgctcggcgccttcatcggtttcgccatgcttgccgcatga

SEQ ID NO: 130637 - DNA, 105 bp, Zea Mays
ctattctatttctccaaattcatggattcaaataaacttaagtttctggcttgaacttcaaattctaaatatcaaacacaacccaaatgaggatataacttctac

SEQ ID NO: 130638 - DNA, 642 bp, Zea Mays
ggaaaaccctagccactttcctcctggccgcacagcacttcggccgccagagagtatggcttctggctgcacaacactacctcctctctcattctctgttttcttggttctagctgagggctacctctcatccttcttcttttttctttttattgccagaagttttgtgtctcctggccggccacacaaaaacattggcgtgtcttttggtcggcaacattatttatttatttatttattaatttttactagcctcaggcaaccatggcgggatctactcctctcatttttttaattccccaacgagcagctcattttggtgagctcggcctctggcttttgcttgtagccggcaccacaccggtcgacgaccgcctctgtggagacgcaaggactgggcaccgcagaccgtgccgccggtgagctcatccgctcgggcgggtgagctgccgtcggcagggtactgacggtggtccaagcttgtcgggccaggtaaaaaaatggagtcggtttcatgaccgtgtttaaaccttgaactcggatctagtcctcatgtactcgaatcccttactgtgatgaattaattatgagatagatctaatgtattattcgggatcaagttatgagttgacaaaacgtaga

SEQ ID NO: 130639 - DNA, 1001 bp, Zea Mays
aggagggatcgtgagaggtggcggcgaaggagatctgcagagagacaacgcgacgccggaacggaatggaggtgacgttcgcgacgccggggggacgggagttcaccctcgaggtgtggtacttcgcaacggtgcgggagatgaaggaggcagtccacgtgcgcgaaggcatccccgttgcttcgcagcgattcttcctggccgggcaggaggacgacggcctggagctggacgacgcgcgcgacaccgcgcactacggcatcgtccagggctcccgcgttctcctcctcctccgcgacgacgcgcctccctcggcctcgcccgcccctgccaccgccgtccacgtcaccgtctcggcccctgagatcgggctgtgcagcgtagccctcgacgacgtccccacctccgacaccgttgcccgcctcaaggagctcctccaggaccgcaccgacggcgcgctgtccatcgcgaggacggtccttttcctcggcaagacggagatggaggacggcaagacgctggcggaatacgaccctccggccgatggcatggacttgagcgccgttgtgcgccagcagcccctcgtggcgtcgggtggcggcgccgaggccaggagccagcaaagaatcgaggtgagcgtcatgtttggcgagacggtggtggcgttggaggtgggcgccacggacgttgtccgggacctgcggaaggaggtggagaggctgcatctccccgtccgcgacagcagcggcaacgaatacttcttcgtgtacaagcagaatgttatggatgaggaccgtacactgcggtggcatgaggttaagaacggcgacaccatcgagatattcaacggcaccgtcaccggcggtgcctgatgggatgcctttatcatgggtttaacgaagggtctagggtttattgcttcttcagcaatataatcgtgacttcagatttcagagctacattcgttttagggtggcgtctccagccgtgaccgagcaata

SEQ ID NO: 130640 - DNA, 555 bp, Zea Mays
atggattggagctgggacggctggcgaagggagcgagctggaagaggagaccggccaggaactcgcgagcaggatccaagccagccatggcgagaacagaggagtggacgcggtggctacctgggtgttcaatgccggcaaggcgagccagagccgcgtccaagcgcgagtagagcatgggcgatggccagaggcgagcgcacggctacagagagactcaaccggctggaaggagcagagggcgcggtaaccatgggaaggagacccgagcagggcaagcgcatggccatggagacgagggaggagctcagcgaactcgaagccgcgcgccggccagggagcagcagccggccatggaagaggaagctaggggaccgcggcgcgcaggggctccacggcgcacagatgccagggcgcgcggcgagcttgagagaggctggagagcgagctggggctgggatcgagcacggccaggaactgaggcacgcgttccacggtagaagcttcggctgggcgctcgacagtgggaagagaggatgggaatggctgatgtga

SEQ ID NO: 130641 - DNA, 102 bp, Zea Mays
gtgctcggtaaaactgttgaacggttgtgtgtgtgtctaatcgcagctagccgtcaatgtcattcgtcgcgcacgcgtgttcgatacaagaccggtcgggtg

SEQ ID NO: 130642 - DNA, 177 bp, Zea Mays
actgcacaattggattcttcagcagcagatggatctgttgaagtgtcgtgtgataaagccaccaaagagcagcagcaaacgagctcaaagttaaccactgatctcatcaagcttggtttttctcattgctatgtttccttctcccagcgaagctaagatgtttggacatttctagct

SEQ ID NO: 130643 - DNA, 2275 bp, Zea Mays
ggcgagagtactcatatgtagatgcatcgacgccgtcggcggcagtagtcggaaccctatgtaggaagaggcaggcgtcaggtgattatttatatcctcttgctctgcgacagaagaaaacctagatttgtatgggcctctttgcgctgcttgggcttttgtgggctgtttgcactgcttgggcttcgccaggtagaatagatggaaccgcaatttttggccgcggtgactcctcgccgccggcgcgctgtgctcccgtcatcaaaacacgatgccgccgcccccagccgtgccacacgacgtgggtgctgtcctccgcctcctggagtcccgcgaccttcccgccgccgcgcgcctcgccgccggctctgcttcctcctcgccgctcccgctcgccgcggtcctcctacaccgcccgctgcccccgcgcctcggctacagcctccacgcccgcgcagcgcgtgcgggcctcctcgcggaccgctaccttgctaacgcgctgctcgcgttctacgtccgcctcccggaccacctgcctcacgcgctcagggcgttcgacgacctgccccgccgcgacgtcgtcgcgcactcctccgtcctcgctgcattcctccgtgcgggtctcccgcgccgcgcgctcctccagctcaggaccatggcctccggcggctacggcgctgacgacgacgtcgcccccagcgcgcacgcgctttccgcctccgccaaggcgtgcgccgtgctgcacgacctccgcgcgggagcctgcgtgcacgggaccaccgttgtgcgagggtacggcgacgatggcgtcgtgctgagcgcgctcgtggacatgtacggccactcgggtgcgccgggcgacgcgcggaaggcgttcgaggaaatgcgcgcaccggatgggatatgctacacgtcgttgatatcagcattcgtgcggaacgactggttcgacgaggccctgcggtggtttcaggctatgctcaggacagatggggtttggccggacggctgcacatttggctctatgatgtcggcgcttgggaacatgaagagagcgaggcagggtagggaggcacacgcgcaggttgtgacacgtggcctgtgtgggaacgtcatcgtggagagcagcacacttgacatgtatgccaagtgtggtatgatggtggatgcacgcaaggtattcgacaggatgaaggctccgaatgcagtttcatggtgtgccctgcttggggggtattgtcaaactgggaagcatgagaaggttctctcgttgtttcgacagatgcatatgcaggagcaggacgatgactggtatagcttagggactcttctgcgatcttgtgctggtctgtctgcagtgaagctaggaaaagaaatccactgccgttctatgaggatgagaggatgcggagatgtcattgttgaatccgcactcgtggacctgtacgcaaaatgtggtgcagtagactatgcctacagagtattcaaaatgagcagtgtccgcaacatgattacttggaatgccatgatttgtggttgtgctcagaatggccatggtgagcgagccatcagcctgttcaatgagatggttagaggaggggtcaagccagactacatcagtttcattggtgttctttttgcttgtagccatactgggatggttgaagagggaaggaactacttcaactcaatgagcaaggactatggtattccccctggtattgaacattacaattgcattgttgacctcctcagtagagtggagcttctagaagaggctgaagatcttgtaaacaagtcacaatttagagatgattcatcactgtgggcagcaatacttggtgcctgtgccacacatactaacccagatgtagcagtaagggttgcaaagaagatgatggaattggagcctcaataccacctgagctatgttcttcttgaaaatgtgtataggacgattgggcattgggaagacgctgtaaaggtaaggaagctgatgaaatcaagaaaggtaaagaaagaacctggaacaagctggattaatgcaaacagaagcaaactatacatgtgtaatgctaagggggcagcctcagagcctgtagcttctgaggacttcaggaagtgcagttcattgactgatttagcttgtgattttggtatctgaaataatgcttataagtcatttctcaactgtactgacaaattttagcagctcttgtttcaaatctgttgcacaagccctccgcatatgttattctctcagggtaacttactt

SEQ ID NO: 130644 - DNA, 1893 bp, Zea Mays
atgccgccgcccccagccgtgccacacgacgtgggtgctgtcctccgcctcctggagtcccgcgaccttcccgccgccgcgcgcctcgccgccggctctgcttcctcctcgccgctcccgctcgccgcggtcctcctacaccgcccgctgcccccgcgcctcggctacagcctccacgcccgcgcagcgcgtgcgggcctcctcgcggaccgctaccttgctaacgcgctgctcgcgttctacgtccgcctcccggaccacctgcctcacgcgctcagggcgttcgacgacctgccccgccgcgacgtcgtcgcgcactcctccgtcctcgctgcattcctccgtgcgggtctcccgcgccgcgcgctcctccagctcaggaccatggcctccggcggctacggcgctgacgacgacgtcgcccccagcgcgcacgcgctttccgcctccgccaaggcgtgcgccgtgctgcacgacctccgcgcgggagcctgcgtgcacgggaccaccgttgtgcgagggtacggcgacgatggcgtcgtgctgagcgcgctcgtggacatgtacggccactcgggtgcgccgggcgacgcgcggaaggcgttcgaggaaatgcgcgcaccggatgggatatgctacacgtcgttgatatcagcattcgtgcggaacgactggttcgacgaggccctgcggtggtttcaggctatgctcaggacagatggggtttggccggacggctgcacatttggctctatgatgtcggcgcttgggaacatgaagagagcgaggcagggtagggaggcacacgcgcaggttgtgacacgtggcctgtgtgggaacgtcatcgtggagagcagcacacttgacatgtatgccaagtgtggtatgatggtggatgcacgcaaggtattcgacaggatgaaggctccgaatgcagtttcatggtgtgccctgcttggggggtattgtcaaactgggaagcatgagaaggttctctcgttgtttcgacagatgcatatgcaggagcaggacgatgactggtatagcttagggactcttctgcgatcttgtgctggtctgtctgcagtgaagctaggaaaagaaatccactgccgttctatgaggatgagaggatgcggagatgtcattgttgaatccgcactcgtggacctgtacgcaaaatgtggtgcagtagactatgcctacagagtattcaaaatgagcagtgtccgcaacatgattacttggaatgccatgatttgtggttgtgctcagaatggccatggtgagcgagccatcagcctgttcaatgagatggttagaggaggggtcaagccagactacatcagtttcattggtgttctttttgcttgtagccatactgggatggttgaagagggaaggaactacttcaactcaatgagcaaggactatggtattccccctggtattgaacattacaattgcattgttgacctcctcagtagagtggagcttctagaagaggctgaagatcttgtaaacaagtcacaatttagagatgattcatcactgtgggcagcaatacttggtgcctgtgccacacatactaacccagatgtagcagtaagggttgcaaagaagatgatggaattggagcctcaataccacctgagctatgttcttcttgaaaatgtgtataggacgattgggcattgggaagacgctgtaaaggtaaggaagctgatgaaatcaagaaaggtaaagaaagaacctggaacaagctggattaatgcaaacagaagcaaactatacatgtgtaatgctaagggggcagcctcagagcctgtagcttctgaggacttcaggaagtgcagttcattgactgatttagcttgtgattttggtatctga

SEQ ID NO: 130645 - DNA, 1589 bp, Zea Mays
cccgtcccctttcccttcggggatggtattcgtcgtcttggcttcatcctctcgcccgccgtctcgactgtagcaagcggggctgctgtccgccgcattcaggagccatgcgtgaggggatgagggagagggacagaggcgggagcccggatgcgtcaggtcctccgcccttccgcggcccggcgtacaagacgaagctgtgcgcgctttggaggggcaggggcggctgcccccgccccaactgcggtttcgcccacggcgaggctgagctccgaaggccgccccctcgcgcctccttccagcctcgcccacgacctgggagaagggattacagagatcatgagtttagactcaggcctgatagaagacactcaccccatgggaggtattcccctgaaagagatatcaggcgtcgttcatttcatgataagagaccaagttctgaagataggggatctagtcattcaagatcacctattaggaagagtgagagaaaacatagtaaaagtcctgatggtggagaaaccgattcatccgtaagtgttcgaagtcctgataacgaagacagaggaaaagatgaaaggtacttaagcagtgatgagaaaaatggtcatgaagatcaactgaaacaaatgcatctggacatggaagcattgcgtgaagacaaatcaaagctggagatgatattagagaagaagactgatgaagagcacaaactttgtagcagagtagaagatcttgaattgcaattgaacaaagagaaagaagattgccaaaggatgtcctccaaaaccaaaaagctaatcaaagcacatgggcgttatataaaagcacaggaggatttaaagaggtctcaggctcgctttgagaggctagcagatttgcttgcttcagatattttgaagccttgtaccaaggagcagggttccatagggattactgccaatgaagatccatataatgctaatgaaatgagcccaagtgaccaaagacaaaaccatgtttcagcatcgagaaaaagacttatttccctcccaacaagtgaagaagcaaaaactggaaagagacagagagagaatggtgatgatatgatcccaacatcagagaactatagacctgaagatgccctagaacatctccaagatagcaagggaactgatctaccagaatcatttacagtgaagaagttaagggagggtgacaacgatgatgtaggaaacattgtctcttcaagcaatatttttgcggataggtacacgggcgatgatgaggaagttgatgttgattagtgagcggatgctgtcggtggttgataatgatttgagctgtaggaagctatctcaacagacgacatggatgccagcttctaaaactacttttatgccttttgcattgggtaataggggctggtatatctggtagagctatttatgtgcttagacttgagttgtgatgctgtcaaacatatctatacttctttttcttttgtgtctcctggggctcgaagaggatactaatctgtgctcgcctcatgtattattcttagccagtatgagtattatttgagacttttggattggttgtgttat

SEQ ID NO: 130646 - DNA, 756 bp, Zea Mays
caaccaactcattgaatatgcatcttattatttagaaaaaatatgtaatgaagcaaatcttagtcatttacaagctgtaacaatatttttcaccttgatcattttcaagaagttagcggtgttttctagggtctgatggattcttgtggcattttgagtcatctttgtatctcttctagcctataatttatcttttaaaacattttactgtaccatggaatattaagttgtactttgcctgacttaaatgtattttgatttttctccattgctctaagattttgttggtgccactttctgtttcggatacttatagctcatttatcatttatgtaagagatttgaatatgttctgaaaaatagcttttgtatgcagtttttgaaacaaactcttgatactatgtcttatgtttttcatttagtacacgggcgatgatgaggaagttgatgttgattagtgagcggatgctgtcggtggttgataatgatttgagctgtaggaagctatctcaacagacgacatggatgccagcttctaaaactacttttatgccttttgcattgggtaataggggctggtatatctggtagagctatttatgtgcttagacttgagttgtgatgctgtcaaacatatctatacttctttttcttttgtgtctcctggggctcgaagaggatactaatctgtgctcgcctcatgtattattcttagccagtatgagtattatttgagacttttggattggttgtgtt

SEQ ID NO: 130647 - DNA, 1573 bp, Zea Mays
tttcccttcggggatggtattcgtcgtcttggcttcatcctctcgcccgccgtctcgactgtagcaagcggggctgctgtccgccgcattcaggagccatgcgtgaggggatgagggagagggacagaggcgggagcccggatgcgtcaggtcctccgcccttccgcggcccggcgtacaagacgaagctgtgcgcgctttggaggggcaggggcggctgcccccgccccaactgcggtttcgcccacggcgaggctgagctccgaaggccgccccctcgcgcctccttccagcctcgcccacgacctgggagaagggattacagagatcatgagtttagactcaggcctgatagaagacactcaccccatgggaggtattcccctgaaagagatatcaggcgtcgttcatttcatgataagagaccaagttctgaagataggggatctagtcattcaagatcacctattaggaagagtgagagaaaacatagtaaaagtcctgatggtggagaaaccgattcatccgtaagtgttcgaagtcctgataacgaagacagaggaaaagatgaaaggtacttaagcagtgatgagaaaaatggtcatgaagatcaactgaaacaaatgcatctggacatggaagcattgcgtgaagacaaatcaaagctggagatgatattagagaagaagactgatgaagagcacaaactttgtagcagagtagaagatcttgaattgcaattgaacaaagagaaagaagattgccaaaggatgtcctccaaaaccaaaaagctaatcaaagcacatgggcgttatataaaagcacaggaggatttaaagaggtctcaggctcgctttgagaggctagcagatttgcttgcttcagatattttgaagccttgtaccaaggagcagggttccatagggattactgccaatgaagatccatataatgctaatgaaatgagcccaagtgaccaaagacaaaaccatgtttcagcatcgagaaaaagacttatttccctcccaacaagtgaagaagcaaaaactgagacagagagagaatggtgatgatatgatcccaacatcagagaactatagacctgaagatgccctagaacatctccaagatagcaagggaactgatctaccagaatcatttacagtgaagaagttaagggagggtgacaacgatgatgtaggaaacattgtctcttcaagcaatatttttgcggataggtacacgggcgatgatgaggaagttgatgttgattagtgagcggatgctgtcggtggttgataatgatttgagctgtaggaagctatctcaacagacgacatggatgccagcttctaaaactacttttatgccttttgcattgggtaataggggctggtatatctggtagagctatttatgtgcttagacttgagttgtgatgctgtcaaacatatctatacttctttttcttttgtgtctcctggggctcgaagaggatactaatctgtgctcgcctcatgtattattcttagccagtatgagtattatttgagacttttggattggttgtgtt

SEQ ID NO: 130648 - DNA, 2086 bp, Zea Mays
cccgtcccctttcccttcggggatggtattcgtcgtcttggcttcatcctctcgcccgccgtctcgactgtagcaagcggggctgctgtccgccgcattcaggagccatgcgtgaggggatgagggagagggacagaggcgggagcccggatgcgtcaggtcctccgcccttccgcggcccggcgtacaagacgaagctgtgcgcgctttggaggggcaggggcggctgcccccgccccaactgcggtttcgcccacggcgaggctgagctccgaaggccgccccctcgcgcctccttccagcctcgcccacgacctgggagaagggattacagagatcatgagtttagactcaggcctgatagaagacactcaccccatgggaggtattcccctgaaagagatatcaggcgtcgttcatttcatgataagagaccaagttctgaagataggggtaatcactttttctgtgcacatttgtgccaataaaaatatttgccactgtccattgtatcttctaactactccctgagatttgatttgcaggatctagtcattcaagatcacctattaggaagaggtatgtaggaacgaataacaattattagggattcaagatctagtcattagaagtacttaaatttgtttattacatcgggctagtttatcttcatgtaccatcatgacttaatccctgctaatttattggtttcctaattttttatatgtgcgagctgcaatgttaagtttgtggtttatgagaccttttattctattgttcaaccatgatctaccatggagtctcattaccatccatttataactttggggtggggttgtagccgtgtagggtcatgaatgttggtatcaccaaggagggttttgatcttatgttaggcatgtgatctgtatacatgctttttttgcaagtttatggcttgcttgtgaaattgcctatctttatgtttatgttctatggctgctcagtgagagaaaacatagtaaaagtcctgatggtggagaaaccgattcatccgtaagtgttcgaagtcctgataacgaagacagaggaaaagatgaaaggtacttaagcagtgatgagaaaaatggtcatgaagatcaactgaaacaaatgcatctggacatggaagcattgcgtgaagacaaatcaaagctggagatgatattagagaagaagactgatgaagagcacaaactttgtagcagagtagaagatcttgaattgcaattgaacaaagagaaagaagattgccaaaggatgtcctccaaaaccaaaaagctaatcaaagcacatgggcgttatataaaagcacaggaggatttaaagaggtctcaggctcgctttgagaggctagcagatttgcttgcttcagatattttgaagccttgtaccaaggagcagggttccatagggattactgccaatgaagatccatataatgctaatgaaatgagcccaagtgaccaaagacaaaaccatgtttcagcatcgagaaaaagacttatttccctcccaacaagtgaagaagcaaaaactggaaagagacagagagagaatggtgatgatatgatcccaacatcagagaactatagacctgaagatgccctagaacatctccaagatagcaagggaactgatctaccagaatcatttacagtgaagaagttaagggagggtgacaacgatgatgtaggaaacattgtctcttcaagcaatatttttgcggataggtacacgggcgatgatgaggaagttgatgttgattagtgagcggatgctgtcggtggttgataatgatttgagctgtaggaagctatctcaacagacgacatggatgccagcttctaaaactacttttatgccttttgcattgggtaataggggctggtatatctggtagagctatttatgtgcttagacttgagttgtgatgctgtcaaacatatctatacttctttttcttttgtgtctcctggggctcgaagaggatactaatctgtgctcgcctcatgtattattcttagccagtatgagtattatttgagacttttggattggttgtgtt

SEQ ID NO: 130649 - DNA, 1353 bp, Zea Mays
aagccgccgccgccaccaccgcctcacccaagctttcatttgtcatgctggttgcccccgccttatcgtgtaatgccatgttgcccccgcatcatcatctaagatttcgtttgtcgtccgcgctgcagtctgcttcccgtttcactcttatatttttttgttggacggagttgttttgcatcgtttcgatctgtaccgtactgtttcccctcttgttcataacggcggcgacacaaattcttgcgtgctgcgccgctcacgcaaggagggataaatcgactcgtcaagaaatcgtttcagttgccatgactccagtaggcaatatgattgttgcttgactacagttttgtcttccactacttagcttatttgtttgttttattcttacctcgcccgtattttctttgttttattcttacctcgctcccgattttaagatctaatttggtatctgcacggtgcttaccccgggcttgtcggatgtacttgaagaaggaagccccaatgtctgtgctagatccactatgccattcagtgttgcaggccctgatgaattttgtgattggtctgtgtcaaagcaatggatacaaattttcgtaatagaccatttctttattatgtttggtttgatgattcgtttgattgattgatggcagtgatttgacattacccgcgcttctgatctaacccgtgaagcaaagggaaaattaatggttgaatttcttaatatgagccatctagtgatctttcagctgtctccttttattttgtgcgtgagctcatttcattcatgtggttgatttggcggtgatgatacaaccattcagcttacaacgccagttctgcttctgataagtcatgacagataaagctgattcatatctgagccttgatttgtgtcatgttctgacaaactcataattaggatcatgcattttttcttgctccaaaccttacatcccgttggccactgaagtcaacccaatgtttcgaggctacaatcggctccaactacatgcttgtcaggcggtatcataaactgattttttgtggttcagttagacgagagcgatgaagagcaacttttgtgaactagagtttcagatgctaccatggtgacttttttctgggatggagctcatatttgcaggtgattgattcatcttggggctgagattgaaatagggtatttcagtgattcaaaataattcttggtgtacatcatcattagttttgtattgttttatttacacagtattcggtggtttattaaattcagatatggcacatatgataatgatcagagtggtttctgaacatacgaagtagccgcccaagagctttcaacctgcc

SEQ ID NO: 130650 - DNA, 1300 bp, Zea Mays
aagccgccgccgccaccaccgcctcacccaagctttcatttgtcatgctggttgcccccgccttatcgtgtaatgccatgttgcccccgcatcatcatctaagatttcgtttgtcgtccgcgctgcagtctgcttcccgtttcactcttatatttttttgttggacggagttgttttgcatcgtttcgatctgtaccgtactgtttcccctcttgttcataacggcggcgacacaaattcttgcgtgctgcgccgctcacgcaaggagggataaatcgactcgtcaagaaatcgtttcagttgccatgactccagtaggcaatatgattgttgcttgactacagttttgtcttccactacttagcttatttgtttgttttattcttacctcgcccgtattttctttgttttattcttacctcgctcccgattttaagatctaatttggtatctgcacggtgcttaccccgggcttgtcggatgtacttgaagaaggaagccccaatgtctgtgctagatccactatgccattcagtgttgcaggccctgatgaattttgtgattggtctgtgtcaaagcaatggatacaaattttcgtaatagaccatttctttattatgtttggtttgatgattcgtttgattgattgatggcagtgatttgacattacccgcgcttctgatctaacccgtgaagcaaagggaaaattaatggttgaatttcttaatatgagccatctagtgatctttcagctgtctccttttattttgtgcgtgagctcatttcattcatgtggttgatttggcggtgatgatacaaccattcagcttacaacgccagttctgcttctgataagtcatgacagataaagctgattcatatctgagccttgatttgtgtcatgttctgacaaactcataattaggatcatgcattttttcttgctccaaaccttacatcccgttggccactgaagtcaacccaatgtttcgaggctacaatcggctccaactacatgcttgtcaggtagaacctacttggagctgctgccctcgcatgacgagtcttgacaatcctgtggccctctacgcagcgtcgaaatgcgttttagtttataataatgctgtgttttagttatttctctcctaataattatactgagtggatctgtgccgagttcaactatccttgcactagtgctctctgatttgtgttgaggctgaagaactcggatagtttgtgttgtcatcagcttcggctctgtactgtgagttgggagttaaataacagcacgagattg

SEQ ID NO: 130651 - DNA, 1805 bp, Zea Mays
ggagtatatgacaaggacagaagcatgatggcgcatgaacaagttaaagctatacgttaatcaatcattcctctgcccatagacagcatccgtttccgttgctaattaacactccatcacttgaagctacaatggtgagagctgctgaggtcgcaacgaccatggcggcggcactagtcgtggtcatcgcattgtccactacgccggcggcaagcgccattgactacaccgagcatgacctggcgtcggaggagtccctgtgggcactgtacgagcgttggtgtgcacactacaacatggcgcgcgacctcggcgagaagacccggcggttcaacttgttcaaggagaacgcgcaccgcatctacgagcacaaccaaggcaatgcgacgtacacgctgggcctcaaccgcttcagcgacatgaccgacgaggagttcagccgctccccgtacggacgttgcttgtttgccccggtccagcgcatttctgacggcgagaacgaagagctccagcagcatgaggacgtgtcgttcaacctcacgcacggcggcgccaccgcagcgctgggcctcccgccgtcagtggactggcgcgggaggtcggtgacgcgcgtgaaggaccaggggctcacctgcgggagttgctgggccttcgcagcgatcgcggcggtggagggcatcaacgccatccggacatggagcctggtgacgctgtcggagcagcagctggtggactgcgacaatgtggaccatggctgcgctggtggttggataccctcggcgttggacttcatcgtgaggaaccgcggcatcgtgccggagggcacgtacccgtacataggcacgcagggccgttgccggcacgtcatggccccgccggtgaccatcgacgggtaccggcgagttctgccgttcgacgtgaatgcactgatgtctgcggtggctgcccagcctgtggcagtggcgatggagtctagcgcctgggccttcaggcactaccaagggggcgtctttaatgggaactgcggggggaggctgggtcacgcggcggcggtggtggggtacggcgacggggccggcggccctttctggatcgtcaagaattcatggggtcccaagtggggcgagggcgggtacgtccgcatcagccgcaacgcgcccaacaggctggggatctgcggcattctcacacaaccgttgtaccctgtgaagcgctaggatacctatttcaatagctattccggtttgttcgttgggataaaaagtttatgtatcgcatgatacaagtaacccgttccataataatacaatatactcatagtcacaaatagtgcatatgtaccttatatgaaccttcgcgcgtacacgtcacaattttattgagctggtaacgctgcctgtatcaatctttcgaatggcaaaaaatgaccataggagggatgtaacaggtagtggagactaattttcttgtgaccagtggtgaagacaaaaacaagctagtaggggtttatttttctctcttcttccttctctaacctccgccttcttcaatagagtgagggctcattttttttctctattcttcttccttcttctttctcatctatactatacctctataccaatggagttttatggacgtagggggctagagccccccttcagattcacccctgtcaataggtcgtttaggtctggtgagcaaaaaatcgcatgcgatcgtattcatgaagtctaccaaaatccgcccccaattacacccgaaggtgcaattcgaaaccctcacccgaccccgtatggtttcgt

SEQ ID NO: 130652 - DNA, 138 bp, Zea Mays
atgaactccgagcaagaggaagcgaaggagggagatcgaacggggagcagagaaagggagaagggaggagtctcgaatcggtgggagggtcatgacttgagcttgtgggatcatccgtgtcgcgccgcgcgttcctag

SEQ ID NO: 130653 - DNA, 276 bp, Zea Mays
atatttcctgctaagaggcgcaaggttgtcactatgaagaagaggaaggaaagggtgtcctgaatcaacccttccttcagtgatgggtatcactgcagaagaaagcactgcactgatacctgctgcttcagaaagtaaagcacaaaaggatcttactcctgttggaagagatgctttgtcacgaattagaggtcgagattttgactcagcatgtggtcttactgaggatactggggccttggttgtatggcaagcaccacccatctgttcatgtaa

SEQ ID NO: 130654 - DNA, 1495 bp, Zea Mays
tctcactcttgcattactcaatgcaggtgcttgttgctcatcaaggggagtgggaagtagcagcacatccaccttcattctcataataatgctgcccagacgcagccatgatttaattagaaacttcttgtcaaaggatgtttgtttttaactagtcgtgcgcactgattaattcagttcatgttgttatggttgtcttcccattgctagcagattattaatgtcttatatgttttcttatcatgatatctatttatactttgttgcttcccccgtttatgcaattttcaaaggagatgctgtcgaaattttatatatgaatattagatgtgtagtttagtagcattctggggtgtttgtggatcccggggtgttacacttatttccctggaaatgactgaccgctgcttctttactgcagatgggggacatactcatacctagccttatggttggagactgctctcatagcttgtgtgtgcgtgcctctaggctttgggaattccttgatcctcaggatgacagtaggctcctgcatactgatcttgttttgcttgatgaagagggaaacagcatacatgcccagatctatcctccgttatgccaacagttcagtgcgctgcttgatgagggagcggtatacaacctgaagtatttcttagtcaggaaagctaacaggttctacaaaccggttgaaaactgcaacatgatcagctttacaaagtggactacggttgaagttgtcctccagatcccccctgcttttccggtttgcacatataacctcactcccatagaacaactccaagcgcgtgtggactacaaggaatatttcacagatgtggtcggtgttgtcagtgtgatctcccatgtttcatcgctgcgcacaaggggacgacaggctgaggttatgaagagaacagtcactataagcaatgcaagggatactgggccaaccgttgatgttgtcctttggggcgagcgggccacaactttcccagctgaacagatccacagggacagtcgatcctcaccgcagatcatagtatttgttggcactctcgtgaggagttacgctgataatgtgtcattatcgggtggatcatcatgcaagtggtacataaacgcaccgctaccggaagtaaacgctctcagagctagtgctgaaaccaaccacaaccctgtcatttgggatcaggggaaagcagctgctgagagtacagtcattgcagttcctgaatataagaaactcaaggatattaaatacctccatccttttgaaaataagaagaaggaatggcttgtcgtcataaagattctcaagattgatagatcatggtggtacaacgcatgcaaaaaatgccttaggacaaccaaaccacacggtgacacatacaagtgcaccaataattcctgtgacagcataggatcgcctaccccaagtgcttttggacacgagcaccaccagccatggagacccgcttttgggaactga

SEQ ID NO: 130655 - DNA, 1368 bp, Zea Mays
ctttcattgaatgatggtaagtgttttggccaataaatagcaatggctggaagcaacccggctatccaccaagagcaaaggagagcctggaagcgtacgctgaggagatccaagaagatggccattctgtggtggacggcgctcaagaagtccctgagctgcaagtcgcaggactcctgcgacgtgatcaagcgggacgacgcctcgcgcggcgccagcgccagcgccaggggcctcggtctcaagaggtcgttcctgctgcagccgtcgttgtcgctgccgaggtcggggtgctcgcgctccatctccaatctgcgggacgtgatccacagcgccaggttccaggcgccaccggccgtgcgcagcaagtgcgacagcccgatgtcggtcgagagcagcgacgtccttaacgcggtgacgcacgacgtgctgctcgccgccggggggccagcatccgcgctcgccgcctcggacgtaggcgcggtgccgccgtacgcgcacagcccgctcctgatgcggtgcgccaccggcgcccgtctctcccagaggaagtcaccgctccgcctcggcggcggcgacctggggtcgcccattcccgcctgggccccctgcgtcgaggtcggggtccgatgcaaccgctgtggcgcccgcttccccaacgacaacgccctggagtcgcatcacctcgtcttccacgctgtcaccgaggtggtgggcggcgagacggcgagcaaggtggtggaactcatatacagtgtcgggtggccgaatcccgaggccgcgctggaccgcgtcgagcgagtcgtcaaggtccacagcatggagaggcgggtggaccggttcaaggagtacatggaggaggtgaagggcagggcggcgaggctgcccaacaagcacccccgctgcgtcgccgacggcaacgagctgctccagttccacggcaccaccgtctcctgctccctcggcagcggcggctcgcacagcgtctgcacgtcgagcctgtgcaacgtctgccgcatcatccggcacggcttctcggcgaccaggaagtccaggaacagcggcggcggcgtgttcaccacctccacgagcaggcacgcgctggagtgcctgcaggaaacctccggcgtcggcgcgaagcacgcgctgctcgtgtgcagggttatcgcggggaggatccaccgcccgctggagaagctgagccaggacttcgccgtgcagccgggattcgactcggtcgccggccaggtcggtgacgattcaagcatcgaggagctgtacctgctcaacccgagtgctcttctcccgtgcttcgtggtcatatgtaaagattagatcttgcggctgggtatagcaaacacatcatag

SEQ ID NO: 130656 - DNA, 1405 bp, Zea Mays
gccaacaacacacactatttatgtctcatcagcgtgcgcacgcgcctcgctatagaggaacaaccccgccccgccatggcaaataacatgccgtcgtctcaaatccacagccgcctgcgctgcagctgcagctggctgctgcttctcgtcctccatttctctagctcagccagcagggccgccggcggcaaggtgccggcgctgatcgtgttcggggactcgacggtcgacccgggcaacaacaacttcatccccaccgtcgccagggccaacttcccgccgtacgggcgcgacttcgaccggggcgtcgccaccggcaggttctccaatggccgcctcgtcacggacttcctttccgaggcgttcggcttgccgtcgtctgtgccggcctacctcgaccccagctataccatcgaccagctcgccaccggggtcagctttgcctccggtggcaccgggctggatgatctaacggcgaacatcccatcagtcatccccatgagccagcagctggagtacttcagcgagtacaaggcgagactgaaggtcgcgaagggggagtccgcggccaacgagatcatcgccgaggcgttgtacatcttcagcatcggcaccaacgacttcatcgtcaactacctcaccttccctctccggcgagcccagttcaccccgccggagtacgtcgcctacctcgtcggcctcgccgaggcggccgttcgcgacgcctacggcctcggcgcgcgcaagatggagttcaccggcctcgccccgttcgggtgcatccccgcggccaggacgctcaactacgacgaccccgacgagtgcaacgaggagtacaaccggctggcggtgaggttcaacgccgcgctgcaggaggccctgaggaggctcaacgctgagctcgtcggcgcgcgggtggtctacgcggagacgtacagcgtcttgtctgacatcgtcgccaatccgtcggactacggatttgagaacgttgcgcaaggctgctgtggcacagggctcatagagacatctgtgctttgcggcttggacgaaccgctgacgtgtgaagacgcggacaagtacgtgttcttcgattcagttcacccgtcggagcagacatacaggattttagctgaccatattctcaacactgcattacgagtgttcctgtaacatcatcgttggtagtaccttttgagggtttcttttttctttacacaagagaatttatccatcatcgggaggaaatcgttatttttcgataaaggaagcttatattaaagttaccaagtatattacatcaagaggatacaaagccaaatcgtcatatattctatatttcttgtagcatctcagcatctaaacatgaaactgaatcgcagaggttcaaagagatcatttcttcagt

SEQ ID NO: 130657 - DNA, 1866 bp, Zea Mays
acttattcttagactaaaaacactatgagttagtgctaccaactgaaggatacgccatggctgttctgacactggttaatatccttatcagcttcgctgcttgtgctgaagctctaaggagagcagacttccctcaaggtttcgtctttggcactgcttcttcagcttaccagtatgaaggtgctgtcaacgagggtcaacgtggacctacaatatgggatactctcacaagacgacccggacgggtgatagatttcagcaatgcagatgttgccgttgatcactaccatcgttataaggaagatgtggacttgattaaggacattggcatggatgcataccggttctctatctcgtggtcacgtatctttccaaatggaactggtgaacctaatgaagaaggattgaattactataacagcctcataaatactctattagacaaaggtatacaaccatatgtaacactctttcactgggaccttccgcaagcactagaagacagatatggtggatggttaaactcccaaatcgtggatgattttgttcactatgcctctacttgcttcaaggaatttggagatagagtgaaacactggatcactttcaatgagccccataattttgcgattgaaggctatgaccttggcatccaggcacctgggaggtgttctattctgtctcatatattctgcagggagggcaaatcatcgactgagccttatgtcgtagctcacaacatactcttagcgcatgctggtgcctttcatacttataagcagcatttcaagaaagaacaaggaggtatcattggcattgcactcgattctaagtggtatgagccactgtcagatgttgatgaggacacagaggcagcagcacgagcaatggactttgagcttggatggttcctggatcccttaatgtttggccactatcctccttctatgcagaaacttgtgggcgacaggctgcctcagttttcagctcgggcttcgatgttagtgtcaggctcactagattttgtgggcataaaccattacaccacactgtatgttaggaacgacagaatgcggatcaggaaacttgtaatgaatgatgcttcaactgatgctgcggtcatacctactgcttatagacatggaaagaaaataggagaaacggcagcgtcaggatggctgcacatagtgccctggggcatgttcaagctgatgaagcacatcaaagaaaagtacgggaatccgcccgtgatcattactgaaaacggcatggatgatgcgaacaaccggttttcgaaattagaggatgatctgcaggatgataaacggatacagtaccacaaggactacatgtctaacctcctagacgcaattaggaaggaaggctgcaacgtccatggctacttcgtctggtcgctgctcgacaactgggagtggaactccgggtacacggtgcggtttgggctctactacatcgactacaacaacaatttgacacggatacccaaggcgtccgtggagtggttcaggcaggtcttggcccagaagacggctggtttggagtacagtggttctacagtggccagtagttgagtgtatataacatacacggcacggctaccatcgatctgtacatgcgtacgtagctttagattagattgtgattattctcgatgtatatagactcaccatttggacgaccttcaaccgcacagttgaatgtgtcgttatgcttgctacaaattggttgattggtgctaaagaaatcagtgaggggtgctcggttctactactaaatgtcatatcggaaattaaataccaattataaatattaaatatattttaattacaaattaattatacaaaa

SEQ ID NO: 130658 - DNA, 1898 bp, Zea Mays
acttattcttagactaaaaacactatgagttagtgctaccaactgaaggatacgccatggctgttctgacactggttaatatccttatcagcttcgctgcttgtgctgaagctctaaggagagcagacttccctcaaggtttcgtctttggcactgcttcttcagcttaccaggtgctgtcaacgagggtcaacgtggacctacaatatgggatactctcacaagacgacccggacgggtgatagatttcagcaatgcagatgttgccgttgatcactaccatcgttataagatgtggacttgattaaggacattggcatggatgcataccggttctctatctcgtggtcacgtatctttccaaatggaactggtgaacctaatgaagaaggattgaattactataacagcctcataaatactctattagacaaaggtatacaaccatatgtaacactctttcactgggaccttccgcaagcactagaagacagatatggtggatggttaaactcccaaatcgtggatgattttgttcactatgcctctacttgcttcaaggaatttggagatagagtgaaacactggatcactttcaatgagccccataattttgcgattgaaggctatgaccttggcatccaggcacctgggaggtgttctattctgtctcatatattctgcagggagggcaaatcatcgactgagccttatgtcgtagctcacaacatactcttagcgcatgctggtgcctttcatacttataagcagcatttcaagaaagaacaaggaggtatcattggcattgcactcgattctaagtggtatgagccactgtcagatgttgatgaggacacagaggcagcagcacgagcaatggactttgagcttggatggtgatacatctatcacaatttcgatattaccaagtcgattagttcctatgtagttgcagtacacagctgttgctcataatattaattgtgaaactttccaagtgtgaatacaggttcctggatcccttaatgtttggccactatcctccttctatgcagaaacttgtgggcgacaggctgcctcagttttcagctcgggcttcgatgttagtgtcaggctcactagattttgtgggcataaaccattacaccacactgtatgttaggaacgacagaatgcggatcaggaaacttgtaatgaatgatgcttcaactgatgctgcggtcatacctactgcttatagacatggaaagaaaataggagaaacggcagcgtcaggatggctgcacatagtgccctggggcatgttcaagctgatgaagcacatcaaagaaaagtacgggaatccgcccgtgatcattactgaaaacggcatggatgatgcgaacaaccggttttcgaaattagaggatgatctgcaggatgataaacggatacagtaccacaaggactacatgtctaacctcctagacgcaattaggaaggaaggctgcaacgtccatggctacttcgtctggtcgctgctcgacaactgggagtggaactccgggtacacggtgcggtttgggctctactacatcgactacaacaacaatttgacacggatacccaaggcgtccgtggagtggttcaggcaggtcttggcccagaagacggctggtttggagtacagtggttctacagtggccagtagttgagtgtatataacatacacggcacggctaccatcgatctgtacatgcgtacgtagctttagattagattgtgattattctcgatgtatatagactcaccatttggacgaccttcaaccgcacagttgaatgtgtcgttatgcttgctacaaattggttgattggtgctaaagaaatcagtgaggggtgctcggttctactactaaa

SEQ ID NO: 130659 - DNA, 1990 bp, Zea Mays
ggacgacaggacgaggacggcggggtcaaggctctctttctctctccctccctctctgcgtgtctcctcgcacgctacgcgaggccacgcgagattgcttgggagatgcgtgcccgcctccagattccccgttccagcgccgaggcgcgcaagctacgcgacggttgctgagcttcgctgcttgtgctgaagctctaaggagagcagacttccctcaaggtttcgtctttggcactgcttcttcagcttaccagtatgaaggtgctgtcaacgagggtcaacgtggacctacaatatgggatactctcacaagacgacccggacgggtgatagatttcagcaatgcagatgttgccgttgatcactaccatcgttataaggaagatgtggacttgattaaggacattggcatggatgcataccggttctctatctcgtggtcacgtatctttccaaatggaactggtgaacctaatgaagaaggattgaattactataacagcctcataaatactctattagacaaaggtatacaaccatatgtaacactctttcactgggaccttccgcaagcactagaagacagatatggtggatggttaaactcccaaatcgtggatgattttgttcactatgcctctacttgcttcaaggaatttggagatagagtgaaacactggatcactttcaatgagccccataattttgcgattgaaggctatgaccttggcatccaggcacctgggaggtgttctattctgtctcatatattctgcagggagggcaaatcatcgactgagccttatgtcgtagctcacaacatactcttagcgcatgctggtgcctttcatacttataagcagcatttcaagaaagaacaaggaggtatcattggcattgcactcgattctaagtggtatgagccactgtcagatgttgatgaggacacagaggcagcagcacgagcaatggactttgagcttggatggtgatacatctatcacaatttcgatattaccaagtcgattagttcctatgtagttgcagtacacagctgttgctcataatattaattgtgaaactttccaagtgtgaatacaggttcctggatcccttaatgtttggccactatcctccttctatgcagaaacttgtgggcgacaggctgcctcagttttcagctcgggcttcgatgttagtgtcaggctcactagattttgtgggcataaaccattacaccacactgtatgttaggaacgacagaatgcggatcaggaaacttgtaatgaatgatgcttcaactgatgctgcggtcatacctactgcttatagacatggaaagaaaataggagaaacggcagcgtcaggatggctgcacatagtgccctggggcatgttcaagctgatgaagcacatcaaagaaaagtacgggaatccgcccgtgatcattactgaaaacggcatggatgatgcgaacaaccggttttcgaaattagaggatgatctgcaggatgataaacggatacagtaccacaaggactacatgtctaacctcctagacgcaattaggaaggaaggctgcaacgtccatggctacttcgtctggtcgctgctcgacaactgggagtggaactccgggtacacggtgcggtttgggctctactacatcgactacaacaacaatttgacacggatacccaaggcgtccgtggagtggttcaggcaggtcttggcccagaagacggctggtttggagtacagtggttctacagtggccagtagttgagtgtatataacatacacggcacggctaccatcgatctgtacatgcgtacgtagctttagattagattgtgattattctcgatgtatatagactcaccatttggacgaccttcaaccgcacagttgaatgtgtcgttatgcttgctacaaattggttgattggtgctaaagaaatcagtgaggggtgctcggttctactactaaa

SEQ ID NO: 130660 - DNA, 1713 bp, Zea Mays
attcttagactaaaaacactatgagttagtgctaccaactgaaggatacgccatggctgttctgacactggttaatatccttatcagcttcgctgcttgtgctgaagctctaaggagagcagacttccctcaaggtttcgtctttggcactgcttcttcagcttaccagtatgaaggtgctgtcaacgagggtcaacgtggacctacaatatgggatactctcacaagacgacccggacgggtgatagatttcagcaatgcagatgttgccgttgatcactaccatcgttataaggaagatgtggacttgattaaggacattggcatggatgcataccggttctctatctcgtggtcacgtatctttccaaatggaactggtgaacctaatgaagaaggattgaattactataacagcctcataaatactctattagacaaaggtatacaaccatatgtaacactctttcactgggaccttccgcaagcactatgcctctacttgcttcaaggaatttggagatagagtgaaacactggatcactttcaatgagccccataattttgcgattgaaggctatgaccttggcatccaggcacctgggaggtgttctattctgtctcatatattctgcagggagggcaaatcatcgactgagccttatgtcgtagctcacaacatactcttagcgcatgctggtgcctttcatacttataagcagcatttcaagaaagaacaaggaggtatcattggcattgcactcgattctaagtggtatgagccactgtcagatgttgatgaggacacagaggcagcagcacgagcaatggactttgagcttggatggttcctggatcccttaatgtttggccactatcctccttctatgcagaaacttgtgggcgacaggctgcctcagttttcagctcgggcttcgatgttagtgtcaggctcactagattttgtgggcataaaccattacaccacactgtatgttaggaacgacagaatgcggatcaggaaacttgtaatgaatgatgcttcaactgatgctgcggtcatacctactgcttatagacatggaaagaaaataggagaaacggcagcgtcaggatggctgcacatagtgccctggggcatgttcaagctgatgaagcacatcaaagaaaagtacgggaatccgcccgtgatcattactgaaaacggcatggatgatgcgaacaaccggttttcgaaattagaggatgatctgcaggatgataaacggatacagtaccacaaggactacatgtctaacctcctagacgcaattaggaaggaaggctgcaacgtccatggctacttcgtctggtcgctgctcgacaactgggagtggaactccgggtacacggtgcggtttgggctctactacatcgactacaacaacaatttgacacggatacccaaggcgtccgtggagtggttcaggcaggtcttggcccagaagacggctggtttggagtacagtggttctacagtggccagtagttgagtgtatataacatacacggcacggctaccatcgatctgtacatgcgtacgtagctttagattagattgtgattattctcgatgtatatagactcaccatttggacgaccttcaaccgcacagttgaatgtgtcgttatgcttgctacaaattggttgattggtgctaaagaaatcagtgag

SEQ ID NO: 130661 - DNA, 1701 bp, Zea Mays
acttattcttagactaaaaacactatgagttagtgctaccaactgaaggatacgccatggctgttctgacactggttaatatccttatcagcttcgctgcttgtgctgaagctctaaggagagcagacttccctcaaggtttcgtctttggcactgcttcttcagcttaccagtatgaaggtgctgtcaacgagggtcaacgtggacctacaatatgggatactctcacaagacgacccggacgggtgatagatttcagcaatgcagatgttgccgttgatcactaccatcgttataaggaagatgtggacttgattaaggacattggcatggatgcataccggttctctatctcgtggtcacgtatctttccaagtatacaaccatatgtaacactctttcactgggaccttccgcaagcactagaagacagatatggtggatggttaaactcccaaatcgtggatgattttgttcactatgcctctacttgcttcaaggaatttggagatagagtgaaacactggatcactttcaatgagccccataattttgcgattgaaggctatgaccttggcatccaggcacctgggaggtgttctattctgtctcatatattctgcagggagggcaaatcatcgactgagccttatgtcgtagctcacaacatactcttagcgcatgctggtgcctttcatacttataagcagcatttcaagaaagaacaaggaggtatcattggcattgcactcgattctaagtggtatgagccactgtcagatgttgatgaggacacagaggcagcagcacgagcaatggactttgagcttggatggttcctggatcccttaatgtttggccactatcctccttctatgcagaaacttgtgggcgacaggctgcctcagttttcagctcgggcttcgatgttagtgtcaggctcactagattttgtgggcataaaccattacaccacactgtatgttaggaacgacagaatgcggatcaggaaacttgtaatgaatgatgcttcaactgatgctgcggtcatacctactgcttatagacatggaaagaaaataggagaaacggcagcgtcaggatggctgcacatagtgccctggggcatgttcaagctgatgaagcacatcaaagaaaagtacgggaatccgcccgtgatcattactgaaaacggcatggatgatgcgaacaaccggttttcgaaattagaggatgatctgcaggatgataaacggatacagtaccacaaggactacatgtctaacctcctagacgcaattaggaaggaaggctgcaacgtccatggctacttcgtctggtcgctgctcgacaactgggagtggaactccgggtacacggtgcggtttgggctctactacatcgactacaacaacaatttgacacggatacccaaggcgtccgtggagtggttcaggcaggtcttggcccagaagacggctggtttggagtacagtggttctacagtggccagtagttgagtgtatataacatacacggcacggctaccatcgatctgtacatgcgtacgtagctttagattagattgtgattattctcgatgtatatagactcaccatttggacgaccttcaaccgcacagttgaatgtgtcgttatgcttgctacaaattggttgattggtgctaaagaaatcagtgag

SEQ ID NO: 130662 - DNA, 1981 bp, Zea Mays
ggacgacaggacgaggacggcggggtcaaggctctctttctctctccctccctctctgcgtgtctcctcgcacgctacgcgaggccacgcgagattgcttgggagatgcgtgcccgcctccagattccccgttccagcgccgaggcgcgcaagctacgcgacggttgctgagagattttgcaccttgtggcctccacaagagttacttagtagagacgcacgttggaagggcttccaagacaagtgaagctcactagctcagcgttcagttgcttcccacgcttcaccaactgaacaagcttcgctgcttgtgctgaagctctaaggagagcagacttccctcaaggtttcgtctttggcactgcttcttcagcttaccagtatgaaggtgctgtcaacgagggtcaacgtggacctacaatatgggatactctcacaagacgacccggacgggtgatagatttcagcaatgcagatgttgccgttgatcactaccatcgttataaggaagatgtggacttgattaaggacattggcatggatgcataccggttctctatctcgtggtcacgtatctttccaaatggaactggtgaacctaatgaagaaggattgaattactataacagcctcataaatactctattagacaaaggtatacaaccatatgtaacactctttcactgggaccttccgcaagcactagaagacagatatggtggatggttaaactcccaaatcgtggatgattttgttcactatgcctctacttgcttcaaggaatttggagatagagtgaaacactggatcactttcaatgagccccataattttgcgattgaaggctatgaccttggcatccaggcacctgggaggtgttctattctgtctcatatattctgcagggagggcaaatcatcgactgagccttatgtcgtagctcacaacatactcttagcgcatgctggtgcctttcatacttataagcagcatttcaagaaagaacaaggaggtatcattggcattgcactcgattctaagtggtatgagccactgtcagatgttgatgaggacacagaggcagcagcacgagcaatggactttgagcttggatggttcctggatcccttaatgtttggccactatcctccttctatgcagaaacttgtgggcgacaggctgcctcagttttcagctcgggcttcgatgttagtgtcaggctcactagattttgtgggcataaaccattacaccacactgtatgttaggaacgacagaatgcggatcaggaaacttgtaatgaatgatgcttcaactgatgctgcggtcatacctactgcttatagacatggaaagaaaataggagaaacggcagcgtcaggatggctgcacatagtgccctggggcatgttcaagctgatgaagcacatcaaagaaaagtacgggaatccgcccgtgatcattactgaaaacggcatggatgatgcgaacaaccggttttcgaaattagaggatgatctgcaggatgataaacggatacagtaccacaaggactacatgtctaacctcctagacgcaattaggaaggaaggctgcaacgtccatggctacttcgtctggtcgctgctcgacaactgggagtggaactccgggtacacggtgcggtttgggctctactacatcgactacaacaacaatttgacacggatacccaaggcgtccgtggagtggttcaggcaggtcttggcccagaagacggctggtttggagtacagtggttctacagtggccagtagttgagtgtatataacatacacggcacggctaccatcgatctgtacatgcgtacgtagctttagattagattgtgattattctcgatgtatatagactcaccatttggacgaccttcaaccgcacagttgaatgtgtcgttatgcttgctacaaattggttgattggtgctaaagaaatcagtgag

SEQ ID NO: 130663 - DNA, 438 bp, Zea Mays
atgtggatgacggccagcgatgccagcatcctgtggtacaaatacgccagggtcagtgtacagctcatggtcgagtggtgccgcgacatcggcgtcggcaagggcgtcttcaaggtctggatgcacaacaacaagcacaacttcccgggcgggcacagcgcccgccgcagcgcctcctcgcccgcccccgccgccgcgtcgctccaaaccccagccgacggcgccggcgctgctgcagcaccgtcattcaacccatccaggatcacccctccccctcccgtcctcaccttgtccccgacggccgccaccggcttcaacatcaacgtcgccgcctcctcggcgcccaccgtcgccaccgactacaccacggacaaggaggcgctgccgctgtgcgccatgcctagaaatccaagcttcgcccctgtgcaccgtgcctag

SEQ ID NO: 130664 - DNA, 1102 bp, Zea Mays
atgaacggagttagtatatattagcgtgagaaaggactatctgtccacgttttgaccctaaccaagctgatgtacactctcatacaatcagaaatctgtacaaagccagcagtccgtagttagcagcagcatgcatgacctcgatcgccaatccgtacttatgcacacgagcatttcccacgaggccacgaccttcgcccgctcgatcgcgcgcgcgcgctcgaggggacgggcatcatctcccttcggcgtcgcgctgcaggagcctgatcacctcgtcgggcgggacgtcgcgccacacccggggccgcgcggcgccgtggccgagcttggcgaagccgtgcgccacccggttacccccgcgccgcacgtgcgagacgctcatgtcgtcgagcagcagcagcagcttctcgatctccccgaacaggcgcaggtcctccggggcccgtacccgcacgcgcgcgcggctccgcacggcgtcgaccaccgccatggcgtcgccctcgacccagacgctgcgccagccgttggccaccgcgagctccagcccgcgccggagcgccgcgagctccgccacggagctggtcgcggcgccgatccgctccgcgtagcccagcacgaacccgccctcgtggtcgcggtacacgccgccgatgctcgcgcgccgggacgcgtgcctcgacgacccgtcgaagttgagcttcagtcgcccgggctccggcttcctccacgtgctcgccgacggctccggtcgcgacggcccgttgttatcacccccgcgcagcccccggcgcccgcccggcgccgcccttccgccgccgacgaggcaggccgacaaagggtggcacagcagcatgctgccagtgacaagaggacggtgcacccgcagcatcgttccccggcgtcaaactgctgcgcggcgaactttgatgcgcatttagcgcccgtgcacgcactttgcttgaagcgatcgctcgcctgagggcgaggcgtgcaggacagatcgactgatggaggatgatgagatgacagggaaccaagaactcaagatgttgtttgaaatggcatggttgctggagctggagctgagcatatgccgttg

SEQ ID NO: 130665 - DNA, 312 bp, Zea Mays
atgagcgcatcgtcgtccatgaccaagaaggcgtcgtcgttcgtggtggcggcgagcatgagcgcggtggaggcgctcaaggaccaggcggggctgtgccggtgggactacgcgctccgctccctctacaaccgcgcggccgccgccaataaggtcgtcgccggccgcgccgtcccgttgtcgttgtcgtcgtcccaaaccgcgggtggcagtggcagcgccgcggccgccggtagggccgccaggcccaggcgatcggaggaggagaagatgcacaaggcgtaccacctcgtctgctggggccctaactaa

SEQ ID NO: 130666 - DNA, 2221 bp, Zea Mays
agagagagagagcagcaagattccaatggaagaaaccaacaggaggcaggcagcatggcagggataactagaggacagatcagaggttggtaccggcactaccaaccagccctacccatctgcctccgtagtggcgtgcactggctaccagtagatgcccgtacaaaactaacatttgtcccggctccttgcaccaccatatattcgcgcacatacatagcatctcaagctcccaatcccaagatgaatgctacgtaggtagacagtgttcttgtggtgacgtgacctccacagagtgcagagatgggagaagctgaagaagcgccaggagacagcaatggtgaggcactggagctcctcatgtccatggcgtcctcttcgctggcctgctctgtctcgcagttcccagccaagtggcagtccatcaaggacaagctccagctgctctgctgcagcctcaattcactctgcggcggcggcggtgaccacgacgacgacgacgacaaggagcatcctgtgttggctgagcttctgcggctggcttcagcaaccgtgaggagcatccaggtcgttgcttctcagtgcagcgacgggtcatacaagggtggaaggcttcgtctgaggagcgacctggacaacctgagctgcaagctcgatgcgcacatgaagcagctcaaggagatggccgtctcgtccggggcgccgtcgccgtccaaggccattgtcgccgtcaggcccagcgccgaggccagcgtgggtgagaaggccttctacctcaaggatctcttttccaggatcaggatcggcggcaccgtccagaggagccaggcactggccgccatcagggagctgttggtggaagacgagctctgtgcgaaggttgtcgccctcgacgtcgacgacggcgtcgccctgctcacggggttcctcgagtccaccgacgcgcgcatccaagaagaggctgccggcgccgtcgccgtcgtcgcgagctccgagcgttacaggggaatgctggtgaaggcaggggtgatcgccccgctcgtccagctgctggagaacgcggacaccgccagcgagctgggcaagcagagggcggcgcacgcgctgagggagctgacggagaactccgacaacgtgtgggccgtctgcgcgcacggcggcctcaccacgctgctgcacgcctgcgcccacgccggcagcagcagcaagctcgtcagctcctcttttgcagtgctgaggaacctcagtcgggtggaggaagtgaagatgttcatggtggagcaaggggtggtcacggagctggtgaagctctcccagaagaaggaggaggtccgcaagctcggcgccgtcgaattgctccacgccatggctctggatgacgccgacgtcagggaggaagccgtcggcatgggggtgatccagtccctcctccagttgatataccccgaccttccctactcgtacaaggccagggaggttgctcttgctgccatctggttcttctgcttctcttctgcaaactccttggatgacctcatcagctcggatgttcttggctggctgctcttctacctgaacaacggcgactacgccgtcctcgaatgtacgctcaagattctgaggcatctctccgaggtttctgaggagtacaaccggatgatgggcagagcagggtatttgagcgccctgtcaggcttgcttggagcgaaatcctgtcgagtccgggaaatggcggcgcaggttctttccagcttgctgatgcttcaccccaaccgtgccatcttcatccaagacggcgacaatctgaacaggctgctgcagctccttgatccagccgagggcaagttgatggcgaaggacttgatcctctctgctatcatgtccctggctgagaccaacagcggaaggaagaagattgtgacgtcggaaaatttctgcagcctgaaagaactggcagaatctggtgacttcgacgccaagaagatcgtcaggaaactatctactaacagactgcaaaccatcttcagcaaaatatggagtgtctagattattcctgactcccctttttcactgaggcttagctctagtctatttgatgtccatagtattttttctctggctttgcttgtaatctcggcgcatccatcattttgattcctttgtgatatatattgcaacttcggttaaattcatccttttttaggaacagggttctaaattc

SEQ ID NO: 130667 - DNA, 768 bp, Zea Mays
gaatgcatgatatcgattgggatttaataatggtagaagaaacgaacaacgaagaaggaagaaatgatgttactagcaaacaaggactctattttcagcttggactagataatcaagatgatggaaggtaagatgattcaagtgcttcccgttgtggaaataggattccatgtgaagatgaattgggagcaggcattccatgttctgatttagtgcttgatgagactaggaccatatatgatatgaacaatccagtaatggagcctggcagtttgtatgcaacaatgcaccacttcagactcgcaattagacaatacaccataaataaataatttgagattggaattgaggcaaccaataagactagatttagagggtattgtaaagggcctgattgcccctagagcattcatgctagaccggagacaaaaggggctccaacaattcaagtgattgtcttgaatgacaaacataattgtacttcgagtggtagacgtaagacgactacacctacatgagcttgggttgcggcacgtgcacttccattactaatgaagaagcctcatatgggtgctaaaaagctacaaactacattgcaggacacttttggttgtaccattgtatatgacacaatttggcacggtaaagagaaagctctgaaggaattatttggtagttgggaagagagcttttagctactatggcgttggagagaagcagttatgcaaaagtcaccggatagtgtcattgagcttgatgtaaaaatgg

SEQ ID NO: 130668 - DNA, 3608 bp, Zea Mays
gccatggcggcaccgcgcgccaccaagcgccccaagtttgcctccggcgcggcgccgccccagcgaggggaggacgactacgtgccggggaacatagtagagattgagctcttcaacttcatgacctacgaccgcctcgtctgctgccccggcccgcgcctcaacctcgtcgtcgggcccaacgggtctgggaagagctcgctcgtctgcgccatcgccctcggtctcgccggagaccccagcattctcgggagggcgtccagcgtgggtgcatttgtcaagagaggggaggttgccgggcacgtcaagatatctctccgcggggatacagctgacgacaagatctgcgttactaggaaaattgatacgaagaacaagtccgagtggctcctcaacggtgcaactgtcacaaaaaaggaagttattgacgtgattaagaaattcaatattcaagttaacaacttaactcagttcttgccacaagaccgggtatctgaatttgcaaagctaagtcccattcaacttctagaagagactgaaaaggctgttggtgaccctgatttacctattcagcatcgccaacttgtagagagaagtaaggaactgaaagcgtttgaagtggctataaggcaaaacgaacagactttgaataatttgaaggccctcaatgctgaacaagaaagagatgttgagcgtgttcgactaagagataatctccttagaaaggctgaatcaatgaagaagaaggtgccatggctgaaatacgacatgatgaagaaggaattcatagaagtgatacaagagaaggagaaaattgcaaagcaagaaatggaagaagcagctagagtctgggaagattcaaaaggccctattgacaaactcaagaaacacaaggcaactcatacttcaaatataaagaagataagcggccaagtaaatcaaaacatggacaaccgtcataaagttatggaccacgatttaaagctgaatgcagaactgaaagctacatttgatgaaatggatgacctgaaaaagcaagaaaaatctcgccagcgaaggatcctgaaaactaaggaagatcttgctgctgctgaaaaggaacttgaagatctacagccttatgaacttcctaaagctgaaatggcacaactaacagaccaaattgcacgaataagtgttgagataaaaaacttaaaagcggaaaggaatgccatggagtctcagttagctcgagaggaagaaagcttgaggagatgttctgataggttgaaggaaatggaaagcaagaatagtaagctactccaagcattacgaagtgctggtgctgataaaattattgaagcataccactgggtgcaagctaacaaaaagaatctcaggcaagaagtttacgggcctgttctccttgaggtaaatgttcaggataagcttcatgccacttacttggaagaccatgttccaaactatttatggaagtcattcatcactctggatgcttcggaccgtgactacattgctagagaaatgaagcagtatggcattcctgttctgaactacttagtgcgcgaaggcacaaggagacggccattaaacatcactccagagatggagcaacttgggatctactcccgacttgatcaagtatttcaagcccctgacactgtgaaagatgttttgattagtcaggcgggtttggatgattcgtacataggtacagatgaaactcatcgcagagcagatgaggtgtcaaagctaggcatctatgacttttggactccggataatcattatcgatggtccaaatcaagatatagtggttatatgtcagcatttgtagatgcaatccatccttctcgtctcttcaagagcaatctggatgtaagcggcattgaagatcttcgacttcagaaagaagaccatgtaacaaatattgaaggaatgcgtgaagctataaagacgcttcatagaaaacagagacagttagaagacgaagaggcaaatatacacaggcagaaggaagaaattattaatgcgatgagataccacaagaagacacgagaagagatacaaagacgtgttgatatcaaaaagcgaatactgaaggacatatccagagaagacgatgtagaatccagcacgagaaagcttgttaatcaggttgctaagataaatgatgagaggtttcatgcaatgataaaacttaaggatttgcttactgaagctgttgctctcaaatggagtcacacagaaaagaatatgactttaattgagctcgatacaaagatatgggagatggaaaagggtgtgaaaaaacttgaaaaggatgctaatcaggcggctagaaactacgaagattgtagaagaatcactcaggagcataggcggaggctgtctattgcaaaacagaatgcagagtcgatagccatgattactaaagaccttgaaaaagagttttgtgcgatgcccactaccttagaagagctcgaaactgcaatacaagatactgaatcagaggcaaattctatgctatttcttaaccaaaatgttttgcaggagtatcaaaaccggcaacatgagatagaatcaatctcaaataaacttaaggatgataagggtgaacatgagatctgctgttctgaaatcgaaacagtaaagggtaaatggcttccgactctgcggattcttgtttcaaaaataaacgacacattcagtcgtaactttcaagaaatggcagtcgctggagaagtttcactggatgagcacggtattgattttgatcactatggtattcttataaaggtgaaatttaggcaaactagtcagctgcaggtgctaagctctcatcaccaatctggaggggagcgatctgtatcgaccatcttgtatcttgtgtcacttcaagatcttaccaactgcccttttcgggttgttgatgagataaatcaaggaatggaccccataaacgagaggaaaatgtttcagcagcttgtcagagctgccagccaaattaacacgccgcagtgcttccttctgacgcccaagctcctacctgatctggagtacagcgatgcctgcagcattctcaacattatgaacggcccatggattgaggagccagcaaaagcttggagctccggtgattgttggaggacagtggtcagcgcagctggacactgagcgccgagtattttgccttggaccgtaggaggcttgtaaagtttagcgtgtagagctggatgcagcttttgggtggttaatttaagtttgtagttgtactacatgtaagtttaggaaagttaaggtagctggtggcattatcaatgtggaaccagatgttgagctgctcaaatcacttggcagcccttttgacacgggagggtaaggtactgtggaatgatccctaccctgtaccggccagtattcctggaagtgaccagtttacttaagtaattgttttgcagcggaaaagcagcaggcatgcaatgtctgtctacttgctgtgacaagtctgactcctttagggctttagtacttttgttaggagtagagatggaaggggattaaattaattggtagtaaaaaatgaataggaacggatttaatctcaa

SEQ ID NO: 130669 - DNA, 1154 bp, Zea Mays
tactcatgttgtggtcttgtcatttctcaataaattgggtagtagatgatgccttggacagttgaaccatccaaaataaagtcaaatttgagttgaaccttgggcagttcaacagttcatctactgaatcataatctgttttgagcttctaaatcaatctcctactctgcctagaattctctttgatacaatttcgattttacagatagaatcaatctcaaataaacttaaggatgataagggtgaacatgagatctgctgttctgaaatcgaaacagtaaagggtaaatggcttccgactctgcggattcttgtttcaaaaataaacgacacattcagtcgtaactttcaagaaatggcagtcgctggagaagtttcactggatgagcacggtattgattttgatcactatggtattcttataaaggtgaaatttaggcaaactagtcagctgcaggtgctaagctctcatcaccaatctggaggggagcgatctgtatcgaccatcttgtatcttgtgtcacttcaagatcttaccaactgcccttttcgggttgttgatgagataaatcaaggaatggaccccataaacgagaggaaaatgtttcagcagcttgtcagagctgccagccaaattaacacgccgcagtgcttccttctgacgcccaagctcctacctgatctggagtacagcgatgcctgcagcattctcaacattatgaacggcccatggattgaggagccagcaaaagcttggagctccggtgattgttggaggacagtggtcagcgcagctggacactgagcgccgagtattttgccttggaccgtaggaggcttgtaaagtttagcgtgtagagctggatgcagcttttgggtggttaatttaagtttgtagttgtactacatgtaagtttaggaaagttaaggtagctggtggcattatcaatgtggaaccagatgttgagctgctcaaatcacttggcagcccttttgacacgggagggtaaggtactgtggaatgatccctaccctgtaccggccagtattcctggaagtgaccagtttacttaagtaattgttttgcagcggaaaagcagcaggcatgcaatgtctgtctacttgctgtgacaagtctgactcctttagggctt

SEQ ID NO: 130670 - DNA, 3590 bp, Zea Mays
aaacccgcccaatacccaaacccctccgctctacaatagccgaaaccctagcggccttgcgccggccatggcggcaccgcgcgccaccaagcgccccaagtttgcctccggcgcggcgccgccccagcgaggggaggacgactacgtgccggggaacatagtagagattgagctcttcaacttcatgacctacgaccgcctcgtctgctgccccggcccgcgcctcaacctcgtcgtcgggcccaacgggtctgggaagagctcgctcgtctgcgccatcgccctcggtctcgccggagaccccagcattctcgggagggcgtccagcgtgggtgcatttgtcaagagaggggaggttgccgggcacgtcaagatatctctccgcggggatacagctgacgacaagatctgcgttactaggaaaattgatacgaagaacaagtccgagtggctcctcaacggtgcaactgtcacaaaaaaggaagttattgacgtgattaagaaattcaatattcaagttaacaacttaactcagttcttgccacaagaccgggtatctgaatttgcaaagctaagtcccattcaacttctagaagagactgaaaaggctgttggtgaccctgatttacctattcagcatcgccaacttgtagagagaagtaaggaactgaaagcgtttgaagtggctataaggcaaaacgaacagactttgaataatttgaaggccctcaatgctgaacaagaaagagatgttgagcgtgttcgactaagagataatctccttagaaaggctgaatcaatgaagaagaaggtgccatggctgaaatacgacatgatgaagaaggaattcatagaagtgatacaagagaaggagaaaattgcaaagcaagaaatggaagaagcagctagagtctgggaagattcaaaaggccctattgacaaactcaagaaacacaaggcaactcatacttcaaatataaagaagataagcggccaagtaaatcaaaacatggacaaccgtcataaagttatggaccacgatttaaagctgaatgcagaactgaaagctacatttgatgaaatggatgacctgaaaaagcaagaaaaatctcgccagcgaaggatcctgaaaactaaggaagatcttgctgctgctgaaaaggaacttgaagatctacagccttatgaacttcctaaagctgaaatggcacaactaacagaccaaattgcacgaataagtgttgagataaaaaacttaaaagcggaaaggaatgccatggagtctcagttagctcgagaggaagaaagcttgaggagatgttctgataggttgaaggaaatggaaagcaagaatagtaagctactccaagcattacgaagtgctggtgctgataaaattattgaagcataccactgggtgcaagctaacaaaaagaatctcaggcaagaagtttacgggcctgttctccttgaggtaaatgttcaggataagcttcatgccacttacttggaagaccatgttccaaactatttatggaagtcattcatcactctggatgcttcggaccgtgactacattgctagagaaatgaagcagtatggcattcctgttctgaactacttagtgcgcgaaggcacaaggagacggccattaaacatcactccagagatggagcaacttgggatctactcccgacttgatcaagtatttcaagcccctgacactgtgaaagatgttttgattagtcaggcgggtttggatgattcgtacataggtacagatgaaactcatcgcagagcagatgaggtgtcaaagctaggcatctatgacttttggactccggataatcattatcgatggtccaaatcaagatatagtggttatatgtcagcatttgtagatgcaatccatccttctcgtctcttcaagagcaatctggatgtaagcggcattgaagatcttcgacttcagaaagaagaccatgtaacaaatattgaaggaatgcgtgaagctataaagacgcttcatagaaaacagagacagttagaagacgaagaggcaaatatacacaggcagaaggaagaaattattaatgcgatgagataccacaagaagacacgagaagagatacaaagacgtgttgatatcaaaaagcgaatactgaaggacatatccagagaagacgatgtagaatccagcacgagaaagcttgttaatcaggttgctaagataaatgatgagaggtttcatgcaatgataaaacttaaggatttgcttactgaagctgttgctctcaaatggagtcacacagaaaagaatatgactttaattgagctcgatacaaagatatgggagatggaaaagggtgtgaaaaaacttgaaaaggatgctaatcaggcggctagaaactacgaagattgtaaaagaatcactcaggagcataggcggaggctgtctattgcaaaacagaatgcagagtcgatagccatgattactaaagaccttgaaaaagagttttgtgcgatgcccactaccttagaagagctcgaaactgcaatacaagatactgaatcagaggcaaattctatgctatttcttaaccaaaatgttttgcaggagtatcaaaaccggcaacatgagatagaatcaatctcaaataaacttaaggatgataagggtgaacatgagatctgctgttctgaaatcgaaacagtaaagggtaaatggcttccgactctgcggattcttgtttcaaaaataaacgacacattcagtcgtaactttcaagaaatggcagtcgctggagaagtttcactggatgagcacggtattgattttgatcactatggtattcttataaaggtgaaatttaggcaaactagtcagctgcaggtgctaagctctcatcaccaatctggaggggagcgatctgtatcgaccatcttgtatcttgtgtcacttcaagatcttaccaactgcccttttcgggttgttgatgagataaatcaaggaatggaccccataaacgagaggaaaatgtttcagcagcttgtcagagctgccagccaaattaacacgccgcagtgcttccttctgacgcccaagctcctacctgatctggagtacagcgatgcctgcagcattctcaacattatgaacggcccatggattgaggagccagcaaaagcttggagctccggtgattgttggaggacagtggtcagcgcagctggacactgagcgccgagtattttgccttggaccgtaggaggcttgtaaagtttagcgtgtagagctggatgcagcttttgggtggttaatttaagtttgtagttgtactacatgtaagtttaggaaagttaaggtagctggtggcattatcaatgtggaaccagatgttgagctgctcaaatcacttggcagcccttttgacacgggagggtaaggtactgtggaatgatccctaccctgtaccggccagtattcctggaagtgaccagtttacttaagtaattgttttgcagcggaaaagcagcaggcatgcaatgtctgtctacttgctgtgacaagtctgactcctttagggctt

SEQ ID NO: 130671 - DNA, 387 bp, Zea Mays
atggccaggtgggagaagggggagggagaggtgctagtggctaggattcagatagataagaaggaaaaatctcaaacccaagagaccttaaaaagattcttaagacaggctcaaaatgagttcggattgagaatcaaaaagattagaagcgacaatggcacagagttcaagaactctcaaattgaaggatttcttgaggaggagggcatcaagcatgagttctcttctccctgcacacctcaacaaaatgatgtagtagagaggaagaatagaactcttttggatatggcaagaaccatgcttgatgagtacaagacaccggactggttttgggcagaggcaattaacaccgcttgctactccatcaatcggctctaccttcactga

SEQ ID NO: 130672 - DNA, 113 bp, Zea Mays
gaaaagtggatagatgagagaagagagggtatctatatagagaggatgaataagtatcctctatatttagaggaaaccttagagaacacgttgtttagggtttaggaagcgac

SEQ ID NO: 130673 - DNA, 864 bp, Zea Mays
atgcatgatgcagacctaatgctcaaaggaccaacaaatgtcaaaaaagcacaacaacagagctccatcaaaatcacaagaaaccataccaaaatcagggttcctacagatgcacgcgtcgtggatccacctacacgtcccagcttcgcttcacagattaaaggaacagattatcccacaactgatggaacctgcataagagattatattgatgtcacagatttacttgatgctcatgtgaaagcactcaacaagcagagcctagaaaagtcggcatttacaatgttggaacaggaagaggttgtaataaatactttgcttaacttacatggtcgctcggttaatgagtttgttgatgcctgcaagaaggcaattggggtctacatcaaaattgagtacctcaacagaaggccaggagattatgcagaagtatacagcgacccaacaaagatcagcaaggagctcaactggacaactcaatataccgatctcaaagagagcctatcagtcgcatggagatccggcggcggcctcagatctgagaattcgaaaggggaagtcccacctgaggaggccaatggtggcgcatggcacggcgagggctgcgcgtggtcccgaatgggcggtgctggcgccagcagaggggtgcctaatccacgcacgggattgccttccatggagactgcggacgccacaacgcggacacggacgctgatgccgggcggaggcgacgatctggggcagaggggtacccaatccacacgcgagatcgggctgtcgcggacgcggatcgagggccggcgcggtgatccggggcagaggacccacgttccatggatagcggagagccggggcggggtttag

SEQ ID NO: 130674 - DNA, 769 bp, Zea Mays
ctcattcattcattcatccatcacccacccctcccggcctcccctgacctctctcgatcactcgtcatctccaccacacacacacacgcgcgagcgaatccaaggaagaagaagaggaggaggatccatggagaagtgcaggtcggtgccgcacgagcactcgtcggcgtactacggctgcggaggcgggtacgactacgaggacgtcggcggcgggcccgggcaggccggcaagtcgtacagcttcaacgggccgagcggccgggacgacccggaggcgaagcggcggcgccgcgtggcggcgtacaacgtgttcgccacgcagggccggatcaagaccaccgtccgcagcagcgtcaagtggctcaagtccaagttctccgacgtccgctacggtggcctctgaactgatctgatgagcgtgagcctactgcatgcaacgcatcctactcctacgaccgcacacatatatgtgtatgcacgaaccatggtgctcatatatatgcaattatatatgcacgcgcaagctatacgcgtgccaagctaaatagctgctgcgtatatatactactactactgtgtacatgtgcgtgtatgaactgtgtgtgtatggtctcaagtcactgcatgtgttcgtggctgctttccagatcggtcagtgtgttttctcggtttgcttttggatctgcacatcaagttgttgtatcaccagccaccagagggaccatgccctttgctttgatctggttcgccttttcagttccccaca

SEQ ID NO: 130675 - DNA, 769 bp, Zea Mays
cacttggacgggctcgcgtctcgcgcacgcagctttctactgccatcctccgtgtatgtatatatcgtcacgcgcgagccttgtcacccgtcttctctccgcctcgcgcacccggttccgcgtgcctttccccacctactctcgcggctctcgccagccagtctagggtttcggtcccggcgtgcttatccgcccccgccggccatgtcgaagcaaggagggaaggccaagccgctgaaggcgcccaaggccgacaagaaggagtacgacgagacggatcttgcatatctgcagaagaagaaagatgaggaaaaagcactgaaggagcttaaggccaaggcacagaagggcgcgattgggggctcgggtctgaagaaaagtggaaagaaatgagactggtcacccgtctccaatacctagaggatgataaggcagctgtctatctgtgttgcgcttcactaagtgtgattgtaacagtggtacctcttgtgttctgtgttccgcgatgttgcagttggttgcttgatcgaaagatgtttcaacctcccatctgctagctatgatacagatggtcccctgataataatgatgacatattctgtgatggatgccacagcattttttgtttttgtttttgcattcagatatttcagcttccttatagttttacatgtcccaactaggaatgagaagtcattctgttggtccaatctaaattttatgtgtgttagtggagtgccaaagagagtggatatgtagaacaatggtt

SEQ ID NO: 130676 - DNA, 2355 bp, Zea Mays
ggcaagatgttcgacagcttgctcaactccaagttctacaacaaatgtaagcacgccttcaaatgcatccggacgcggatggctctgataaggcggaagaagcacgccatgatccggttcctgaagaaggacgtcgccgacctcctcgccaatggcctcgacacccacgccttccgaaggatagatggcctcttagttgagctgaaccatgcttcttgctatgatatgatcgaaggattctgtcattacattgggaagcaactgggaagccttcagaagcagagggattgccccccagaattcagggaagctgtctcaaccctgatatttgctgctgctcgctatcctgatttacctgaactttgtgacctaaggcacatattcacagaaagatatggaaattttgttgagcattttgttagccaggagttcattcggaaacttgacagtacagagttcactaatgaggaaaggttccaagtcatgcaaagtgttgctgaagaattatccgtcagttttgatgccaaggaattggaactcaagttatgggcctcactacaaacagaacatgatatgcttgagaagggttcaaggaagccagcagaactagcaatgccttcatcgagcaagcagatatgtgtcgagaatgcttcatgtgaagaacaagaggatatccttgagaagagtttgacaaggccaacagaaccagcaatgtctttatttgacaagacaaagtacaatggggatgctccatgtgaaagaaaaaataaggatatgcttgagaattactcaaccaagcccatagaactagcaactgcttcatccaacaagcagaaggttactgagaatgttccaggtaaaagaaactatgatgctgaacctgcacaccataccgagaaagtggagatacagttggtccaaaaagatattcagtctgttgctgatgcacatcatacaattgatgagaattcgaggaagcagcaaccttatgtgtctgatgagaaggaacatttgcagaaaccagtgtctcctgtggacactaacaggacccaaaaagatgttcagaagcttaacagaagagctgtccgccatttggaaaaggagctgatggaggcagtggaacttgatctcaacggcctaccaaaatttggatttggcgcagtcagatttcccgaagcagaaggcaacaaaacagttcaactaaatgtcaagccaaatgaggccgtgagagatttccatattgaaaaagagaatgatgaagtccttcattgttcacgtttgcctggtggttctgaacacaatgggggacatgcagattcagggctaagagctcagggcctagagaatcaaggacatccagtgagtcctcttagtggtaacactagaaaaaaggctccttacactaagctgaatgctgtaaacataaagaatcctactgagaaacaagcaaacaatggtttcttgcatgataaaccgcaacatttagctgatctgggatacccggtgcagaaaggacaaggagacccagagagggcacttactatgctgcctccttatgttgaaccaaagtctaacatgcaacctgtgaatgatgatcctgaaaagcaaactccaagtggttacagaaagcccaacatccctggacaaactgatcacttggaaaacaaaaatgtgcttcgacctgtttctgtcagaaggagaactgcaaagctgccagcacctgttgatgcttatgttgaggtgcctaacaatgcgaaggtcacaagccaaacacccaaaagtcacagaagccactcaagcaggaggaatggtgctaaagatgaccagaaccggaaatgtaatgggactgatgatgttggtagcgagacgaatgctcagataactccaagtagccaatcaaagcacgtaggcaggaggaatggagctttaaaccacaagaacaactctggcaggttgatgcagcgtatgcaacctgaagcagctgagactgctattgattgtggtaatctcttgcctcgaaatgcaaatggacagatgcgacacaacagcgggcgcggtggagacatggatgaggaggaaaggatgatggacaagcttttgatgcactatagcaagaaaggttcggatctgaccaacaatgaaacacatacagatgctgcgcagaaggtttccttgcatcccacgggtagagctatctcgctaccacctgaatctgttggcccgagcaaagatgcgaaggttcctgctcgatgcacatcacttcagccggaaggtcctaggagtgcgcatgttcacccaaaaatgccagacttcgatgaattggctgctcgggtcaaggctctgaggaaggcttga

SEQ ID NO: 130677 - DNA, 441 bp, Zea Mays
atgactgatgtggagctgtggcagcaacttgaaagtgagttgtaccggaagagggagggagaagaggatgacatagccgaagagatggctgaaagtacaattgctgaggaggtgggtggcatggctgaagatgtgctcagcgagacaaaggaagtgcataggttctaccctcctagaaaaatcatgcacatattattctccagcagggaagaagcagttcgtggagaggagcctgaggatgatgttacggatggggaggcacaaagcagcctagggatcttcttgacgccaagatctctgtacggcaagctgaggctttcgaaaatgatgatcaatgaccattacatgcctatatatagaagaaacattgagcagctgatcgcggagcttgagaaggattccttggatcatagttcgatacagatagcccggtgtagttga

SEQ ID NO: 130678 - DNA, 1876 bp, Zea Mays
gctcgaccagatttggtctgcttgcaagaaacaaagaaggcctctatctcccgttttatggtgatgtctttgcttggaagtgagtttgaccatttcatttgtctccctgcactgggcacgcgtggggggatattggtggcttggaaggggggcacttgtaaggttcttcagaccagagtagatttttttttcagtttctgttcaagttgatcatatttccggtactccttggtggtttactggggtgtatggccctcaaccagatgatcagaagttgcagttcttaaatgagttgcgctcaattcgctcggcatgtttcggaccttggattattggtggggattttaatcttatatatcgagcagaagacaagaacaatggcaaccttgacagggctatgatgggtagattccgtcgcattcttaatgagttaaatctgtcggaactgccattgatggggcgcaaatttacttggtccaatgaacgagcaagtcccacgcttgttcgtttagaccgagtctttcacacttcagattggggggattatttcccggactgcgttttgcaaagttcggcaacagtcatttcagaccactgtcctcttctgttggggctgcatgagtattcccaaggcaaaagacggtttcactttgaaagctattggccaaaattggaaggttttatggagaaggtggaagaatcttggttacagccagagcgcactatggccagaacaagaagtggacttcgctggttgaaagaaggcgaagctaatacatctttttttcaccaacaggcacgatatagaaagaagaaaaatttcattgcaaaattgaaagtagcagacagaatcttggtagagcaggaggaaaaacaagaagttgtgtgggatttttataataatctcttggggactgctgtgcaaaggaactgctctctcaacctggctgcttttcatattccaacccgaaaccttgagcagttggaaagggacgtcactgaggcagaggtatgggccactattaattctatcccttcagacaaagctccagggcctgatggatacacggggcgcttctataagcatgcatggccaatcattaaaggggatttcatggcagctatggggaggattttgttgggtgatgtatcgaatttgcaccttcttaactcagctttggtgactttacttcctaagaaatctgatgctgcagagataaaagattttaggcctatcagccttattcatagttttgctaaaattgttaccaagttaatggcaaaccggcttgctcccacgcttcctgagctgatatccccaaaccagagtgcttttgtaaaagggagaagcatacaagacaactttattatggtgcaacaaacagccagagcaatccacaaacaaaaaatccccaatgtgcttctcaaactggatattggcaaggcatttgattctgtttcttggccatttctgctggaagttcttgggcatcttggtttcggtccagtttggtgcaatcttatctccaagttattatgctcatcctcgactagggtgctggtgaatggtgaacctggaaagcttatttgccaccaaagaggattaagacaaggggatcctttatctcctatgttgtttatcctagttatggatgttttgaattcacttttctcgcgggctagcgatttgggcctgctgcagcctctcttgagaaacagaaatgggcaaagagtctccctgtatgcagatgatgtagtgctgttcatgcagccaagagatgaggaagtgcttatggtgaaagaaatccttagaatttttggagaagcttcgggattggtcacgaacttgagcaagtgcagtatgactcctattcag

SEQ ID NO: 130679 - DNA, 2712 bp, Zea Mays
ggctacagtcctacgtacagccatctggaccagagttctcaactactgccgccggccacctcctccgcccgccgccagcgtctccggctccgatcacctcccccgcccgcttacggccatctccccgcccacctacggccaccgccgcccgcgaaggcgtctccggatccggccacctcctccgcccagcgtgtttaccggacacgtctgccacccgtcaggccctgcccgacgctagggttgggcgacggcgtccaccggctgacgcccggggagatctcgcccgctctgctccatccaggtgcgaagtaatggaggtgctctgcatcggaacagcggataccaagtttgaggagctgcttttcctcgcggcgcaactccgctccgccctcgccgcctctggctccgactcgaaggttcaagtgagcatagtggatgtctccacaactgaaaagacaacggcaaatgatttcaaagacatcatatttatccctagaaatacaattctttcatgtcatttgggtgttgaccaacataatcttccagataacagaggtgaagcaattgcactcatgtcaaaggctcttcagagcttccttaaaaaaagatatgacagtggtatgctggtgggtgctgttggtttaggaggcagtggaggaactgcactaattgctcctgctctgaggttgttgccacttggagtgcctaagcttattgtatctactgttgccagtggtcacactacaccttatgttgaaacatctgatttggtcttgtttccttcggttgttgacatctgtggaataaacagtgtcagtcgtgttatattatctaatgctgcagcagcttttgctggaatggtacatggaatcttgtcggcgtccaatgagtctgatgaaacgtcaacaaagccaactgttggtattactatgtttggtgttacaacaccatgtgtaaatgcggtcaaggatagactgaacaaagaaggttatgagacccttatattccatgccacaggtgtaggaggcaaagcaatggaagacctagttaggggtggttttatacagggcgtgttggatgtaacaacaacagaagttgcagaccatattgtagggggcatcatggcttgtgatgagaccaggtttgatgcaattatagagaataagatccctcttgttcttagtgttggagccttggatatggtaaactttggagctcgagatacaattcctcttgctttcgcagaccgaaatattcatgttcataatgagcaggtttcattgatgcgtacgactgtggaagagaacaagaaatttgctaggttcattgctgataaaataaacaaatcttcatccaaagttactgtttgccttccccagaagggcatatctgcaatagatgctccaggaatgccattctatgatccagaagctacatctacactgttgggtgaattaaacacccttatacagagaaccgatattcgagaggtgaagctgtttccttaccacatcaatgaccctgaattcgcaaatgcattggtagatgcattcttgagtatggatgtacaggcctctagttcagcccaacctaagcaagatcttaatattggaaaatcctgttcaggacagaaaatttcagatagttctattatatggagaactcctgtggattttccagatgcaaaaccagaaatattgcggaggacgcggtcaatattacataaactgaaggaacagatcagtgacggtactccagttattggagctggtgctggcacaggcatatctgcaaagttcgaagaagctggtggggttgatcttatagtgctgtacaactctggacggtttcgaatggctggaaggggctcactagctgggctcttgccctttggtgatgcaaatgacattgtacttcagatggccaacgaagtgttgcctgtggttaaaggagttcctgttcttgctggggtatgtgctacagatccatttcgtcgaatggaatactttctcagacaactagaaaccattggattttgcggtgtgcaaaacttcccaaccgtaggtctgtttgatgggaattttagacagaatttggaggaaactggaatggggtacagcatggaagtggagatgatttcaatggctcatcgcatgggtttccttactactccatatgctttcaatccggatgaagctgctgccatggccaaggcaggagctcatatcgtagttgcacatatgggtctgacaactgcagggtctatcggggcaatgacagctgccactttagatgatagtgttttacgtgttcaggccattgcggatgcggcatttggggttaatcctgatatcattgttctctgtcacggaggccccatatctggacccctagaagccgagttcgtattgaagaatactaaaagggttcatggattttacggtgcatcaagcatggaaagattaccagtagagcaagctatcacgaacaccatgagagagtacaaaagaatttccttaaaatgagaaccatcgtttacatgcgtgatttaagcctgctgttctttcgttacacttcgcagattctgtcatctctgcctctttatttgtcatatacattttcttaccaatgtacctttcttgttggaatataatcataataaatgttttctttgacgaggctgcgtaatgtcttaattattaccgtccattc

SEQ ID NO: 130680 - DNA, 2048 bp, Zea Mays
tctccccctcaaaaactatccacccctccacggctccacccctacccgccgacgagcgcgatcgattgattcggttcgagccgggcggaggaggagggagcgccgcggggcggggtgagcccaccagatccgactaccgcagcggctatgatgaagtcgctgctgccgcagagccagctgcggcgctcggcggcggcggccgcgcggtcgtcggcgggcggcgccgcgggggcagacggggctatgtccgacggcggcggcgcggggccgcgggcgcccgcctcctccaccttctggttcctgctccacgcgctctgctgcctcatctcgctcttcctcggcttccgcttctcgcgtctcctcttcttcctgctcttctccaccaccgcgctctaccgctccagcacctcctcctcctcggccgcggtccttcgcgccaccaccacgacaaccaccaccacgaccaccacgacgacgacgaccaacaccttcacgctctccttcgccgccgccaacactcccccttccacccccgctaaccgcaccgcgctggatgtggccgacaagggggcggcgtccgggaacccacagagtcacgtcgtggtggggaggcacgggattcggatccggccgtggccgcacccggaccccgtcgaggtgatgcgggcgcaccggatcatggagcgcgtgcaggaggaacagcgccgctggtacggcgtcaaggagccgaggcaggtgctcgccgtcaccccgacctactcacgcgcgttccaggcgctccacctcaccggcctcctccactcactccgcaacgtgccgtacccgctcacctggatcgtcgtcgaggcaggcggcaccaccaacgccacggcgtcaatgcttgcgcgctctggcctcactttcgttcacatccccttccctgaccgcatgccccacgactgggccgaccgccacgccactgagaaccggatgcgcctccacgccctacgcgtgatccgcgagaggaagatggatggcgtagttgttttcaccgacgacagcaatgttcatagcatggagctgttcgatgaggtgcagaaggtccagtggatgggtgctgtatccgtcggaatccttgcgcatactggcacggcagaccaactacggctcagcgaggaggacaagcagaatatgcctcttccagtccagggccctgcttgcaactcctcagggcatctgattggatggcacacgttcaactcattgcccttctctgggaagacggccacagttgttggtgaagcagcccctgttctgcccaggggtttggagtgggctggttttgtgttgaactcaaggatgctgtggaaggaggctgacggcaagcctgactgggtgaaggatcttgatgctgtgggcgagaatggcgaggagattgagaacccacttactctgttgaatgatccgtcctctgttgagccactgggcaactgtgggaagaaggtcctactgtggtggcttcgtgttgaagcacgggctgatagcaagtttcctgaagggtgggtaattgagccacctttggaagtcgttgtccctgcaaagcgcactccatggcctgaaacaaccaccgagctgccagccgagttattggatgacaagcaagagcaggaggataggcgcttgtcaagagccaacaaatcatctcggccccgaggcaccacgaagcggaagggcgaccctcaaggacaagataactgatgcagaacgtactggccttgtgatgtatatcttacaccctgcaaaaacacagtagcaagcatatcctgttaatctggcggtgtctgtttaatttttcttttcttttctgatgtttttgctcctgtggcgatggtccacgcttgggtatgttatctgtagagggcacatttttaaagtagtggttgtatcttttgtgttgaaatgtacaatgcattgggagctaaaaaaatggtggatgaatactggaagtctgtctatggttctgaagaaagtactcaactcttgcatgccggctgatggctgggtgcgca

SEQ ID NO: 130681 - DNA, 2002 bp, Zea Mays
tctccccctcaaaaactatccacccctccacggctccacccctacccgccgacgagcgcgatcgattgattcggttcgagccgggcggaggaggagggagcgccgcggggcggggtgagcccaccagatccgactaccgcagcggctatgatgaagtcgctgctgccgcagagccagctgcggcgctcggcggcggcggccgcgcggtcgtcggcgggcggcgccgcgggggcagacggggctatgtccgacggcggcggcgcggggccgcgggcgcccgcctcctccaccttctggttcctgctccacgcgctctgctgcctcatctcgctcttcctcggcttccgcttctcgcgtctcctcttcttcctgctcttctccaccaccgcgctctaccgctccagcacctcctcctcctcggccgcggtccttcgcgccaccaccacgacaaccaccaccacgaccaccacgacgacgacgaccaacaccttcacgctctccttcgccgccgccaacactcccccttccacccccgctaaccgcaccgcgctggatgtggccgacaagggggcggcgtccgggaacccacagagtcacgtcgtggtggggaggcacgggattcggatccggccgtggccgcacccggaccccgtcgaggtgatgcgggcgcaccggatcatggagcgcgtgcaggaggaacagcgccgctggtacggcgtcaaggagccgaggcaggtgctcgccgtcaccccgacctactcacgcgcgttccaggcgctccacctcaccggcctcctccactcactccgcaacgtgccgtacccgctcacctggatcgtcgtcgaggcaggcggcaccaccaacgccacggcgtcaatgcttgcgcgctctggcctcactttcgttcacatccccttccctgaccgcatgccccacgactgggccgaccgccacgccactgagaaccggatgcgcctccacgccctacgcgtgatccgcgagaggaagatggatggcgtagttgttttcaccgacgacagcaatgttcatagcatggagctgttcgatgaggtgcagaaggtccagtggatgggtgctgtatccgtcggaatccttgcgcatactggcacggcagaccaactacggctcagcgaggaggacaagcagaatatgcctcttccagtccagggccctgcttgcaactcctcagggcatctgattggatggcacacgttcaactcattgcccttctctgggaagacggccacagttgttggtgaagcagcccctgttctgcccaggggtttggagtgggctggttttgtgttgaactcaaggatgctgtggaaggaggctgacggcaagcctgactgggtgaaggatcttgatgctgtgggcgagaatggcgaggagattgagaacccacttactctgttgaatgatccgtcctctgttgagccactgggcaactgtgggaagaaggtcctactgtggtggcttcgtgttgaagcacgggctgatagcaagtttcctgaagggtgagttttttttttacattccaagtttttgttaccagctatgctattggggaagtttattttgttagattcaagattcagacatctagactcatccccccaccttgttataagttaagttaggccttatctgacttagctaggttcacggctcaaaatctccaacgaatgcatgtggcaactggatataaaccaactgtctaatagctacccagcaactgaaactgttggccctgtttagctgagctccatcttcaagatacatgtggaccacgccaggtttgcattttgtatgctataataaatctccttaaataaccagtttcagtctttaaataaaatcagacacctcaacactcccgatgtacaccataccttagctccacacatcctgccaggcaggccctttgttacgtttaattcttatatggattttatcatattgaatgtaattgcactgagat

SEQ ID NO: 130682 - DNA, 2217 bp, Zea Mays
tttgaaaacttgtgttcctgtttccaacacagtgaggccacgttgtagggttttgcttgcttcgcccggcggtaaagctgagcgcggcgagagccggagaccgaagaagcgccgcgcgcccggtcatggagatcggacagtaccccgcgagcggctgctccaaggagcaccagaagatctaccaggagtggttcgcgctcgcggacgcagatggggatggccgcatcacgggccccgatgcgatcaagttttttggcatgtccaagctctcccgccctgacctcaagcaggtctgggctatcgcggacaccagaaggcaggggtatctgggtttctctgaattcgtcaccgcgatgcagctagtctctctggcacaagcaggcaacgagattactcaagatagccttaagcgagatgatttgagcagtttgaatccacctgtgatggaaggtttggatgccctacttgcgaaatctaagcatttggtgaagcgtgttgatccagaaatggatggatatcctcaggaacaatctcctttaacaaacaaatggtttagctcaaagtcatcaaagaagatacctctgacagccgtcacttctgttatcgatggcttgaaaaaactttacatcgaaaagttgaagcctttggaagttacatacaagttcaatgattttgtttcccctttgctgacaagtagtgattttgatgcaaagccaatggttatgctcttaggtcaatattctactggtaaaacaacttttatcaagcatctgctaagaacaagttatccaggtgcccatatcggaccagagccaacaacagacagatttgtagttgtcatgtcaggatctgatgaaaggactattcctgggaatactattgctgttcaagctgacatgccttttagcggtcttacaacatttgggactgcatttttatccaagtttgagtgctctcagatgcgacatccactgctagagcatatcacatttgttgacacacctggtgttctttctggtgaaaagcaacgcacacagcgcagctatgatttcactggtgtgacatcatggtttgctgcgaagtgtgatcttatccttctcctgtttgatcctcataagctcgatatcagtgatgagttcaaacgtgtcattggatcattacgtggccatgatgacaaaatacgcgtagttttgaacaaggcagaccaagtagacactcaacagcttatgagagtttatggtgcattgatgtggtctctcgggaaagtattgaatacacctgaggtttcacgtgtttatattggatcattcaatgacaaaccagtaaatgaatcagctgttggtccacttggaaaggaactatttgagagagagcaagatgatcttctttctgatctcaaagatatccccaagaaagcctgtgaccgccggatcaatgaatttgttaaacgtgctagagctgccaagatccatgcttatataataggtcatctaaagaaggagatgcctacaatgatgggcaaagcaaaagcccaacaacgactcatagacaatctgcctgatgagtttgcaaaggtgcaacgggaataccatcttccgtcgggagattttccttacgtggagcacttcaaagaggtgttgagcgggtacagctttgacaagtttgagaaggtgaagcccaagatggtacaggccgtggatgatatgcttggatatgacattcctgaacttctcaagaacttcagaaacccatacgagtgaacccatacaggcggttgaaagatgacttcgatctgcaacagaatgagggattgattgtcaggcgatgtgaatcatagtggtcaatgtctcttggggcgttcattgccatccatgcttagccattgttatataactttatgcataagaatcatagagccattgctcaagctttcaccagacatctgattatgtaaaatcgacaaaatagtgatgttagtgttaaagaatatactgtgatgttgtttcttcaaatgagtatttattcgtttggaacagctggagaatgtgggtttgtcaattatcagcccatgaagaatatttggaccaccgtggggtgttgtcctgagcatggctccttgttttgattttataatgtcatgtatgttgtggcgctgcaaaatctgctgtgatatgttgcaaatatatttttgaaagacgaacttttgagaaattaatt

SEQ ID NO: 130683 - DNA, 1646 bp, Zea Mays
aaccacctcccgaatcccatcttcttcatctcgctgcggcctccctcctcctccactggagccgacacttgatccattccccatccccatcccacgcggccaccaccaccttctcctcctccccctctccatatctctctctctccgggcaaggaggaagaggagcagtagatcagtcgtagcaataaatccgtcacgcccagctcgcctgctccgcctcgccattgccttgctccaaccaagcaggagtagatgaaggggctgagcggggcgaagctgctggtcgtgcacccgtcgtccaacaagtcgcccggcggcgcggggtcgcccggggcggttctgggcgcgcggcgccgggtgtgcgccgccgtgttcctggcctgcttcgcgtgcgtctccctggccaccacgctgctgtcggccgcgcgggaccccgctggcgcgggggcgaggtcggcggcgttcgcggtgccggtcgccgcggcagcgagggagggccagggcctgccggggcacgtgttcgacgcgctggtgcagtacgcgtcggcgggcgggaactcgacggcgagcatgccgggcgccgacgtgcgcgccatcgccgccgtgctcaggcgccgcgcgccgtgcagcctgctcgtgttcgggctcggcgcggagacgccgctgtggcgcgctctcaaccacggcggccgcaccgtgttcctcgacgagaaccagtactacgtgtcccacctggagggccgccacccggggctggaggcctacgacgtcgcctacaccaccaccgtccgcgagttcccggacctgcttgactccgcccgcgccgcgcggggcgccgagtgccggcccgtccagaacctcctcttctccgactgccgcctcgccatcaacgacctccccaaccagctctacgacgtctcctgggacgtcatcctcgtcgacggcccgcgcgggtacacggcttcgtcgccgggcaggatgtcggcgatattcacggcgggggtgctggcgcggacgcgggccggggagggcgtgaagacggacgtcctggtgcacgactacgagcgggaggtggagcgggcgtgctccagggagttcctgtgcgaggagaaccgcgtcgtcgagaccagcacgcggtcgctcgcccactttgtcgtgcgcggcggtagttctgcccgccgggacgccttctgctccggcacggcggcggcccactagcttcactcttccccgtcactcacctcacctcacctcacctgttcttctacttttttttttcttaaaaaaaacctctctcgatctcgatcacggttaatgatgatgatgcttgtcatgtgaatgcggaaaaaagatgaaaaagtgagcggtgaagcctgtaaaaattgggtgtgacgaaaagaaagaagcagaggaatgtgtctctgtccttgacgactccacgccacggtgcccggtctcattctctgcccgacacggattcattttcatctcctcgcgttagctcaacgcaaccacaaaccagaaccataaatattcctcgcaaagaagcacaaaagccacgggcaatgaaacgtggcattcccaagtcgagctcaacattgcaattgatcgggataagatgaacttgggggcggctttgaacaatg

SEQ ID NO: 130684 - DNA, 1457 bp, Zea Mays
aagccgaaaaggagaaagtaccccgttccgtcggccgcacctgcacccaccgcacgccgagtcacgccccccccccccccccccccccccccccccccccctggaccagccaacgtgacactccaccgccgccggcgccgcggcagcccgtagcaaccgccaccgcctgcccatctcctctctatcccgcgccgcatggccgcgtacttcaaccactcctcgtcctacccgccgccgcctcccccgccgggcacttccccgtacggcgcgtaccgccacgcctacccgccggcgccggcacccccggccgcttacggcgcctactacgaccgcgcagagcaggccctcccggcgcgggacgaggtccgcaccctcttcatcgctggcctccccgccgacgccaagccgcgcgaagtctacaacctcttccgcgatttccccggatacgtctcctcccacctccgcacgggcaaatcctctcaggcgtatgcgtttgctgtgtttgcagatcaacagtctgcactagctgccttgagtgccacaaatggaatggtatttgatcttgagaaaaattgttctcttcatgtagatctcgcaaaatccaattccagatcaaagcgcttgagatcagatgatacttcaccttattctcctgaaaaaagaaataggaaaccaaggggatttcctgattcagttacacaagccttgagtctagtgcttctctcagcaaggacccatccacatttgcccctcaaaataatcctccatgccctactctttttgttgcgaacctggctccagcttgttcagagcaacagctgatagatgttttctcaagttgtgcgggatttgtgaaactcaagatgcaaaacaagcttggagctccagttgcatttgttgatttcaaggatgcaatcagttcaactgaagccataaatcgtctccaaggagttatcctgtactcatcatctggcgagggaatgcgtttagaatatgcaaaatcacggatgggccttcggaagcgtgataagcacccctaagtgcagctgaaagacgacacggcagttgtattttcattcagcacaagcggcagctgagcatgctcaatgatgtctaatagcagacgacctgtcctgacacctgagtccaatgtcatcttcatgcagcgaacgttttgctcatgagttaggctatgaggtccttcagctgcgtagcattatgttacttggtctggttgtatcacttattattacatgtgcacctctttttttcctccttcggaccttgcctcctagtcatcttcagattttaagctaggattatcccttatttacagttggagttattattagaatctattgtgcctgaaaggatcaatctgaactatcaatctgaacgagagggtgaattagttttttctaaaaaatctatataaattaaaatctattaatgaccct

SEQ ID NO: 130685 - DNA, 1995 bp, Zea Mays
ccccgttccgtcggccgcacctgcacccaccgcacgccgagtcacgccccccccccccccccccccccccccccccccccctggaccagccaacgtgacactccaccgccgccggcgccgcggcagcccgtagcaaccgccaccgcctgcccatctcctctctatcccgcgccgcatggccgcgtacttcaaccactcctcgtcctacccgccgccgcctcccccgccgggcacttccccgtacggcgcgtaccgccacgcctacccgccggcgccggcacccccggccgcttacggcgcctactacgaccgcgcagagcaggccctcccggcgcgggacgaggtccgcaccctcttcatcgctggcctccccgccgacgccaagccgcgcgaagtctacaacctcttccgcgatttccccggatacgtctcctcccacctccgcacgggcaaatcctctcaggcgtatgcgtttgctgtgtttgcagatcaacagtctgcactagctgccttgagtgccacaaatggaatggtatttgatcttgagaaaaattgttctcttcatgtagatctcgcaaaatccaattccagatcaaagcgcttgagatcagatgatacttcaccttattctcctgaaaaaagaaataggaaaccaaggggatttcctgattcaggtatgactcaagtagctttttgggcagaatggcatgaaagaaaccatctgtattttcacaccacgaagatcttggtgcttacagcttatgggaggtccactacaatcacttgaacaatataagatgttccaaatccacagttctccctcctagcaatcacaattgatttctaactttcaggggaattagtttatattgtccctataatatatattctactatttcctttgtgttaataccctactaaatgttatatcagtaacttcatatcctcaatgaagtgcctctttactcacatagctgaaaattcttacaaagcactcatcttgcacatctttggcacactttgcgccctatcaggtgctggaagcaatatttacatatctggaatgggtagtacttcacacagcttgagtggttatccttctgcacaaaggttatggcacactactcgagcacagttttatcatgtattcatgtgatgttggagggaccagcttaagctaccctctagctcctacttgaatgtagattaccgatctagattgaagctatgcttttaggaaattatagttgacattgttccgtcttgcagttacacaagccttgagtctagtgcttctctcagcaaggacccatccacatttgcccctcaaaataatcctccatgccctactctttttgttgcgaacctggctccagcttgttcagagcaacagctgatagatgttttctcaagttgtgcgggatttgtgaaactcaagatgcaaaacaagcttggagctccagttgcatttgttgatttcaaggatgcaatcagttcaactgaagccataaatcgtctccaaggagttatcctgtactcatcatctggcgagggaatgcgtttagaatatgcaaaatcacggatgggccttcggaagcgtgataagcacccctaagtgcagctgaaagacgacacggcagttgtattttcattcagcacaagcggcagctgagcatgctcaatgatgtctaatagcagacgacctgtcctgacacctgagtccaatgtcatcttcatgcagcgaacgttttgctcatgagttaggctatgaggtccttcagctgcgtagcattatgttacttggtctggttgtatcacttattattacatgtgcacctctttttttcctccttcggaccttgcctcctagtcatcttcagattttaagctaggattatcccttatttacagttggagttattattagaatctattgtgcctgaaaggatcaatctgaactatcaatctgaacgagagggtgaattagttttttct

SEQ ID NO: 130686 - DNA, 1533 bp, Zea Mays
ttttaactacagcctccaatctcatgcgttcgaggacaagccgaaaaggagaaagtaccccgttccgtcggccgcacctgcacccaccgcacgccgagtcacgccccccccccccccccccccccccccccccccccctggaccagccaacgtgacactccaccgccgccggcgccgcggcagcccgtagcaaccgccaccgcctgcccatctcctctctatcccgcgccgcatggccgcgtacttcaaccactcctcgtcctacccgccgccgcctcccccgccgggcacttccccgtacggcgcgtaccgccacgcctacccgccggcgccggcacccccggccgcttacggcgcctactacgaccgcgcagagcaggccctcccggcgcgggacgaggtccgcaccctcttcatcgctggcctccccgccgacgccaagccgcgcgaagtctacaacctcttccgcgatttccccggatacgtctcctcccacctccgcacgggcaaatcctctcaggcgtatgcgtttgctgtgtttgcagatcaacagtctgcactagctgccttgagtgccacaaatggaatggtatttgatcttgagaaaaattgttctcttcatgtagatctcgcaaaatccaattccagatcaaagcgcttgagatcagatgatacttcaccttattctcctgaaaaaagaaataggaaaccaaggggatttcctgattcaggtgctggaagcaatatttacatatctggaatgggtagtacttcacacagcttgagtggttatccttctgcacaaagttacacaagccttgagtctagtgcttctctcagcaaggacccatccacatttgcccctcaaaataatcctccatgccctactctttttgttgcgaacctggctccagcttgttcagagcaacagctgatagatgttttctcaagttgtgcgggatttgtgaaactcaagatgcaaaacaagcttggagctccagttgcatttgttgatttcaaggatgcaatcagttcaactgaagccataaatcgtctccaaggagttatcctgtactcatcatctggcgagggaatgcgtttagaatatgcaaaatcacggatgggccttcggaagcgtgataagcacccctaagtgcagctgaaagacgacacggcagttgtattttcattcagcacaagcggcagctgagcatgctcaatgatgtctaatagcagacgacctgtcctgacacctgagtccaatgtcatcttcatgcagcgaacgttttgctcatgagttaggctatgaggtccttcagctgcgtagcattatgttacttggtctggttgtatcacttattattacatgtgcacctctttttttcctccttcggaccttgcctcctagtcatcttcagattttaagctaggattatcccttatttacagttggagttattattagaatctattgtgcctgaaaggatcaatctgaactatcaatctgaacgagagggtgaattagttttttct

SEQ ID NO: 130687 - DNA, 551 bp, Zea Mays
ctgtgtttgaaagtcttcccaaacttcaaagtaaaccctaaacctaagtcctcatgtctgcaggatgcaatcagttcaactgaagccataaatcgtctccaaggagttatcctgtactcatcatctggcgagggaatgcgtttagaatatgcaaaatcacggatgggccttcggaagcgtgataagcacccctaagtgcagctgaaagacgacacggcagttgtattttcattcagcacaagcggcagctgagcatgctcaatgatgtctaatagcagacgacctgtcctgacacctgagtccaatgtcatcttcatgcagcgaacgttttgctcatgagttaggctatgaggtccttcagctgcgtagcattatgttacttggtctggttgtatcacttattattacatgtgcacctctttttttcctccttcggaccttgcctcctagtcatcttcagattttaagctaggattatcccttatttacagttggagttattattagaatctattgtgcctgaaaggatcaatctgaactatcaatctgaa

SEQ ID NO: 130688 - DNA, 809 bp, Zea Mays
cataggttgactttttttatgatttaagaaacaaaaaagttttgatattgtgagctttcagtctattttctcctttttggatgagatctttatttgaagagatgcaagctttatgtagtatttgtctcatgcacgtgcctgcaggacccatccacatttgcccctcaaaataatcctccatgccctactctttttgttgcgaacctggctccagcttgttcagagcaacagctgatagatgttttctcaagttgtgcgggatttgtgaaactcaagatgcaaaacaagcttggagctccagttgcatttgttgatttcaaggatgcaatcagttcaactgaagccataaatcgtctccaaggagttatcctgtactcatcatctggcgagggaatgcgtttagaatatgcaaaatcacggatgggccttcggaagcgtgataagcacccctaagtgcagctgaaagacgacacggcagttgtattttcattcagcacaagcggcagctgagcatgctcaatgatgtctaatagcagacgacctgtcctgacacctgagtccaatgtcatcttcatgcagcgaacgttttgctcatgagttaggctatgaggtccttcagctgcgtagcattatgttacttggtctggttgtatcacttattattacatgtgcacctctttttttcctccttcggaccttgcctcctagtcatcttcagattttaagctaggattatcccttatttacagttggagttattattagaatctattgtgcctgaaaggatcaatctgaactatcaatctgaa

SEQ ID NO: 130689 - DNA, 402 bp, Zea Mays
atggagatcccccgcctgaagatcgacgacgagacgtcgcatctcctgcgcatcctgctggtgctgtggcgctggagcagagcaacctggcggaggcaggaagccatggtcgccgctgtctgcgtcctcttattcatgtccgccacgcctgcgcaccgcgtcggcgacatctctgcctttaccaccggccggctccaacttcaccgccctcgttcgtacacgacggtctacgacctacagcggttcgccacctcctccgacttcgacgcggcggtggccgacggtgacggcgacatggagtcagtaccccttgccttcacagcaacgccgctatggcttgcgagcattctgatttttttttccgggttccgaattcacaaacatgaaacggtggcagactag

SEQ ID NO: 130690 - DNA, 1087 bp, Zea Mays
ttatggtgctatttatccgatatcctcattgtatatgtgacataactcaccaaattagataatatgagctcccatttggatccttgaagcactcacatgcttaacattgtttacattcagatgataaaagcaaagaaagtaaatgtgatgtggagaagcctgctgctactgagtcctctaaaccgaaggttagcttggaggaaacaaaggatcctgagaagcatgaagttgatgttggtggcaccgacgatgatgaaagtgacgaagactttgttgattcagaagagggtgaatcagatgatgacgagagtactaagagcaagaataggccaagcagcctcacccttgaagacacctccagggaaaaaggcaaggatcacaacaccgtctgtgggcaaaaaaaacctgctgagaagtgttacattcgatcgcaaacttgtatagctcatagttcttttccatggcactggaacctcaatttgtgatgtgtagtttgcagttagtgatgatgctaagaaaaatatccacgtccatgtcgaagttggtgaagacggctcgctcaatcattgacaactacaagcaatccactggtcatagctgcaagtcgtgcagcaagtaattttctcgcctcgtgcggtcgaagcacagtgctcattgcaagatcaaggtgaagcaagcacagtgctcattgcaaggtgaattataaccagtgctcattgcaaggtgaagctagtgatgatgctaagaaaagtaccagaatttttctcacacatgggcgtcctttttggtcgtggactttctactcgtccgttagtctggaaactcattgcaagctgaagcacagtgctcgaaagtgaagtagcattcatggactatgttagggacgttcgttattaggcaagtgaattgtgggtttgcgtttactgctacaaacgggctctaaggcagcatcaacagaatgctattgcttattgcgggttgttggaaagttgctgttttttctgctcaacagaatgtgtaattgagattttcttgaattagaaagttgttgttttgcagcgtgtattgatatataacccctcatttc

SEQ ID NO: 130691 - DNA, 955 bp, Zea Mays
gagagaagcagtcggcagccgggaagcccgtcgcgtgcctttcttcctcaacgtgccatgattaacgaaatatttgagcactggggagttgtagtcagatctggagcgacagtgaagtgtgacccatgagagttctagtgccatgtttcacagatagcattacatgatagaaaggggaatgaggatgtgagagtttttgtgaaggttgatggaaaagagttttggattggaaaactatcagttgacaaataccctcagtgtaaaactagtttggtattcgagaaggagtttgagttactacacacctcgaaaaccagcaccatctctgcccttggctacaaatgttggcattgcaagagaaagtatcctttcattttactttgttcagtatttttagagaagcctgaacacaactttcttttccctaacaacttctctgtcatttatcataaatatgatagtgtcacaagtaccaaagaaggtaatgatcttgttcttccagtattggacatccctaatgttttttatcacttggcataaacaacatggtgattgatgtttcaaatgatgaatctgatgaggaggttccacaggctattccattattcccaaaagcagatgatgataaaagcaaagaaagtaaatgtgatgtggagaagcctgctgctactgagtcctctaaaccgaaggttagcttggaggaaacaaaggatcctgagaagcatgaagttgatgttggtggcaccgacgatgatgaaagtgacgaagactttgttgattcagaagagggtgaatcagatgatgacgagagtactaagagcaagaataggccaagcagcctcacccttgaagacacctccagggaaaaaggcaaggatcacaacaccgtctgtgggcaaaaaaaacctgctgagaagtgttacattcgatcgcaaacttgtatagctcatagttc

SEQ ID NO: 130692 - DNA, 1290 bp, Zea Mays
caaacggtctcaggctgttaggcgcgccactcacctcagccgctcgcaaaaccctctcctctcgagaagcagcgcggtggagaccggagagaagcagtcggcagccgggaagcccgtcacgtgcctttcttcctcgacgtgccatgattaacggaatattgagcactcgggagttgtagtcagacctggagcgacaatgaagtgtgacccaggagagttctggtgccatgtttcagagatagcattacatgatagaaaaccagcaccatctctgcccttggcttcaaatgttggcattgcaagagaaagtatcctttcattttactttgttcagtatttttagagaagcgtgaacacaactttcttttccttaaccacttctctgtcttttatcatatatgacagtgtcacaagtaccaaagaaggtaatgatcttgttctttcagtattggacatccctaatgttttttatcacttggcataagcaacatggtgattgatgtttcaaatgatgaatctgatgaggaggttccacaggctattccattattcccaaaagcagatgatgataaaagcaaagaaagtaaatgtgatgtggagaagcctgctgctactgagtcctctaaaccgaaggttagcttggaggaaacaaaggatcctgagaagcatgaagttgatgttggtggcactgacgatgatgaaagtgacgaagactttgttgattcagaagagggtgaatcggatgatgacgagaattccagtgatggggatgaatgtgagagttcaaatgaagaagatgaagactctccaaatgtagtgctaagggcaagaataggccagcagcaacacccttgaagacacctccagggaagaaggcaaggaccacaacatcgtctatgggcaaaagaccagtcagtgtcagtgatgatgcaaagaaaagtatccacgtcactggttatggctgcaagtcgtgcagcaagttcttgtatcagaatttttcccaactagatgcggtcgtgcattctgatacatgggcgtcaaactcattgcaaggtgaagcacagtgctcgaaagtgaagtagcattcatggactatgttagggaagttcgttattaggcaactgaattgtgggtttgcgtttacaaacgggctctaaggcagcatcacaatgtccgatgcgtatttgattattgtgggttgttggaaagttgctgttttttctgctcaacagaatgtgtaattgagattttcttgaattagaaagttgttgttttgcagcgggtattgac

SEQ ID NO: 130693 - DNA, 1431 bp, Zea Mays
caaacggtctcaggctgttaggcgcgccactcacctcagccgctcgcaaaaccctctcctctcgagaagcagcgcggtggagaccggagagaagcagtcggcagccgggaagcccgtcacgtgcctttcttcctcgacgtgccatgattaacggaatattgagcactcgggagttgtagtcagacctggagcgacaatgaagtgtgacccaggagagttctggtgccatgtttcagagatagcattacatgatagaaaaccagcaccatctctgcccttggcttcaaatgttggcattgcaagagaaatcttttatcatatatgacagtgtcacaagtaccaaagaaggtaatgatcttgttctttcagtattggacatccctaatgttttttatcacttggcataagcaacatggtgattgatgtttcaaatgatgaatctgatgaggaggttccacaggctattccattattcccaaaagcagatggtatatatccttgttctatgtgcattttggttaagagttaatattgcatttctccctgcattgtgactgattcatagatatacatatacatgcttagtttatggtgctatttatccgatatcctcattgtacatgcgacataactcaccaaattagataatatgagcccccatttggatccttgaagcactcacatgcttaacattgtttacattcagatgataaaagcaaagaaagtaaatgtgatgtggagaagcctgctgctactgagtcctctaaaccgaaggttagcttggaggaaacaaaggatcctgagaagcatgaagttgatgttggtggcactgacgatgatgaaagtgacgaagactttgttgattcagaagagggtgaatcggatgatgacgagaattccagtgatggggatgaatgtgagagttcaaatgaagaagatgaagactctccaaatgtagtgctaagggcaagaataggccagcagcaacacccttgaagacacctccagggaagaaggcaaggaccacaacatcgtctatgggcaaaagaccagtcagtgtcagtgatgatgcaaagaaaagtatccacgtcactggttatggctgcaagtcgtgcagcaagttcttgtatcagaatttttcccaactagatgcggtcgtgcattctgatacatgggcgtcaaactcattgcaaggtgaagcacagtgctcgaaagtgaagtagcattcatggactatgttagggaagttcgttattaggcaactgaattgtgggtttgcgtttacaaacgggctctaaggcagcatcacaatgtccgatgcgtatttgattattgtgggttgttggaaagttgctgttttttctgctcaacagaatgtgtaattgagattttcttgaattagaaagttgttgttttgcagcgggtattgac

SEQ ID NO: 130694 - DNA, 799 bp, Zea Mays
atggtgattgatgtttcaaatgatgaatctgatgaggaggttccacaggctattccattattcccaaaagcagatgatgataaaagcaaagaaagtaaatgtgatgtggagaagcctgctgctactgagtcctctaaaccgaaggttagcttggaggaaacaaaggatcctgagaagcatgaagttgatgttggtggcactgacgatgatgaaagtgacgaagactttgttgattcagaagagggtgaatcggatgatgacgagaattccagtgatggggatgaatgtgagagttcaaatgaagaagatgaagactctccaaatagtgctaagggcaagaataggccagcagcaacacccttgaagacacctccagggaagaaggcaaggaccacaacatcgtctatgggcaaaagaccagtcagtgtcagtgatgatgcaaagaaaagtatccacgtcactggttatggctgcaagtcgtgcagcaagttcttgtatcagaatttttcccaactagatgcggtcgtgcattctgatacatgggcgtcaaactcattgcaaggtgaagcacagtgctcgaaagtgaagtagcattcatggactatgttagggaagttcgttattaggcaactgaattgtgggtttgcgtttacaaacgggctctaaggcagcatcacaatgtccgatgcgtatttgattattgtgggttgttggaaagttgctgttttttctgctcaacagaatgtgtaattgagattttcttgaattagaaagttgttgttttgcagcgggtattgac

SEQ ID NO: 130695 - DNA, 801 bp, Zea Mays
atggtgattgatgtttcaaatgatgaatctgatgaggaggttccacaggctattccattattcccaaaagcagatgatgataaaagcaaagaaagtaaatgtgatgtggagaagcctgctgctactgagtcctctaaaccgaaggttagcttggaggaaacaaaggatcctgagaagcatgaagttgatgttggtggcactgacgatgatgaaagtgacgaagactttgttgattcagaagagggtgaatcggatgatgacgagaattccagtgatggggatgaatgtgagagttcaaatgaagaagatgaagactctccaaatgtagtgctaagggcaagaataggccagcagcaacacccttgaagacacctccagggaagaaggcaaggaccacaacatcgtctatgggcaaaagaccagtcagtgtcagtgatgatgcaaagaaaagtatccacgtcactggttatggctgcaagtcgtgcagcaagttcttgtatcagaatttttcccaactagatgcggtcgtgcattctgatacatgggcgtcaaactcattgcaaggtgaagcacagtgctcgaaagtgaagtagcattcatggactatgttagggaagttcgttattaggcaactgaattgtgggtttgcgtttacaaacgggctctaaggcagcatcacaatgtccgatgcgtatttgattattgtgggttgttggaaagttgctgttttttctgctcaacagaatgtgtaattgagattttcttgaattagaaagttgttgttttgcagcgggtattgac

SEQ ID NO: 130696 - DNA, 345 bp, Zea Mays
atgggagaaaatcttactgtcagggttcagaggatgttgtacgcaacttttaatgaagggctttgctggtgttgcgacaaagatacatgccaagagcagtatggttgcaggttaatgagtagcacttaccaagctggcacaaatgggttttctcgcaagaatgtgttagggatagggaatgccaccttagagaatgaccaccatgtggatggagctgatgcaaatgaatggagggaaaaggaagaggacttggtcaacgggcatagtgcaccacatggcgtgcaacaggtcgatgagcatgagcaacaagacaaagcattcgctgggagatgttcctacccgtga

SEQ ID NO: 130697 - DNA, 617 bp, Zea Mays
atgtttcacagttgttggtcttttaagatagcattacatgatagaaaggggaatgaggaggtgagagtttttgtgaaggttgatggaaaagagttttggattggaaaactatcagttgacaaataccctcagtgtaaaactagtttggtattcgagaaggagtcccggatcgatgggatcgaggaacgggaatgtgtattggacatccctaatgtttttttatcacttggcataaacaacatggtgattgatgtttcaaatgatgaatctgatgaggaggttccacaggctattccattattcccaaaagcagatggcattattccgatttccagtgatggggatgaatgtgagaggtcaaatgaagaagatgaagactccaaaggacttctactcgaaagtgaagtagcattcatggactatgttagggaagttcgttattaggcaactgaattgtgggtttgcgtttactgctacaaacgggctctaaggcagcatcacaatgtccgatgcgtatttgattattgtgggttgttggaaagttgctgttttttctgctcaacagaatgtgtaattgagattttcttgaattagaaagttgttgttttgcaacgggt

SEQ ID NO: 130698 - DNA, 1250 bp, Zea Mays
ggaggggatcctaagagagtggatagcgtagagtccagggctaatgccagctccgtaatttacaccctcgcgtcctattttgtctccatattttagttctgtatttcagctccgtatcttctcatcagactgggagttctggatggtgatcacatcggcgtccatgtcaatggagtggatgatgtcgttgaagttggagtagcacatatgtgtgtggatctatccaacaaaaggagcaatcagtagaggttaatggacctatttgcgattgacccgaaacactaattgtttcacatcttgcagtcctattttttgtccttcgatgctcaatttctatttctttttgttgaatgtgaaatttgtgttttatcatagtaattccaactattccaaagatacattaatacacatcccttcgaggaatataatgggtacatagagatgacgatatctcaaaattctaggtatctcatgtcctattgcatgtgtgagctctacacttaaactaaatgttcaatttggcttgtttcactatggaaaagggcaaacaattgggatttcttttacttgtttctatatacttgttcattattaactgttttgtctctaattgcagccatgtttttttattccaacgaggctgagtaccacacaacccctatccggtcgccctctaatcgtggtaacaagggtctcttctcagatgaaatgacgctaagtcatagggagcgatttatcgcttctccacgatctggtagaatggacaggttggacctcaactccagcgacgtggagttctagaacattacatcatttcaagaccttcgtcagtcccagttcattgctaactaccatgctactccagttcatgatggtcacaggggtcgtagtcattcttgatcagctggtattggtcgtggtgttacaggcagaggcctcagagttccacgaacgaccagcgagggtcctagaagtggttgtgcagcatggagcacctcctctcatggacgtggtatacctcgacctattggtgcttcctcctcaagtggtcatggtgccaccggtggtcgtggtaccaatatttcagctccaaatgcctctcacagtcaagaggacaatgacgattcatttgcacatgtgactccttttttgacctgatcattccaatgttgtaccattcttgattaaatcacaaagagctgattgtttgctagaatcatataatctataatacagtaggcaaatgaata

SEQ ID NO: 130699 - DNA, 1598 bp, Zea Mays
caaccaaaaggcattacatcacctcaaaagaattgtacgctactccagtaatattttcatgtggagtaggaacctaacaaggaagtgctactgcaaagtgaaagctcttgggttggtcggaagcaatggatgctgctccggcgacatcggcggttgcagttgcagttgccgtcatcttcgcggttgtagcatcgctcccagtactgctccgcctcctctatgccagtgccggcggcaagacgaatccgaaggcacccctgcctcccggctcattcggtctgcctttcatcgggcagacgctcagcctggtccgcgccctccgcgccaacaccgccgacgactggctccggcggtggttagccatgtacgggcctgtgtcgcggttgcgcctcttcggctgcccgacggccttcctcgttggcacctctgccaacaagttcatcttcgccagcgccgcggtgaccgccaagacccccgagtccttcgctcggatggtcggccgccggacgatcagggatgtggtcggcgacgagcaccgccgcgtcagggccatgatgatgcagttcctcagagtggacgccgtcaagaggcacgtcgccagcatggacggcgaggtccggcgccacctcgacgcggagtggcgcggccgtggcaccgtggccgtgatgccgtccatgaagtcactcaccttcgacgtcatgtgcaccgccatcttcggcctcgggacgggtgccgtccgccgggatctttggactgagttccaggagctggtgaggggcatctgggcggtcccggtcaacctgcccttcaccgcatacagccggtgcctcgccgcgagccagcgtgggcgccgcgccgtcgccggggtcatccaggagaggagggccaagctggagcgtggggagagctcgctggccagcgacgttgtcacccttatgctcacggagggcctgcccgacgaggagatcatcgacaacgtcatgtttctcatggtcgccgcacacgacaccaccgccgccctcctcaccttcctcatccggcagctcgacgccgacaaggaagcttacgacagagttgtccaggagcaagaagagattgcgcggagcaaggtggccggggaggctctgtcgtgggaggacctcggcaggatgcggtacacctggttggcggcgatggagacgctgcggatggtgcctccggtgttcaccatgacgaggaagacggtggacgacgtcgagtacggaggctacctcatacccaagggctggcaggtgatccacgcggccaacatgacgcactgggacccggccatcttcccggagcccggcaggttcgacccagctcggttcgagaacccgtcggcggtgccacccttcgccttcgtgccgttcggtggcggcgcgcgcgtctgccccgggaacgagttcgccagggtggagacgctggtgaccgtgcaccacatcgtgacgcgcttcaggtggaagctcgccgccggctgcgaccgcagcttctccaggttcccgctgccgtacccgtctcagggactcctcatcgacatcgagcctattcagaaatgaatgatttgctttctcgattgc

SEQ ID NO: 130700 - DNA, 780 bp, Zea Mays
ccaagcacgctgccccaggcggacggaacacacgacgcagcagcggtcgtctcgtcctcgtctctgcagatgacgggctgttgtcgtcgcggcagcaggagcagggtggtctgtcgtcccgcactggcgctgctactgctagtggcgctgcttctcctgctgggtccgtgttcggccgagctgaacgccggcgcgggccggcggctgctggtgtcgcggccgtcgacgagccggcaaaacaaggccgagcagcagcagcagcagcagatgcgggtcggcgggaggaacacgcccttcaagcaggccgccgccagcttcggccggaggatacccagatccggctggaaccccatccagaacagatgagagggaccgcgtcctagatgaagccgccgtccgtacgtcggcggcagggtcccggcatctgatgggctgcgtcttggaagcgtgctcgagctcggtccaggactagctcagaaaccacacgcgcacacacggcgcgacccatcgagttttttttttttggatccttggcgccgctcatgcttgtgtgtacaagctcgtactagcttttaaatttttgtagtgctactcatctcctttttttggtttagataggtattagtgcaggttaattagccagtcaggatgggtaatggctagcagcttatgtcagggtagccagctctccccgtttatttccacttttcttgttcacaagttcttttattggtttgctagtattcagctgtggtataaataaactctcggtacatgcaa

SEQ ID NO: 130701 - DNA, 309 bp, Zea Mays
atgggccgtagcagcaggagcagggccgtggtgtgtccggcgctgctgctggcggcgttcgtcctcctcctgctcaccccgccgtgttcatcggccgaggcgccggctgagctgaaggctgcagcggtggtgcgacggcggatgctgctgccgctgctggcggtgtcgcggccgtccacgagccggcaggaggccgagcagcagcagcagatgcgggtcggcggcgggaccactcccttcaagcaggccgccgcgagcttgggccggaagatacccagatccggccggaatcccatccagaaccgatga

SEQ ID NO: 130702 - DNA, 3563 bp, Zea Mays
tccaaactgagcggtctcacagcgagcggcaggacgtttcatgagagaatcatgcagtcactgaattggctatgcagcagcagtagcaccaccagattacacgtgccttcctttggtattgccttggttgtcctcctctcctgtgtgtccgtcgccagctcctgcacagatcaagagaggagctccctcatcgacttccgagatggcctctcgccggacggcaatggcggcctccacatgttatgggccaacagcacagactgctgccagtgggaaggaataacctgcagcaacgatggcgcggtcacggaagtcttgctgccttctagaggactcgaagggaggatcccaccatctctcggcaatcttacggggctgcagcgactcaacctgtcatgcaattcactctacggcaatctgccaccagaactggtgttctccagcagcagcagcatcctggatgtcagcttcaaccacctatctggtcctctgcaagagcgtcaatccccaatttctggccttcctctcaaggtactgaatatctcaagcaacttctttacaggacagttatcatccacagcactgcaagtgatgaataatcttgtcgctcttaatgcaagcaacaacagctttgcgggaccattgccatcttctatttgcatccatgcaccatcgcttgtcacgcttgacctgtgcttaaatgacttcagtggcactatttccccagagtttggcaactgctccaagttgacagtactcaaggctggccacaacaaccttaccggaggcctaccccatgaactgttcaatgctacctcattggagcacctctcttttccaaacaacaatttgcaaggggcacttgacggttccagcctagtcaaactcagaaatcttattttccttgaccttggatcaaatgggctggaaggaaacatgccagattctattgggcagctgggaagattggaggagctccacttagacaacaacctgattgttggagagctgccatcggccctaagtaactgcagaagtctcaagtatatcaccctcagaaataatagttttatgggagatcttagcagaattaacttcactcagatggatctgacgactgcagatttttcactgaacaaattcaatggaacaattcctgaaaacatatatgcatgcagcaatctaattgctttgcggttggcttacaacaattttcatggccagttctcaccaagaatagccaatctcagatccctttccttcctttcagttacaaataactcatttacaaatatcacaggtgcacttcagaatctcaacagatgcaagaaccttacctccctgctaattggaaccaacttcaaaggtgaaaccataccacagtatgcagcaattgatggttttgagaatcttcgggtcctaaccatagacgcatgcccattggttggggaaatccccatttggttatcaaaactcacaagattggagatattagatctatcatacaatcaccttacaggaacaataccatcctggattaacaggctggaactcctcttctttctggacatatcaagcaacaggcttacaggggatatcccacctgaattgatggagatgccaatgctacaatctgagaagaattctgccaagttggacccgaagttccttgagttacctgtattttggacacaatcacgtcaataccgtttgctcaatgctttccccaatgtattgaatctatgcaacaacagcttgacaggcataattccccaagggattggtcagttgaaagtgctcaatgtcctcaactttagcaccaacagcttatctggagaaataccacaacaaatttgcaacctcacaaacctgcaaactctagacgtatcaaataaccagctcacaggtgaactcccatctgcactgagtaaccttcacttcctttcttggttcaatgtgtctaacaacgatctagaagggccagttccaagtggaggacagtttaatacttttacaaattctagctacattgggaatcccaagctatgtggtcctatgctcagtgtccattgtggctcagtagaagaacctcgagcctcaatgaaaatgaggcacaagaagaccatcttggcgcttgccttaagtgtgttctttggagggcttgccatccttttcttgttgggacgtcttattttgtccatcagaagcacagaatctgctgacagaaacaagagcagcaacaacagggacattgaagcaacttcattcaactctgcttctgagcacgtgcgtgatatgataaagggaagcactttggtgatggtacctcgaggaaagggagaatcaaacaatctcacattcaatgatatcttgaaggccacaaataattttgatcagcagaacattattggttgtggaggtaatggtctagtctataaggctgagctaccctgtggatccaagcttgcgatcaagaaactcaatggtgaaatgtgtctgatggaaagagaattcacagcagaggttgaagcactctctatggcacaacatgagaatcttgtgccactatggggttattgtatccagggaaactcgaggctcctcatatattctttcatggagaatgggagtcttgatgattggcttcacaacacggacaatgccaactcatttctagattggccaacaagactcaagattgcacaaggagcaggacggggcctttcttatatccacaacacctgcaaccctaacattgttcaccgtgacgtcaagtccagcaacatcttacttgatagagaattcaatgcttatgtcgctgattttggccttgcaagattgatccttccttacaacacacatgtcacgacagagctggtaggcactcttggttacattcctcccgagtatggacaagcctgggtggccaccctgagaggtgatatatatagttttggagtggtcttgcttgagctgctcacagggaagaggcctgtccaggttttgaccaagtcgaaagaacttgtccaatgggtaagagagatgaggtcccaagggaaggatattgaggtcttggatccagctctcagaggaagaggacatgacgagcaaatgctgaatgtgcttgaagtagcctataagtgcatcaaccacaatcctggattgaggccaaccatccaagaggtggtgtactgcctggaaaccatagttgagccccagcaggtgcaagtgcagctgtagttaaaggagaacatattgtaggtggtgatattgtactccacccgactaggtgtaacttcagtagaaggaagagtttctaacaaagagcacagtagtgtacatttctgaaagaaaagcctcgctcactcgctgtcatgaggccctcccttatacaattttacttattccttccgtggaaatattgcacctcctagttcaaacaattgaacatgaaaagtgcaaaaaaagagcatggggctcttgttaagtatgcgttcgtttgtaccctagcgaagttgtacaggtgtgtatgtaaatctttggaaagaaaaggctcacagcta

SEQ ID NO: 130703 - DNA, 1101 bp, Zea Mays
attaaatacgcgcgcacgagccccacaacgctctcacgacactccacactccaagcgagctagagctagagctatagagatcactctccttctccgcgtgaggtagtgacgcccagccatggcaacaatggcactgcgcgccgtggcaacggcgctgctggtggtggcggcgtccgtgtgcggcgcgtcggcgtcgacgctggtgctgtacaaccggtgcggggagacggtgtggccgggcatccagccgagcgccgggaaggaggtgctggcgcgcggcgggctgcagctggcgccggggcggtcggcgtcggtgcggctccccgcggggtggtcggggcgcgtgtgggggcggcaggggtgctcgttcgacgcggcggggcgcgggcggtgcgccacgggcgactgcggcggcgcgctctactgcggcggcgccgggggcgcgccgccggccacgctggcggagatcaccctgggcaccgcgtcgtcccaggacttctacgacgtgagccttgtggacgggtacaacatccccatcgcgatgacgccggtgcacgggtcgggcgcccggtgcgcggcggccgggtgcgtgagcgacctgaaccgcgtgtgccccgcggggctcgccgtccgcggcgagggccgcgtggtggggtgccgcagcgcctgcgccgcctacggcgcgccgcagtactgctgcacggggcagttcgggagcccccagcagtgcaagcccacggcctactcccgcctcttcaagtcggcgtgccccaaggcttactcctacgcctacgacgacccgacgtccatcctcacctgctccgccggcgcctcctacgtcgtcaccttctgcccgcaccgccgctgaacttttatttttttaaggtcttcggccgcgtgttgttagttatcctctgcctgcgtttgcgttttgatgttctggcgtgcgttcgtttcacttgcctccgtcacgcgtcttcggaatctccagatcttcctccctaagtatagcaatgcactcggctctactgctgctgcgttttgaaaacctgggatctgaaatcttgaacagtaaaaagtagctgcgggcattctccagat

SEQ ID NO: 130704 - DNA, 119 bp, Zea Mays
aaggcaaaagaaaaggtggtaacaaatttctggagcaaagaataaaaaaggctaacaacatgattagcgacacgggctccttctgctcctgctaattgcccctctagtcattcagctgc

SEQ ID NO: 130705 - DNA, 2798 bp, Zea Mays
aacaagaataaataacaaattatcataacaaaaaatagtcttacttatgaattgtttccacaacaagatagcagataatagagttgtctctgccccttgccacaattataaaaagctcctaaatacaaaaagatataaaatacaataaaatgtaactgtaattaaaataagtacctataaagtcctcataatataacgaaaattgttgtcggctatgaaccatgattaaggcattacaccacattcacaacgctatcatagaatgacaatttagtttcatcttcgtatttcttgaatcttactcgcatacatggagtaattgttgagtgccttgtagggatatgagcaatactgctccttagcttgaagtggtggctcattataactggaaaattgttaagagaagtaagagcattatgcagcttccttactaaaagtgtcaagagcaagtcaccgcaaccttggcccattcttgagaaagacatatgagaaaacgactaaaatcttttcaccatagccaaaaaatggccagaactgcaattcatagccttttaaatttctacaaatatcagttaaccccatttcataggttgccttcacatgcctggcaaaagtaaaaaatactgtcattcccaatcctacaagtcctttttcggcagcttcagatctataggcatcaaatgcatagcagaaacatgtagtcttatttcttatgacagttttgagtctctagttgttgcatgttatcaggcatatgggtggattttgaatagtcctcttgattaagaagcgcctcaactgcattgacgacaccttccttgataaagaagccaaggtatacaatacgaagcttttgcatgagaatctcgattatctttagtagtgagatcaacacatgatgatcctttgtaaataataaatcagccaagaagctacccttttttgtttccttgggcacatcttgaagtatttctggtttactgaaataacaaatattgttagcaattgaagcacatccatagcaaatgtacgaattggcaccagagttcaccgctgcacaatttgtacagtaagctcacttccatatttcataacacaaacattgttatgagttgttagtttgtaatgctgctaaggtacatagagaattgacataagaaccttgcttcaagagaattgacacaagaaccttgcttcattcgtaattattttttctgtcgctagtatgatctgggtgtcttcaacgtcccttactactgaaggaatcaactggtttgacaacctggacggccgtgggggcttgtacatcctccatgtcctcagcgtccatcttggtggtggtgagtggcacttgcaccagtggcctccatcccctaaattctgtgcaggagcgcctggctctggctgcagcgccgtggcagggcgaggcacgtgtggcggctaccgaggtgcttaggcgtgatgtctaggtggtggcaaggatgagcaggagggccttagcgccgtcaaagcaggggtctccgcctcgggggcgatcacgatgcgtgggagagggagccgcagcgcgcggatctgggtcgcggggcgcgcgccccagcagcgcggccatagcgcgccctgcgcgatctgcagcgacgccgccgtgatgggcaagtcgaaggcggaccgcagcccgtccgggaacccgagcctcgacgacaggcccgcggcgaggacgtcgcggaggttgggcgggaacgcgaaccccatctcggcctcgcgggcgccagctccagctccgtcaggcccgggagcacggccaccccggaggcccggaggtggcgcaacaagcatgtagacgctgagctgaggcctgcacggcatggcgagccccgacgccacccccatacttctcgggcgcgtcgtcgcggtgcctcagcggcgccgatgaggtggacaatgaggaggcgctgcagtgggtcatgatggagcgactaccgtccttcgagcgcctgcgcacgggcctcgtgcggccggcggacgcttccgacggcggcaacgccagcgaccgcggccggaggcgccggcacacgcacgaggaggtggacgtgcgcgcgatggggctcgcgcagcgccaggcttttgtggagcgcgtgttacgggtcaccgatgaggacaacgagcgcttcctcaggaagctccgcccgcgcatcgaccgcgccaacatccagatccccacggtggaggtgaggttccggggcgtcaacgtgcaggcggagtgccacgtcggcacccgcgctctgcccacgctggcgaacgtctcgctggacgtggccgaatcgttgctgggacgcgtcggggtcaagctcggcaagaggaagacgctccacatcctcaaggacggctccggcgtcgtgcgcccgtccaggatgacgctgcttctcggcccaccgtcgtccggcaagacgacgctcctgctggccctggtcggcaagctggaccccactcttgaggtcagcagggaggtgacctacaacggctatgggctggacgagttcgtgccggaagaaggcggcatacatctgccgacacgtccacgaagaaggtcggcggagacggagacggcgagacggcgcggaggcgggtggtggcagtggcgggctgttggcggtggatcagcctcgtgggcgacgccaccgaaggctgagcggggtggtgcctgcacggcgatgggtggcggcggggtggttgccaaaggcagggacggctgcgacgggggagggggcgggggcggagcacggtcggatcgctctggatga

SEQ ID NO: 130706 - DNA, 1445 bp, Zea Mays
ggcaacaaacaaccacactgattgaggcagttcgtgaacaagccgtcacacccactcgctgctgaaccaggagttccatccatcgccgctcactcccacgatcagcgtcgtcgcttatccgcaaatatctctcttcctctttgcagtcggcaccatgggttccgacttcaaatcgatccccttgatcgatatcggcccgcttgtcgaaaagattgatgatccaagcatggccaacgataaggatttactgcaggttgtccggttactggatgatgcttgcaaggaggccggattcttctatgtgaaaggccatggtattgatgagtcactgatgagggaagtcaggaatgtaacccgtgaattctttcagcttccttatgaggaaaaattaaaaattaagatgacacctcaaagtggatatagagggtatcaaaggataggggaaaatattaccaagggtaagcctgatatgcatgaagcaatcgattgttatactcctattagacctggcaaatatggagatctcgctaaaccaatggaaggatctaacttatggccaaaatacccatcaaattttgaagtactgctggaaaattatatcaaattatgtagagacatttcaagaaagataatgcgaggtatagccttggctttgggaggggcaattgatgcttttgaaggggatacagctggagatcctttctgggtgttaaggttgattggttatcccgtagatattccagaagagcagcgcactgatactggctgtggagctcatacagattatggacttctaacactggttaaccaggatgatgacatatgtgcccttgaggtgcaaaatcgttctggtgagtggatatatgcaacgccgattcccggaacctttgtttgtaacatcggtgacatgctgaaggtttggacaaatggaatatatcagcccacccttcacagagttgtcaacaattcccagcattaccgtgtatctgttgcattcttctacgagtccaacttcgatgctgcagtagagcctgttgagttctgccgggagaaaaccggcggtgctgctaagtacgaaaaggttgtgtacggggagcatttggttcagaaagtattgacgaacttcgtcatgtaaatttgctaagtacgacaaataaatctgcattgcagcatcagaactccagacctatttggtgtgtagtgctgtaccagaaaggtagtaacggactaaagcatgcgcccgtctctgaaatttgaccttaacaagagtcgcagacttgcagtgcaggtgatatcacaaggaaatcggggggagatttgttctctctgctgcacggagttgtcgacaaccctgtcgctgaaatctgaatttagcatcagacaactggagatgctacgagtccgtctctgaaatctgaatttagcatcaggcgcgaaattgcctc

SEQ ID NO: 130707 - DNA, 1694 bp, Zea Mays
ggcaacaaacaaccacactgattgaggcagttcgtgaacaagccgtcacacccactcgctgctgaaccaggagttccatccatcgccgctcactcccacgatcagcgtcgtcgcttatccgcaaatatctctcttcctctttgcagtcggcaccatgggttccgacttcaaatcgatccccttgatcgatatcggcccgcttgtcgaaaagattgatgatccaagcatggccaacgataaggatttactgcaggttgtccggttactggatgatgcttgcaaggaggccggattcttctatgtgaaaggccatggtattgatgagtcactgatgagggaagtcaggaatgtaacccgtgaattctttcagcttccttatgaggaaaaattaaaaattaagatgacacctcaaagtggatatagagggtatcaaaggataggggaaaatattaccaagggtaagcctgatatgcatgaagcaatcgattgttatactcctattagacctggcaaatatggagatctcgctaaaccaatggaaggatctaacttatggccaaaatacccatcaaattttgaagtactgctggaaaattatatcaaattatgtagagacatttcaagaaagataatgcgaggtatagccttggctttgggaggggcaattgatgcttttgaaggggatacagctggagatcctttctgggtgttaaggttgattggttatcccgtagatattccagaagagcagcgcactgatactggctgtggagctcatacagattatggttagtagatctctccaaagaatttctattgagaaaaaaaaattccatatgtgaaactgtggatgacggtaacttctggtcaatatatgctactattaccccgttaatacaataccatggttttgttgcctacctgtctattaaggaagccacatgttttctagatattttttattattttcaaagattagtggaggctccctattctcgaaatcctgagatcgtttccccatttggtttaaaatgcaggacttctaacactggttaaccaggatgatgacatatgtgcccttgaggtgcaaaatcgttctggtgagtggatatatgcaacgccgattcccggaacctttgtttgtaacatcggtgacatgctgaaggtttggacaaatggaatatatcagcccacccttcacagagttgtcaacaattcccagcattaccgtgtatctgttgcattcttctacgagtccaacttcgatgctgcagtagagcctgttgagttctgccgggagaaaaccggcggtgctgctaagtacgaaaaggttgtgtacggggagcatttggttcagaaagtattgacgaacttcgtcatgtaaatttgctaagtacgacaaataaatctgcattgcagcatcagaactccagacctatttggtgtgtagtgctgtaccagaaaggtagtaacggactaaagcatgcgcccgtctctgaaatttgaccttaacaagagtcgcagacttgcagtgcaggtgatatcacaaggaaatcggggggagatttgttctctctgctgcacggagttgtcgacaaccctgtcgctgaaatctgaatttagcatcagacaactggagatgctacgagtccgtctctgaaatctgaatttagcatcaggcgcgaaattgcctc

SEQ ID NO: 130708 - DNA, 1528 bp, Zea Mays
cagaaggcaacaaacaaccacactgattgaggcagttcgtgaacaagccgtcacacccactcgctgctgaaccaggagttccatccatcgccgctcactcccacgatcagcgtcgtcgcttatccgcaaatatctctcttcctctttgcagtcggcaccatgggttccgacttcaaatcgatccccttgatcgatatcggcccgcttgtcgaaaagattgatgatccaagcatggccaacgataaggatttactgcaggttgtccggttactggatgatgcttgcaaggaggccggattcttctatgtgaaaggccatggtattgatgagtcactgatgagggaagtcaggaatgtaacccgtgaattctttcagcttccttatgaggaaaaattaaaaattaagatgacacctcaaagtggatatagagggtatcaaaggataggggaaaatattaccaagggtaagcctgatatgcatgaagcaatcgattgttatactcctattagacctggcaaatatggagatctcgctaaaccaatggaaggatctaacttatggccaaaatacccatcaaattttgaagtactgctggaaaattatatcaaattatgtagagacatttcaagaaagataatgcgaggtatagccttggctttgggaggggcaattgatgcttttgaaggggatacagctggagatcctttctgggtgttaaggttgattggttatcccgtagatattccagaagagcagcgcactgatactggctgtggagctcatacagattatggttagtagatctctccaaagaatttctattgagaaaaaaaaattccatatgtgaaactgtggatgacggtaacttctggacttctaacactggttaaccaggatgatgacatatgtgcccttgaggtgcaaaatcgttctggtgagtggatatatgcaacgccgattcccggaacctttgtttgtaacatcggtgacatgctgaaggtttggacaaatggaatatatcagcccacccttcacagagttgtcaacaattcccagcattaccgtgtatctgttgcattcttctacgagtccaacttcgatgctgcagtagagcctgttgagttctgccgggagaaaaccggcggtgctgctaagtacgaaaaggttgtgtacggggagcatttggttcagaaagtattgacgaacttcgtcatgtaaatttgctaagtacgacaaataaatctgcattgcagcatcagaactccagacctatttggtgtgtagtgctgtaccagaaaggtagtaacggactaaagcatgcgcccgtctctgaaatttgaccttaacaagagtcgcagacttgcagtgcaggtgatatcacaaggaaatcggggggagatttgttctctctgctgcacggagttgtcgacaaccctgtcgctgaaatctgaatttagcatcagacaactggagatgctacgagtccgtctctgaaatctgaatttagcatcaggcgcgaaattgcctc

SEQ ID NO: 130709 - DNA, 1174 bp, Zea Mays
cagaaggcaacaaacaaccacactgattgaggcagttcgtgaacaagccgtcacacccactcgctgctgaaccaggagttccatccatcgccgctcactcccacgatcagcgtcgtcgcttatccgcaaatatctctcttcctctttgcagtcggcaccatgggttccgacttcaaatcgatccccttgatcgatatcggcccgcttgtcgaaaagattgatgatccaagcatggccaacgataaggatttactgcaggttgtccggttactggatgatgcttgcaaggaggccggattcttctatgtgaaaggccatggtattgatgagtcactgatgagggaagtcaggaatgtaacccgtgaattctttcagcttccttatgaggaaaaattaaaaattaagatgacacctcaaagtggatatagagggtatcaaaggataggggaaaatattaccaagggtaagcctgatatgcatgaagcaatcgattgttatactcctattagacctggcaaatatggagatctcgctaaaccaatggaaggatctaacttatggccaaaatacccatcaaattttgaagtactgctggaaaattatatcaaattatgtagagacatttcaagaaagataatgcgaggtatagccttggctttgggaggggcaattgatgcttttgaaggggatacagctggagatcctttctgggtgttaaggttgattggttatcccgtagatattccagaagagcagcgcactgatactggctgtggagctcatacagattatggacttctaacactggttaaccaggatgatgacatatgtgcccttgaggtgcaaaatcgttctggtttggacaaatggaatatatcagcccacccttcacagagttgtcaacaattcccagcattaccgtgtatctgttgcattcttctacgagtccaacttcgatgctgcagtagagcctgttgagttctgccgggagaaaaccggcggtgctgctaagtacgaaaaggttgtgtacggggagcatttggttcagaaagtattgacgaacttcgtcatgtaaatttgctaagtacgacaaataaatctgcattgcagcatcagaactccagacctatttggtgtgtagtgctgtaccagaaaggtagtaacggactaaagc

SEQ ID NO: 130710 - DNA, 1155 bp, Zea Mays
acactgattgaggcagttcgtgaacaagccgtcacacccactcgctgctgaaccaggagttccatccatcgccgctcactcccacgatcagcgtcgtcgcttatccgcaaatatctctcttcctctttgcagtcggcaccatgggttccgacttcaaatcgatccccttgatcgaaaggccatggtattgatgagtcactgatgagggaagtcaggaatgtaacccgtgaattctttcagcttccttatgaggaaaaattaaaaattaagatgacacctcaaagtggatatagagggtatcaaaggataggggaaaatattaccaagggtaagcctgatatgcatgaagcaatcgattgttatactcctattagacctggcaaatatggagatctcgctaaaccaatggaaggatctaacttatggccaaaatacccatcaaattttgaagtactgctggaaaattatatcaaattatgtagagacatttcaagaaagataatgcgaggtatagccttggctttgggaggggcaattgatgcttttgaaggggatacagctggagatcctttctgggtgttaaggttgattggttatcccgtagatattccagaagagcagcgcactgatactggctgtggagctcatacagattatggttagtagatctctccaaagaatttctattgagaaaaaaaaattccatatgtgaaactgtggatgacggtaacttctggacttctaacactggttaaccaggatgatgacatatgtgcccttgaggtgcaaaatcgttctggtgagtggatatatgcaacgccgattcccggaacctttgtttgtaacatcggtgacatgctgaaggtttggacaaatggaatatatcagcccacccttcacagagttgtcaacaattcccagcattaccgtgtatctgttgcattcttctacgagtccaacttcgatgctgcagtagagcctgttgagttctgccgggagaaaaccggcggtgctgctaagtacgaaaaggttgtgtacggggagcatttggttcagaaagtattgacgaacttcgtcatgtaaatttgctaagtacgacaaataaatctgcattgcagcatcagaactccagacctatttggtgtgtagtgctgt

SEQ ID NO: 130711 - DNA, 1170 bp, Zea Mays
ccgcatccgacgacaacgccatcacgccgtccagctcatcgtccacctgaagcccaacctgccacttccatccatcgccgctcactcccacgatcagcgtcgtcgccagtcggcaccatgggttccgacttcaaatcgatccccttgatcgatatcggcccgcttgtcgaaaagattgatgatccaagcatggccaacgataaggatttactgcaggttgtccggttactggatgatgcttgcaaggaggccggattcttctatgtgaaaggccatggtattgatgagtcactgatgagggaagtcaggaatgtaacccgtgaattctttcagcttccttatgaggaaaaattaaaaattaagatgacacctcaaagtggatatagagggtatcaaaggataggggaaaatattaccaagggtaagcctgatatgcatgaagcaatcgattgttatactcctattagacctggcaaatatggagatctcgctaaaccaatggaaggatctaacttatggccaaaatacccatcaaattttgaagtactgctggaaaattatatcaaattatgtagagacatttcaagaaagataatgcgaggtatagccttggctttgggaggggcaattgatgcttttgaaggggatacagctggagatcctttctgggtgttaaggttgattggttatcccgtagatattccagaagagcagcgcactgatactggctgtggagctcatacagattatggacttctaacactggttaaccaggatgatgacatatgtgcccttgaggtgcaaaatcgttctggtgagtggatatatgcaacgccgattcccggaacctttgtttgtaacatcggtgacatgctgaaggtttggacaaatggaatatatcagcccacccttcacagagttgtcaacaattcccagcattaccgtgtatctgttgcattcttctacgagtccaacttcgatgctgcagtagagcctgttgagttctgccgggagaaaaccggcggtgctgctaagtacgaaaaggttgtgtacggggagcatttggttcagaaagtattgacgaacttcgtcatgtaaatttgctaagtacgacaaataaatctgcattgcagcatcagaactccagacctatttggtgtgtagtgctgt

SEQ ID NO: 130712 - DNA, 1740 bp, Zea Mays
atggccaccacgacgtaccagcattttcggagcccatcttcaatgccgcggcggaagcccgcacatcgagattcagcaagcatgagaaggggagaggaaaggcaagacctatctttcattgaagggcgtaacattcaggatcgcaaaaggcggcgcgagttcgagtggaattatggggttcctgattctttgggagagaaaagagagaaggttgtttaccaggatgcagggaggaagggaagataccaccggagggatgaggatagggaggatccgggccgtggaggtcgccatcttcggagcaggtcttggtgggatgggagaggctctcattgtcggggggctgttgatgactgctactccaacaacaacaagcatctttttaggggcagttcctcctatcgcagccgcgatctttcccaaaattcttggggacatggctcttggctttccaaccaggtggctgcggtaaaaccgcagcacatgggcacgtactcgttaaagtcttcaagcatcggcaagaacgtctcttttgcctcccccatcgcaactgttctaggtgcggcaaacacaggagacctgagggggccctctgtttttatttctaacacccctagtactgtctcttgtgcttttcatgacccaatgttggatgaagcacttctctcttctggtgttgtaggggggcacaactcttcggtgatgtgctgggagctgcagaattctgtggctcgggaggggagcgcggcgtcccccccaaccatgatggaagtggatggctctgacaagaggaccaacactgctgttcctgaaccatctttgcttccttctgaggtacaaccttctccatgcctagtggatttcatcagttcgataacaagaccagtttcccctcccctaattgcacaaacacctcacacaaacccttatagaactggtctgaacctgttttctcaagaaagcaatcactctgctccccatcatatccctacagacagcttgaaccatataccctctgatattgttgttgaaccagccttaccacaacctcatgtacatgaaacaaatgggtacagtcctttgcatattttgggatcagtctcagaaccaaccacacccctccaagatcagctgacaaaaacagttccattttctggaccttccacctccacacaaattccaaataaaacatctgcctacgctgtaacacgccatagtacacgactagcaaacaaagcaaaaagacgagacggtaaaggggcgattcagattgcccaagaactgcttgctcataagttaaaagatttggcccctaacgttgttgactcacataatgatttggtccaacagcttgtgcagcattttgatcaaccactgtccaaaggaaagattaaggccatcaagaccttgctggaaaatgggaagcagttgaagaagaaggtgcaaaatcgttctggtgagtggatatatgcaacgccgattcccggaacctttgtttgtaacatcggtgacatgctgaaggtttggacaaatggaatatatcagcccacccttcacagagttgtcaacaattcccagcattaccgtgtatctgttgcattcttctacgagtccaacttcgatgctgcagtagagcctgttgagttctgccgggagaaaaccggcggtgctgctaagtacgaaaaggttgtgtacggggagcatttggttcagaaagtattgacgaacttcgtcatgtaa

SEQ ID NO: 130713 - DNA, 557 bp, Zea Mays
caacactgctgttcctgaaccatctttgcttccttctgagcttgtgcagcattttgatcaaccactgtccaaaggaaagattaaggccatcaagaccttgctggaaaatgggaagcagttgaagaagaaggtcaggggctccaaagtcgcgccggctgttctggcatgcccaactgcgctggtctaatggtggagctggctctttagggtcgtcatcctgtttttatccatgttaccgtttgctggagtgttgacaatggtagtgtgtcagggtctgttcccttttggtggttcaaaaatcaggccttcctacaagtgtgtggaacgtagtaaggtgtcagctatgggggagcaaaatcagtttctcccacccttgttgtcttgtttctgcccctggctttgtacttggtcttctgcggccagcctcatgggaattgagtcagtctatttggccttgttgatgttgcaacgattatctagtagtcaatttttctttaatgtcacaatcaaattgtaatgtgctatgctggaatgtgagaggtctaaatgacgctgcc

SEQ ID NO: 130714 - DNA, 776 bp, Zea Mays
ggcaacaaacaaccacactgattgaggcagttcgtgaacaagccgtcacacccactcgctgctgaaccaggagttccatccatcgccgctcactcccacgatcagcgtcgtcgcttatccgcaaatatctctcttcctctttgcagtcggcaccatgggttccgacttcaaatcgatccccttgatcgatatcggcccgcttgtcgaaaagattgatgatccaagcatggccaacgataaggatttactgcaggttgtccggttactggatgatgcttgcaaggaggccggattcttctatgtgaaaggccatggtattgatgagtcactgatgagggaagtcaggaatgtaacccgtgaattctttcagcttccttatgaggaaaaattaaaaattaagatgacacctcaaagtggatatagagggtatcaaaggataggggaaaatattaccaagggtaagcctgatatgcatgaagcaatcgattgttatactcctattagacctggcaaatatggagatctcgctaaaccaatggaaggatctaacttatgacatttcaagaaagataatgcgaggtatagccttggctttgggaggggcaattgatgcttttgaaggggatacagctggagatcctttctgggtgttaaggttgattggttatcccgtagatattccagaagagcagcgcactgatactggctgtggagctcatacagattatggacttctaacactggttaaccaggatgatgacatatgtgcccttgag

SEQ ID NO: 130715 - DNA, 556 bp, Zea Mays
ttaattaattcttcaattgatcccatttgctctctggatgtgatttctcccttcaaagattcagattcagatatcggcccgcttgtcgaaaagattgatgatccaagcatggccaacgataaggatttactgcaggttgtccggttactggatgatgcttgcaaggaggccggattcttctatgtgaaaggccatggtattgatgagtcactgatgagggaagtcaggaatgtaacccgtgaattctttcagcttccttatgaggaaaaattaaaaattaagatgacacctcaaagtggatatagagggtatcaaaggataggggaaaatattaccaagggtaagcctgatatgcatgaagcaatcgattgttatactcctattagacctggcaaatatggagatctcgctaaaccaatggaaggatctaacttatggccaaaatacccatcaaattttgaagtactgctggaaaattatatcaaattatgtagaggtccacttcgtagcctactctaaacattaatctttgttcatggttaattgtgttcattat

SEQ ID NO: 130716 - DNA, 2276 bp, Zea Mays
gatcccattgctgagattcttcccgtgaggaggtgttgggggtagctggcgatgggggcggagcaggggtacgaagatatgcaggggaccttcagggactccgaggtgttcgagtttgtcgggaaagtcctgcagtccgtgcggatggatccgtttttaattgacataagggacaaagattattatgattacatgctaggcattatagaccctaccaagaaaaggagtacagatgatgaagctatgtttgttactattttgagggcactatcacaagcagtatccaagatagacaccgtgtatcatcatgcacttctacacaatatatttaccatgtgtgtctggcacttgcacagtgacacgagggtggtgtttttggatttaataaccagattggctgctgtggcagaccaatatctcagagaatgtttgcagatgcttgtgaataatttcactccacctggacccctcattcgttacattgaggagccaaggtggcttccaaagaaggaaaaaatctactctcagttgcaagagagtttgaaaatgatttctgacactgtgcccttggcaccaaggatgttaaaggatataattgataggagtatgccaaagttgtttgatagcaaagctaagatggtatcatttgtcaagtgcatgttgggacttgatgctgttgtttgggacattattgggtcgtcattgttggagaaagttgtgtacctacttacagaattggatgttaatataacatgggaagatattcttcaagatgaacacaacaaaggtatatttgacatggagcttgaggatttggctgaggatgaagataaccttggtcaagaaggaacaaaggtccattttggaggaaatatgtgtgccgagaaacttgatggtttaatggtggttgtgtgtgagcacctcaagtcacgtgtagaagaacctgagcgcctaattaaggaatttgtcactttgaaggctatatttaaatcacatgtgctgagggtgcacaaatccaaatttgcacagtttatcatgttttatgcttgttccctgcatcctgagattggcgatggctttgctaattttcttactgatatttttattgacaaggacaaaaacgaggatgcaattactagagtgtctgcagtttcatatgttggaagctatctgtcccgggcaaggttcatttccgtaaatatagttgtttctgtactcaaaaggctagtggactggtgtgattattattgtggccatcagctggacaatggggtgacagcaaatcctataaagcaccagctattttatgctagctgccaggctgtgatgtatgtcctatgctttcggttaagatctattatggactacccaaatcttaaacaacaactttttcgaatgcgaatccgggatatcttggtccacccattgcagccattaaaggtgtgcttgccttcaatagtgaatgagttcctgagacaggctacagctgcgagcctgttccatgcacctgcgatctcaatgcacgaagatgcagttgaatccgatctatcgaaggcatttggaggacttaataggcttgacatgttcttcccatttgacccgtatctacttaaagagtctgacagatatatacggccaaattttgagttctggtccttggtcaagacgacatacagtaacgacaacagcgatgaggacgacgaagagcttggcgacattgacgcacctggaatgaatgtgggcagcttggatgatcacttcgaaatagattttaacagtgacgatgacattgagtataagatgaataagatgtccataacgccgcaacgcactttctaccatccactggctacaaacagtgagtccaaccgcatgcctgcgaggatcagaccttcagtgagccccccatcatagcaaggttctgctcagctctttacttgactgatgatgacacaaaatcagatgctaggaagttgcacgtgccaagaagggaccaggggatgacgaccaaacatacaccggagtgtattctatttattattccagttgctagtagggtcaaaactttaatgcagagtgtatatgtgtttcagggcaacgcgtggaaaaccggtttgtgattgtatacttggtagtcagcccttaggaacaggtatgtgtttgtagcaagacttacgacgtgaaatgaggattctcttggggacattaatggtataacgtgcgaatgttagaacctaattttcaattatcaatgagtcaggtgcagcctaattttc

SEQ ID NO: 130717 - DNA, 882 bp, Zea Mays
atatttttctgtgaatatgattcctgtaattccagaagagccctaaacttcgcgtcctacacgcgcccccctctcgctcccacacaaaaaccctagccatccaacaggcaacaggagaccatcaatcatcaataaataaaaaatagtagtaattcctaaccctaggaggcatcctgttccacgcgactcatcccgtcgtccgccgagccgccgacgccacgccaggcctccacgccgcgcctccgagctccgtcgccccggaccgccggcgccgggcagccgtgagctccgaccggacctgcccgcgcccaggctgaggcgccgcctacccgagctccgcccaggccgcccgcccgctcggcaggacgactggacgagctcctcgccgcgggcgccgagcagaggagctcctctcgcggaagcgcggacccgccttcaggccgaggtgccgagctccgccccgccccgcgcggccgcgcccctgcccaggtccagccgccccgctcggctcctgttccccgctggggttccggcacaaagctccacggctccgcatcccattgctgagattcttcccgtgaggaggtgttgggggtagctggcgatgggggcggagcaggggtacgaagatatgcaggggaccttcagggactccgaggtgttcgagtttgtcgggaaagtcctgcagtccgtgcggatggtacgggccttccatcctcagttcgttgctgtgtaatatgactggacattgatttaggtggattattatttgccttggatgattagtattctcgttggacttggaagtacttaagaatctgtatcttcaatcttgctatgcttcactttattgcttcatttgttaagcattttttttgagca

SEQ ID NO: 130718 - DNA, 516 bp, Zea Mays
atggcctattggagagagatctctgtgtgtttctggtttctaattggacatagacatgccagtgaggagcagtttagccggttcttgcattatgaagtggatgcaattagaaaggcgtgtgccagcttggaagagggctaccttcctctagttacattcatagtggtgcaaaagcgccatcacacactgttttgtcctgaagatcatcgttcacacagacaaccagatcgacgtggaaatattttgcaagtaactgtggttgacacaaagatatgtcatccaagtgaatttgatttctacctttgtagccactctggcattcaggatgaactagatgcaaaacctgaagagctggaaggagaagagttggaatctaagcttctagagcctgttgcagctctttcggtgcatccagtgcatgtcccaggaaacaagcaactagcttgccctacttcacagaaagttatagctaaatacgatgagctggctgcactacaagctgaaatggcattgtga

SEQ ID NO: 130719 - DNA, 2225 bp, Zea Mays
atgggtgtgacggcgactgactgggcctgtgacagtggcagtggcagtggcagtggcagtggctccgggctagtttgcaggctccaggctggtggcatcgccgacaagcgcaagaaggccgccacgagcggcaagcccaagcgaccgccctctgccttcttcgtcttcatggggtgtagaagctggagcgggctgccactggcaactctacgagagaagctgcccaggttcctgcagaagtgcgcttcgagtctgacccccttcgcccatggttccgtcacctccagatctcttgagatggcgggggaggaggagaggaagcgggtgctcctctcgtacgctgtccccacagtctcctcgcggaacactacaacctccagtactacgggttctggttccagaacgggacacaggcgaaggagaagcgtgtgggctagatcagcggaggaagaagattgccgccccaaccgcgtctatctttggtttgttgttgtttttacttcaagagtctacacaacaatactccaagatccagtgcgcatcgttgctcatggatcaacaatttcattctggcttttgcgtcttgggtgttctctttctgtaattgagacggactccaccaaggtgaaattgcacaacaacacatttgatgcatttatcactgtgagctgtgaaatttcagagtttgtcttcacaatcaaacagtatcctcatatgcacatggagacgtttgtaatgatcataataaaaaggctcaaggatgtcaaccttttcatgtcacaaggagggctcatcattctagcacaggaagttgaggagtgtttacttaaagttgagcagtcacctcctgaaagcacatcaaatgctcttcaactagcaactgcagctcttgtcaagaaagagatgctgacccatgttgattcaaatattagacttgtcgtggcatcatgcatatctgagatcacacggatcacagcgctagatgctccatatgatgacgatgcagtgaaggatgtattctctttaattgtggaggccttcaagcatctggatgacatagagagccccttctttggaaggagaacttcaattcttgatacagtcgcaaaagttcggtcctgtgtggtgatgctagatcttgaatgtgacgatttgataaatgatatgttccatcacttcttgaggactgttaattctgggcattcagaagccgtcatatgctgcatggaaacaataataatgagattggtaattgaggagagtgaggatgtccaaccacagattgcttcatgtctactccaaaatgttagaaaagaagaaaagaaatcttggtctgcaaactcttcatctcgcgcgccggagcggccacgacaacggtgtggactggtgggccttcggcatcttcctctacgagctcgtctacggccgcacgcccttcaagggccacaccaaggaggccaccctcaagaacatcctctccaagcaggccacttaccctcagctggacggcgaggccgacgcatccgatcccagctgcgggacctcgtggggctgctgctggagcgcgacccacgccgccgcatgggcgtcacgcatggcaccgccgagatcaagtggcacccgttcttcgccagcgtggactgggcgctcatccggtgcgtagcgccaccagtggtgccggacagggacaccgtgacccccgcgggcggcggtgaccggaaggcgaccaagctcgggagctggagcagcatgagcagcaactgcggtagcaagaagcggaagagcagcaggagaagcagcttcgggaggagatgcacatccacctgcgaggaaaggcaggggttcttccgcatgctcatgagctggaaccaggagagccggtttagcaacaagatcaagacgacgacgagcaaagaaagatgaacgaaacgaagtgttcttagcttggtgtgattattcgggaggttgcttgctagagggtttttgtccgtttagtgtctggccttagcttacttattacttttgttagtactctactagcagagtacatgtatagagtcagtggtgtggctgtggcgtggatcagatcattgatttgatcgagctgtacaaatagcgaggcgatacatgtcactgagttgatcagttgacaaggtggtttggaccatgttgaggcacggagaaacttcatccctaggttttagtttgtctggctttgctcgtca

SEQ ID NO: 130720 - DNA, 1393 bp, Zea Mays
atcacaggccgacactccactcgatcaaaatcccttcgtcgtcaccgtccccaccgaaaccgcagtaccgtacccgtgccgacgcgagcacgatggccgccgcggcctcctacttcaccgggccgaccatcttgccgtctcagcgagccaccgcggcgcctgacaattccgccgtcgccaccccttctctggctaagtcgcgtgacccccgctgctccggatgctctcccaccaccgtgcgccacatcgcccgctccttcgccgccgctgatgcgaccagtggtggcgaccctgtcatctctattgacggcgtcgacgccaccaatgtttggcttctggggagggcggtgagcgtgatgaacatggaggctggcgtgtcattcacgctcgatgacggcaccgggcagatcgcgctcatgcggtggatcactgacgatattgatgctaaggaagtgtctttcgtccagaatggtttatacctcaaggttcaagttactctcgtagggtttcaagctaagcagcatggttttgctcactctattaggcctgttactaatttcaatgaattggcgctgcacttcattgaatgtatgtatgtgcatttggaaaatgtccggccaaagatgaaggatcaattccctcgtgctgttcaagcaaatgtgtctgctcacgagatgcaagctcaagtcgctcacacagttcaaacaaatgtgcctgcttatatgcccttctctggtggagtaagagagcatcacgttgattttgctcctgaagtaaaccaagggcgattcccttcatcacttcaaacaaacgcatctactcatgcacccttttctggtggagttggagaacagcaagttcactttactcaacccaaccaatttactggtggacaacagcacgatctgcaaagtatggttttggaggttatgcaacaaccagatatacttgcacttgaaaatggagtacatgttgatgaagtggcaaggagacttggaatgccaagagcacaaattatggccattgcccagcgcctggtcgatttggcctgcctctattccactattgatgattatcatttcaagtctcttttaaatggttgatcaatgttatcatcttcaagactagtataatggcatctgggattattggcagtttttaggtactgaatagcattcgtctacatgttttaagtatgcacatctattacatgcatttttttctttgtactgaacacccgtttttttagctgctaagcaaattagtcagactgtcagacatgcagatcgattagaaacttggaatgtcagatcattggcatgctgcagttgctggatggctttgtactgtttatttgtttttattctactagaatatacagcgcaatcttctc

SEQ ID NO: 130721 - DNA, 1221 bp, Zea Mays
attccaaatatcttaagcgccaacgttgtcagcgacagacaagaaaccataagacaccatataaatgccaggagaagctccagatagggtgcaggagaaggcagtgttgtctagtgcgggcaattcttagggaggttccggatcacattgctcttcattccgatcttgttccgcatagtctcgaccccggtcctgttcatagcacggagaactttcagcctcaccatctgctccttagactgcactgtcaccaaacccatgctcttacctggaagctagtgaaagtgcaagcgcacggtctggtgcaacagaaggccgtggtttctggcgatagtagcgcataaattccctagagccaagggttctgacccgagtgcctttctcgctcttgtttgttattactagctcagacccaccgattcccagctcaatgttgttgttcaagtcatcaacagcaatcaactgcttgccttctgaatcaacataactgctgctgtaatcatagaattcctcgaggtcagcatcttcatcatctccaccatctccataccgcaacttgcaatgcccctttgcatccatgtgcttcctgacagcctctagactgaagaaggactggcatctgtcattgcagtagaggcagataaaatcacgcttcacctgcagtccaacataagtaagaagaccactgggatccttcaagtattcactgtcaggtatgaaaaacccatgcttcttatgcatatggaccatgcagtcttctatggtgtcatgcttgaggtcacacatgaaacacgacgagatatccaactcttcaaggtcatccatgtcatcatctgattttgaggagtgctcatcttcttgcatgtttgaagtagactcatcagccaactccatctcacttgggtcaacttcaacccactcttcttcctcatcgtcgtcttgatcctcctctactgcagatggagctcttcgtgagactcgttcaggaagtggcttgactatcgtgataccagcaatagaggcattgggctcctgagaggctttcaaaagatgtgatcgcgagttaagatgctgctcgtgagctttcgagcttctgtactcctttccacaaagagcacagctgtaaagcattggggtgctagcaggcttgctcccctccgccaaagcagcttgcctagccagaaacagagcctctgtgacaccaggaactccagccacctg

SEQ ID NO: 130722 - DNA, 2610 bp, Zea Mays
cacaattccaacccaagctctaacctacgacctccgccgattccgctcgcgtctgcctccgccctccgcccaaaacccaatccagggccaggccaggccaggccaaccaaaccctaggcactgcgccacgcctagcgcgcgtggtatccatgggctgaccgcgtcccggtggggagcccggatccggagctagggttccgtcctaggcggcaccaccatggagtgggacagcgagtccgacggcgccggcagcgtcgacgccggctatgaggagcaggaggaggaggaggaggagcggggaggcgagggtggaggtggcgacgccgggggcggcggtgggatgttcacgttcgcgattgaaggcatgctgcgctcctccgggccctgcgggctagtcgtcaccgacgcgctcgagcccgattgccccatcatctacgtcaaccgcggcttcgaggaggccacgggctaccgcgccgaggaggtcctcggcaggaactgccgatttctgcagtgcagagggccattcgctcgaaggaggcaccccctagttgatgctgcactggtttcagagattcgaagatgcatagacaatggcattgagttccgtggtgatttactaaatttcagaaaagatggatctccagtgatgaacagattgcatctgacccctatttatggagatgatgaaaccataacccattatatgggcattcaattcttcactgatgctaatgttgatttgggaccattgccctgttcaatgacaaaggaaccagtgaggtcaacacggtttgctctagataacacatttcgacccatttctacgaggccagagcacagcaatttctgcccgggaatattctagtctcttccaattaacggatgaagtgctttgccaaaagtatactgtcaagattgtcaccaagagatatagcatctgtgagctctgtgtgcaggcgattgtatgatttgacaagaaatgaagatctttggagaatggtttgccagaacgcttggggtagtgagaccactcgagctcttgagacagtgcctgccgcaagaaggctgggttggggtcggctggcaagagaactgacaaccctggaagctgttgcctggaggaaattgacagttgggggtgcagtggaaccatctcgatgcaatttcagtgcctgtgctgtagggaatcgtgttgttctctttggtggggaaggtgttaacatgcaaccgatgaatgacacatttgtattagatttaaacgctagcaatccagagtggaggcatatcgatgtgagtgcagctcctccaggtcgctggggccatactctatcatgcttaaatggctcctggttggttgtttttggtgggtgtggaaggcagggtctgcttaacgatgtattcatgctggatttggatgcaaaacaaccaacctggcgtgagatacctggagttgcacccccagttccacgttcatggcacagctcctgcactttggatggaacgaagttggttgtttctggtggctgtgctgattcaggtgtactcctcagtgacacatatcttcttgatgtagccatggataggccagtttggagagaagttcctgcatcctggaaaccaccttctaggctggggcactcaatgtctgtttatggtggcaggaagatcctgatgtttggtggtcttgctaagagcggccctctgcggctccggtctagtgatgtgtacacaatggacttgagtgaagaagagttttgctggcgatgcctcactggtagtggaatgcctggggctggaaatccagctggtgcaggcccacctcctcgcctcgatcatgttgctgtgagcctgccaggcggaagaattttgatatttggcggctcagtggcaggtcttcactcagcgtcacagctttatctgttggatccaactgaagaaaagccgacctggagaatattgaatattcctggtcgtcctccccgtttcgcctggggccacagcacctgtgttgttggaggaacaaaggcgatagtgcttggtggacaaactggagaagagtggatgcttacagaaatacatgagctttctttggtcagccgctcagtttgagttctggaatggtttgtagtcatgttccttgcaaattagatgcggcttcttatgcaacctgaagtttgattgccgtcttcagaagaactagaagaatgaatgctgggcatactgaatcttctggcagctacctggcggacttggaagatgaaatggcatcgactggtttgctcgctttgtgtagaaaaggggtagtgatatgttcatttttattgccgtttgtttggccttttttaccagataattacaattcataagctactactgttgtggaatgagtagcaaattttatatgtattctcagaagttcaagacttgcaatatgttaggaaaacaaaagactgcactgtatatagtttaatcttttgatgtacggtacgtggacaacttgatgctgctgtcttgtggcacaggcacacagctagatggcattatgtatggtgatcactgatcaaccatgtttttttttgtagaacttgtataatatgtagaagtttcaat

SEQ ID NO: 130723 - DNA, 1650 bp, Zea Mays
ggcgcggccgaccgagccttctgggcgtcgaaatcgccacccatccatgctgtcgttctacaacatgctgtggcggattccttcctggtgcgcgcgcgcccaagcccgttcctcctcttcttgcccatccacccacaacacatgcttataaaaaggccgtcgtcgttgccgccatgtaactcactcatcgtcagtcagtcgtcacagtactcgatcgagcgcgatctgatctctttccgagcaatcatccgttctagcgtagtagagcgcatggacatggcctcgtcctctgtatcagcagctctcctcctggctgtctccctcgccgctctgcacttgtgctgccgccatgggcacggtgccggcgacgccgccggcaacggcatcactgccatctacagcctcggcgactccatcactgacaccgggaacctcgtcaaggaggcgcctccgggcatgttcgagaccatcaagcacctcccctacggcgtcacgttcgggtacccgaccgggcggtgctccgacggcctcctcatgatcgacttcctggctcaggacctgggtctcccgttcctgaacccgtacctgggcaagaacaagagcttcgaccacggcgtcaacttcgccgtcgccggagccaccgccgtggacccggccgaccagttcaacctccccgccgtccccgtgccgttcgcctccaagtccctcaaggtgcagctccggtggttcaaggacttcctcaagtacaccttcggcaccgatgaagagattcgcagacggcttcaagcttctctggttttggtcggggagatcggcgggaacgactacaactacgccttcttccaggccaagcctgtggccgaggtggagaagctcatcccaggggtcgtgaagaccatcgtcggcgccgccaaggaggtgctggacatgggcgccaccagggtcatcgtcccgggcaacttccccatcggctgcgtgccgggctacctggccatgaacgccgcctcgtcggagccggcggactacgactcggcggggtgcctccgggagctcaacgacttcgccgccaagcacaactcgcggctccggcgcgccgtcgccgacctgcaggcgtcgtacccgggcgccgccgtcgcctacgccgactacttcgactccttcctcaccctcctccacaacgcctcctcgttcggtttcgacgccgcgagcacgcgcaaggcctgctgcggcgccggtgccggcgagtacaacttcgactggcggcggatgtgcggcttcccggggacggcggcgtgcgctgacccgtccacgtacctgagctgggacggcatacacatgacgcaggcggcgtacagggccatgtccaggctcatctaccacggcaagtacctgcagccacagatactgagcttcccggagaaaaacgggcagacataaactcacgtcgtcatcatatatagaacttagttagaaaatatactcgaaacaccggctacaaataagctgtcagtagtcagctgtatcggtaagtacatgcgcgctgttcaactaatgctatcatcaagctgtgagccacactgagtgtgagcaaaatatacacgttgcatgcagtgcagtcagctgcactgaatccacgatgaagtcacacag

SEQ ID NO: 130724 - DNA, 915 bp, Zea Mays
ggcgcggccgaccgagccttctgggcgtcgaaatcgccacccatccatgctgtcgttctacaacatgctgtggcggattccttcctggtgcgcgcgcgcccaagcccgttcctcctcttcttgcccatccacccacaacacatgcttataaaaaggccgtcgtcgttgccgccatgtaactcactcatcgtcagtcagtcgtcacagtactcgatcgagcgcgatctgatctctttccgagcaatcatccgttctagcgtagtagagcgcatggacatggcctcgtcctctgtatcagcagctctcctcctggctgtctccctcgccgctctgcacttgtgctgccgccatgggcacggtgccggcgacgccgccggcaacggcatcactgccatctacagcctcggcgactccatcactgacaccgggaacctcgtcaaggaggcgcctccgggcatgttcgagaccatcaagcacctcccctacggcgtcacgttcgggtacccgaccgggcggtgctccgacggcctcctcatgatcgacttcctggctcaggacctgggtctcccgttcctgaacccgtacctgggcaagaacaagagcttcgaccacggcgtcaacttcgccgtcgccggagccaccgccgtggacccggccgaccagttcaacctccccgccgtccccgtgccgttcgcctccaagtccctcaaggtgcagctccggtggttcaaggacttcctcaagtacaccttcggcaccgatgaaggcaaacactttacacttcccttcctcctctcgatcaaccaaaaccgtctcatcctccctccatggatatcgatatcgacgcgctgctaggcaggcagcaggctcaaacccttgcactgcgtgtggctgcgcgcatgcatgcgtgcgtgc

SEQ ID NO: 130725 - DNA, 1278 bp, Zea Mays
ctctgagatgagtaatgggtgctgaggatagagttgcgcaagcttcctcccattctgcgtccctgctaacatctggagattgccagtggctatgatctgtaaccaaagaagagggaaagtgtgagattagcagctggttcagtgttagctcagtatccatcattcacttgtaagcacagtgcacttgactgaacactacagttatagtttttatgacagaatctctcctgctctaagtgatgcctactacacacaaggtactcatctttcagactggctgtttcaggaaataaccagatcattgctgagagctggtgagcaagagcttctatgcaccttggaagagccaatggacgagcactgcgtacgagacagcaaggactcagttcggacaacaatcgtggagcatgataaggtcttcagacagcaggtgcatgagttgcatcgtttgtatcatgtacaaaaatcattgatggctgcatgcgataaccatggttatcagacgagaacagaagaaactcacagaatggtgcaggggtcaaagttgaatctcaagagcagtccttcaacatcagggacaaatcaatcagctcgccttggtaatgcacaacactcaactccccagcaagtaactgaagattcgagtcttcacgaatgcaagccagtaaactgcctcagcctctttagtgaagaaaactcaacagtcaaagaaagatttcacagggagacccataaatcagttgaagacgaaagttggagtgcatctgtagagagtgatcttgacctcaaactaagcattgggcccagttcacattcaccaaaaacacagcactgggtattctcaggaagcgaggaaagaaaaccttctggtcagcatcgatgagagcaagctagtgaacatccaatcatttagtttgatgtcgtgagaatcgaaacacagcacacaatagtttcgtatgctcagaaagctgaagcctccattgaaaatggcatgtggatctgtggaaatacaggcctcaagaaaaaatgaacttctaactcacatggcgcctggccaacaacaaatggcccagaaatgcttccatcagattttgatcagaattatttagtcactagtgatctgtataaaaaatgtagagcctcccaggtaccaatactttctgtgggtagaactgcactaatgtaatgccaagcagaggattgatgacaattcagttctttcttgtcatgtgcataacttttgagtttcagaaccaaagcgataaagaaacatttgat

SEQ ID NO: 130726 - DNA, 1846 bp, Zea Mays
gccccgctccatgcccctccgcctcctcccgccgcctcgccgcgccgccgcgccactcctcaccccgaccgtctcccacctcgcgtgcctcctcctcggccaggggccggacacacctccgctcctcctcgcgctactcccggtctgcccggccctcctcacgccgctcctctcccgcctcctcctctcgcacacgccgccgctcccggcgctctccctgtaccgccgcctcctcgcgctccgccacttcaacgtgccggaaagctccctcccggtcctgctccgcctcctcgcgcgctcccgccgccacgcccacctctcgttcccgctgctcgagtccctcccgtacacgcacccgcacctcctctccacgcccgcgctcgccgccctcctctcgaccgcgctctccgcatcagcacccggcgcgtccttcgacgctgccgtcacctgcttcgaatccgccgctcgcgtctgggcgcgcgccggcagggccttcggcgccgccgagctcaatgtgctgctccgcgccttctgcgcccgcggccgcgtggccgaggcccgcgctctcttccaccgctactgcgacgcgtacccgcccgacacgcgcacgttcaacacgctgctgctcgggttcaaggaggccggacacgtccacgcgctggacctcttctaccatgacgccgtgctgcggggcttcgtggcggacgccgtgtcgtactgcatcaggatggacgcctactgcaagaaaggtaggttcctggacgccctcgagctgctcgacgaaatgcgcagcaagggggactacaagcccacgctgcaggtgttcaccacgttgatatacggagctgggattgtcaggaacgcggcgagagcacgcgccctgtttgatgaaatggagaagtggggagtgactcctgaccgcggtgctcataatgcgctcatgggcgtgtatgtgagggttagggacttgcagtctgcgatggcggtgatgagtgacatggagaggaaggggatcggtctagatgatgttagctacaacacgatgctttgcgggtttcagagagttggcgacttggaggggatctggaaagtgtacagcaagatggttagctcagggttcatgccgaggaccaggacgacaatgctgctcatgaaggtcttctgcgagaatggacgacctgaccttgggctggagctgtgggattatctgatgggaaggggctgtgtacctcaccagcatgcattggacattctggtcactggtttatgctgtagaggtgtggttgctgaggcatacaggtgtttcagggaaataatcgagacggggatggcaccaacagagcgagcattcacggtcttggaagggtttttaaggcggaaacgggaacacgggaaggttgaggagattaggcaaatgatgaaggctgcccagctgcaggggcatcagattgaagaagaggctacgtgagcttggagcgctactgcaatgcaattgctttccttgaggtaatagttggattgtgttaatcgatgtatgatggccttgatatcaagggtgaaatgttgcactggccaagcttttttgcatctgtggacaacagggaataaatgtgtatctagaagatatatggacccagcgaagggttcattgctggaagtatgttcagctctagaaactgaagcttcagttctgtggaaaaagcttggcctttgccaagaagaggcgcttgaaatatgaaaccgatgcgttgatatgatccagtgcaaaaatgtaatggttatacgctgaattaacaagagtcggaacttgatagtttatttgtttattattacatttcagagttaa

SEQ ID NO: 130727 - DNA, 918 bp, Zea Mays
accggcaccgccgcctcttgtttctcttcctcttcctactcggcaatcaccacacgagagaagagaagctagcgttcaacagaggaagaagcgagagagctgacaagaatcgactgccatcaatggctctggcgccggcgcctctccagtgcttcctcacgagcagcagaccggccgtatgcacggcgacgccgcccaataagcgcgcgaggaggccgtcgaggatctcgtgcagggcgtccggcgatgacaaggacaaggtcccgtcgtcgggagggagcgatcttggggtcaagcagctcgggaagctggccatggtcgcgctggccgccggcgtgctggtgctcggccccgtcgacggtgccgtggcggccaagtccggcggcagggtcggcgggcaggcgttccggtccgcgccccggtcgtccggccctcggatcaacaactccaggaccaacatctacatcaacccgccggtggcgccgccgctgggcggatacgggtacgggagcccgttcttcggcggctacggctacggctggtcgccgttcagcttcttcgcccccgggccgagcgtcgccgtcggggtcggcggcggcttcgacacgctcgtcctcttcttggtgctgggcgccgtcgtcggagctgtcaggcggttcctcaacaggaacaacgacgattacgacgactactgattatcagtgccaggctcctgctacgtacttcaccttcgtgtgtaatatatatatgacgaaatttttcccgtgcggaattctaggaacggagtgtactgacgatgcatcaggagatgtatgtaataattttgtccacagtgaaatgtaatgagcatagcgtctatagttagggtcagttgcaaacagccaaatactgcataacatcgatcgagccaccgactac

SEQ ID NO: 130728 - DNA, 1244 bp, Zea Mays
accggcaccgccgcctcttgtttctcttcctcttcctactcggcaatcaccacacgagagaagagaagctagcgttcaacagaggaagaagcgagagagctgacaagaatcgactgccatcaatggctctggcgccggcgcctctccagtgcttcctcacgagcagcagaccggccgtatgcacggcgacgccgcccaataagcgcgcgaggaggccgtcgaggatctcgtgcagggcgtccggcgatgacaaggacaaggtcccgtcgtcgggagggagcgatcttggggtcaagcagctcgggaagctggccatggtcgcgctggccgccggcgtgctggtgctcggccccgtcgacggtgccgtggcggccaagtccggcggcagggtcggcgggcaggcgttccggtccgcgccccggtcgtccggccctcggatcaacaactccaggtaacctttagcgccttctagcttgatttgaatcggcgtgtaatctgttatctgtctgaactgaatataagtagatagatcactttcgtcaaggttcagttctacatgtcggcatgcatgtagccgtgtgttcagttcaaagctcagacttagaatagatgacgtcgtcttcattcctctcaccgattacgggctctggatgtctgtgaactgttgtgaagctatagatagatttcgttcgtccttcttgtggcaaccttcatggatgcacatgatgctgcgtctgtctgtctgtctgctgaatgcgaaacgttatcttgtttgtgtggtgcgcatgccgcaggaccaacatctacatcaacccgccggtggcgccgccgctgggcggatacgggtacgggagcccgttcttcggcggctacggctacggctggtcgccgttcagcttcttcgcccccgggccgagcgtcgccgtcggggtcggcggcggcttcgacacgctcgtcctcttcttggtgctgggcgccgtcgtcggagctgtcaggcggttcctcaacaggaacaacgacgattacgacgactactgattatcagtgccaggctcctgctacgtacttcaccttcgtgtgtaatatatatatgacgaaatttttcccgtgcggaattctaggaacggagtgtactgacgatgcatcaggagatgtatgtaataattttgtccacagtgaaatgtaatgagcatagcgtctatagttagggtcagttgcaaacagccaaatactgcataacatcg

SEQ ID NO: 130729 - DNA, 355 bp, Zea Mays
tttgttttttgtttcgtttgttttttttgagacctagtctcactctgtcacccagtcaggagtgcagtggtgtgatctctgctcactgcaacctccacctcccgggttcaagtaattctcctgcctcggcctcccaagtagttgggactacaggcgcccaacagtacacctggcaaatttttatatttttggtagagacagggttccaccatgttggccaggctggtctcagactcctgacctcaggtgatctgcctgcctcggcttccaaaagtgctgggattacaggcgtgaccctccatgcccggcctattgtgtgtctcgaagagaagtatctgaaaaggcttagtctctc

SEQ ID NO: 130730 - DNA, 1097 bp, Zea Mays
gagattaagatggctattgcaagatggtgtgatagtagtgatctggtaatttgcacaatggcattttctatgagacataagtttgataaatattggaaaatgaacaatttagctttggctgtgggagcatttcttgatcctagatacaaacataggatgattgagccatatatgtctaagatgtatggcagtgataaagtcgagttagagaaattggtattcatgaatgttatcaatgaattatttgcatattattcagcagtcatcaatgcaaaatcaaccacaaaaggttctagttcaagagagagtgagtttgttccacataaaaatacttgtttggtggatgaggaggatgaggttgatcttgatgagttgtatgcaacaacaagcaatgacaagaaggtgtcagagttagatttgtacatgagcgaggacctagtgaaggtcaatgacaatgaagcaacgtttgatatcctatcatggtggaaaggacaaatgacaaatttgcctattctttctacccttgctcgtgatgtgttgtctatgcaagtgtctactgttgcttcagagtctgcatttagttccggtggatgcattgttgatgcattccgttcaaggctcaaaccagaaattatcgaggcattggtttgttgtaaagattggaagattgcttcggagaaagatttggagattgaaattaaaacgttaagtgaagctatgaatgacgttgacttgcaggatgatgctgcaattggaacttgagaagttaaagttcaagttaccatggactaagttcaacttgttacttcttgttgtaatgttgtggacttattcacttgttttgactggagcagaggcttgctgccagtttggttgttggaactatattttgctgtttgcacttcttaacttgtgctgttctgggtcagacatgatcaaataactctatctattgtgatttgtgtcgtttcattttgtgatgtgaaagcgtcgaacacttgaacatgttaattaatgtcaactatctactatctgttatatgcttatggacttatgaattatgcctaaaaggggatatattgccgatttttttttaa

SEQ ID NO: 130731 - DNA, 1811 bp, Zea Mays
caacgactctaactctatcctcacccctgaagcagagcattgcaagagaaagggccagcaggacacgcgtcgtccgcctacgcagcgggagcggcgtgcggcgccgttggcccgttgcatagaaggatttctttttcccgaaggtgttagtcaggcccggccctgctcggcccagcccatctatataagcgcccgcctctctccccacttaaagcaagcagccagtgttaatcatagtagctccacacgcgcggaggtagtatagccgggaggggcacagagagaggagcgaacgagaggaaggagcagcggcaactacacgccagagagagggaaggggaggttggccagagagccgagagcagccctgcagtcgagagcatccgactgctagctactagcaatagcataggcagataagctcgggccgggccggggcacgcgcacaatgaggtcgcggcggtggcacagcgtggtcgccgtagcgctggcagcggcggcgtggtggtggtgcgcggcggcgcaggcgcaggcgcaggcgcagctgagccagagctactacgcgtcgacgtgccccgacgtggagacgctggtccgcggcgccgtcacccagaagctgcaggagaccttcaacgcggcgccgggcacgctccgcctcttcttccatgactgcttcgtcaggggctgcgacgcgtccgtgctgctgtcgggccccgacgacgagcacagcgcgggcgccgacaccacgctgtccccggacgcgctcgacctggtcacccgcgccaaggccgccgtggacgccgacccgcgctgcgccaacagggtgtcctgcgccgacatcctcgccctcgccgcccgcgacgtcgtctcccagacgggcgggccgtactaccaggtggagctggggcggctggacggcaaggtaggcacgcgtgccgcggtgaagcacagcctcccgggcgccggcttcgacctggaccagctcaacaagctcttcgccgccaacgggctcacgcagaccgacatgatcgcgctctcaggtgggcacacgatcggggtgacgcactgcgacaagttcgtgcggcggctgtacccgttcaagggcgccgccgccggcccgccgatgaacctctacttcctgcggcagatgcggcggacgtgcccgctgaactacggcccgtcggcgttcgcgatgctggacgccgtgacgccccgcgcgttcgacaacggctactaccggacgctgcagcagatgaagggcctgctggcctccgaccaggtgctcttcgctgaccgccgctcccgcgccaccgtcaaccgcttcgccgccaaccagaccgccttcttcgacgccttcgccaacgccatggccaagctcggccgcgtgggcgtcaagaccgccgccgacggcgaggtccgccgggtatgcaccagggtcaactagccctgcccagctccagatgcaatgcatgcgagccacgtccacgtgcacatgaaatgaagctagctagctgctagcctagctttagctagctcgttattactaggggcgccgggggttgggaaagaatgcttcatgagtcatgtccgtccattcatccatccatccatccatcacacggttcacagtcagtcacagtgtactattgattcgttggtccgccgattcttttctttccttggtgattgttgtgtatgtagcagaagtaataattaaaaaaaccatgtaacaagaagagggatgagctttgagctccacacttgtactgcatccaatccaatgtaaatgaatgccacggttcgtcgtcgtc

SEQ ID NO: 130732 - DNA, 94 bp, Zea Mays
gtggtaattgcacttttagaatttaaaattcattctaaaatagatacatctctagttgtattttttctaattacaatcatattcgtctcgatca

SEQ ID NO: 130733 - DNA, 584 bp, Zea Mays
agccttttgtcccaagcacgttggggtaggctagagatgaaaccccgtatgaaaacctcagagctcaacccccaaagaaaaaaggggaaacaaaggcaaaggagaaccgaaaacaacgaaacgggggaacacataaaagagataaaacccacaagaaccagcaaggtctaaatgggcacaagaaaaggtcaaacgattaaggaggaaaagcgaaactataaatcaaggttctggcacgtgaattgcacacttccaccccttcctatccacgatgagctctttatcaatattccactccttcaggtccctcttcacagcctctgtccacatcaaggttggtcgacctctacctctcttcacattctcgggacgcctaattattccgatatgcactggtgcctcttcaggtcttcgttggatatgtccaaaccatctcaaacgatgttgcataagcttttcctcaattggcgccactcctactctctctcgtatgtcatcattccggactcggtctctccttgtgtggccacatatccagcgcaacatacacatctctgccacacatagttgttggacatgtcgtc

SEQ ID NO: 130734 - DNA, 571 bp, Zea Mays
caatgtatctcatgttgttttccatttgacatgtcatattcctatcaattacttgtttaaataaacaactatctcctggacactggaagattattgttctgccgcctgtattctgcctgaccctgacttgatgttccaggaggaatacgttgatggtgaagagattggtacaatgcaatgtgaacatcagtaccatgtgcgctgcattcacgaatggcttaagcagaagaattggtgtccaatatgcaaagcttcagctataccttcagagatgaccaagggagacgcatgaatcttggcccaaacttgtaaatagcgtggatttattattagacattgtagatgctgacgcagttcaccccaatatgtggatacgatagtctctcccgaacggtcgaacgcctggaaccttttgttactgcatcttttatcttcttagcacacccttgctgcttgacagcagtacgggtcagaaactcgaaaataaccgtggttctcaagaaatttttccagattctaaatatgaaattgttctccttgattgaaatgttgggttacatggtttatctaa

SEQ ID NO: 130735 - DNA, 2216 bp, Zea Mays
ctccctcccttcttcgattgccgtcttctctggcttccattttcgcgaggaggcgaggtggacagagacgccgccgccgcttccgcttcgacctcgacctcggcttcggcttccacgagaattctagcaagtcttctggagaatataatccacatctgtttattttgctgcattttggtatggacgaatctgcctgtagatccactgccccagttgggtttcttagaagaggttcgggcatttccttgagaaatcaaagcaatgaggataggtcaaatcagtacaacaagcagccagggaagagttcaaatcccaatcctgtaaaattacggttcactgaaaataaagagaaaccaaggtattttcaagggacatttcattcatcaggctccagggcctcatctgtaagctcttcaaaagctcctgctagaaaatactgcgacgagagacagaaacagccctttttggcagagacagacattgctgaaagcagtaacagaagaactgaggttagacgcctacaaagtggcaagaaagcttctgtatttggtgatgggcatccatacacacagaagagtatctcagaagcttcatcatcctcaacaattactggaggcttgccagaagagcatgatcttggagctttatatgtttctggttcttcaggtagttctgcacatccagttaatcccaggaatgctgcattgaatgcttcggcacatatgcaaaaggataaagaagaaatgagttcaggtagacctcaaggtgctcccacttttgttcgtcggcatactttacctcaaagtttttccactggtgtcaagtcaccaactgcccctggcactggagcacagagacgtggcctcaaaaatcttggttgcacttcaatatctgatgttctgccttcaggatgctcttcatctgattctgctcgtgataggagaatcgaagttacaaagaagagaacttctggtgcaggaagttcttcaagatcaaggataagtgaacaatctaatttcagtcagccacgtgctagttatcctggcagtactggtcctagagctagagctgctgaacaatcagcttctcaacaaacagcaaggaccaatagccgaaatattccggatcatacagattcaataaggactagacgaccttttactctacgtgccagggagaggatgatgccaggtgaaagggaggacagtgtatttgctctgcatgagactgttgcaagcattcatccagaatgcggacattttcacatggatggtactcccccagagagattaggaagacccttttatgcagaactacctcatgcaatttattcatctaatcgtcaaggatcaagtagtcagacagcaaggagaagatctacgtctcgtactgaagaaagccctcaacggatgtttcatggtatgttttgggagagagatggctacagggggataaacatggaaggaattgcacaggcgttgctagcattggataggattgaacatgatgttgaattgacttatgagcaactgcttctgctagaaactaatctgctcttaagtggccttgatttgcacgatcaacatgaagatatgagattggatatcgacaatatgtcttatgaggaactgcttgctttggaagagcatattggctcagtgactactgcccttactgaagagcaatttaccaagtgtgtaaaccaaagtgtgtatgaagcaagaaattcttatagagatgtaagcaagatcgcagcagatgatgtgaaatgtagcgtatgtcaggaggaatacgttgatggtgaagagattggtacaatgcaatgtgaacatcagtaccatgtgcgctgcattcacgaatggcttaagcagaagaattggtgtccaatatgcaaagcttcagctataccttcagagatgaccaagggagacgcatgaatcttggcccaaacttgtaaatagcgtggatttattattagacattgtagatgctgacgcagttcaccccaatatgtggatacgatagtctctcccgaacggtcgaacgcctggaaccttttgttactgcatcttttatcttcttagcacacccttgctgcttgacagcagtacgggtcagaaactcgaaaataaccgtggttctcaagaaatttttccagattctaaatatgaaattgttctccttgattgaaatgttgggttacatggtttatctaa

SEQ ID NO: 130736 - DNA, 1220 bp, Zea Mays
atggcgtggtgcgtgggaccggaccgacaccgagaccagccgccaccgaatcccgccgctcttctggccgccgagttgtcaagcaacgcacgcaccacaagccgcccgcctcagttgaagccccgcggaaaggctggctgcgagtgcgagaccgaccaaacaaagaacacatatcaatcaccagctcacagtgggaggggacgcacgatcggcacccggccatcccctccctcctcttcctcgcacgtcctcttccattccagtaatgggctctgcttcatcagatggtctccgggagcacttgctggacgtggacggcggcggagcggcggcggtgcccaagatacgggtgcgcgggctgcggcgccgcgcggacgcgaccggcgaggagatcctccgcggcgtccacctcgacgtgccgcgcggggccgtcatgggcgtcatcggccccagcggcagcggcaagtccacgctgctccgcgcgctcaaccgcctctgggagcccgcgcccggcgccgtgctcctcgacggcgccgacatctgcgccctcgacgtcctcgccctgcgccgcaaggtcggcatgctcttccagctccccgccatgttcgacggaaccgtggctgacaacgtacgatacgggccgcagttgcgcggcaagaagctaaccgaggccgaagtgaagagcctgctgcacctggccgacctggaccctgctctgtgctccaagccggcgtccgagctgtcggtcgggcaggcacagcgcgtcgccctggcccggaccctcgccaacgaccccgaggtgctcctgctggacgagccgaccagcgcgctggaccccatctcgacgcagaacatcgaggaggccatcgtgcggctgaagaagacgagggggctcaccacggtgatcgtctcccacagcgtgaagcagatccagcgcatcgccgacctggtgtgcctcgtcgtcgccggcgaggtcgtggaggtgctcgcgccgtccgacctgtccgacgccaagcacccgatggccaggcgtttcttggagctcagcggctgaaagcccgcctgctcgctgctgcttcgttggatttcgaaactcttctacctaatcggatgctttcgagctgttctggatggaaaggatcggacgtgtggttatctttccaatcgcctatcatgttctctacttttgttctcgtgtatacatacaatctgttaaagta

SEQ ID NO: 130737 - DNA, 2076 bp, Zea Mays
aaatcgcgaacgcttgtggtggcagcatcggcagcgccacccgcacccggcagcagcagcgcttgtggtgtggctcactggctcctgtgtcggtcacggcctcgaccgatcgcctgctgctgcgagaggaggcgatggagccggcgcggcggctcctgctgtcggactacgacggcgcgatcgagtcgccgctgccgtcgccgccgccctcctcggccacgccgttccgccccggggtggccgtcgtcgtcggcatcctcaccagcgtcttctccatcacgttcctgctccttctctacgccaagcactgcaagcgcagcgctgcggagtcgtcggggccctacgggagcgccggctcgggcggtgggttcgggtcctccggcaacggcgcgggcggggaccggaggaactccggcgtcgaccgcgccgtcgtggagtccctccccgtcttccgcttcggcgcgctgcgcgggcagaaggaaggcctcgagtgcgccgtctgcctcggccggttcgagcccacggaggcgctccgcctcctgcccaagtgccgccacggcttccacgtcgagtgcgtggacacgtggctcgacgcgcactccacctgcccgctctgccgctcccgcgtcgacccggaggacgtcctcctcctcccggagccgcccaagccgtctaccacgggccctcctgacccaccggagacgaaggcggcggcggcggcggcggcgggcaaagagccggctccggctccgcctccagctccagccccaacgcccgcgcagtccggtaggaggatctctggccggcactccacggggtcagtgcgcgcgcctgggcgtgtcggcccggcctcgcggcggtcggccgacggcggcgtcgccgtcggctgcttcgacggcgccaaggtgcggaaggaccgcgtgctgctggtggagccggcggccgtggtggcagagccagacccggtggcgttcgaccggcggttcgggcaccgcatcctggtgagcaccgcgggcgggtgcaagggcgagacggcccccgcggcgcagcagcggtggagcgacctgcgaccgtccgacctcatgttcgtccgcgccgagttcctggtcaccgacgccggccgccactcctgctccgcggccgtgaactccggcaacgccaggagcgccatcggcgtgcgcagcgtgtcggagctggcgggggtgcgccgtctcccgcccatccgcgccggagcgtgcgagggcgagccacgagccggcggcggtggcgcccggcggtggcccgggtcgagctggtgggcgccacgtggggaccccggccgtgcgtaacggccctatcgcctaggcctgcgtgggtcgggaccccacgttgcagccgggagaaagcttttccgccgtcgacgtcgttcatgccaaactaccccctgagatgccacggaattacacagatcagtataaagcggcggcgcgctggccctcccgtctcggctctctactccgcggtcggcggcgcgtcacgtgatgggcagcgtgggaattatatatgtaactggcgggggggggggggggggggggggggggcgctccctactttcgtccggggccacgccggcccgcctcggaagccgcgccggagagcgaggaggagacgcggaagggatgttgctttcgcgggaatctcgaggcgggtgtgttggtcctgttggctctctggctgtggctggtggtacgtgcggcgcggattggttgcgtccccgcccgcagatgccgccgcgggcatcgaggcttggccgcggatcccctgcggccggccccggaccggaggtgtggcgaccggccgggggcggtgcgtgcccgtgcccgtgcgtgcggctgcgcaggtgaggttttggcggcttgcgtcgggcgggtcgggggttagggaaccatacgaaagctgaagcgtgcttgtgtagttgtactgctgcctgctagaaattcttttgtctctctttgcgtgaggtggaaagtaaggaaagcgccgcggcttttttggtgtactgctactaccacttcaaaggacatgtgacttggccga

SEQ ID NO: 130738 - DNA, 1878 bp, Zea Mays
cgcacgtccttggcacgtgccacggccggatgtcgccgcgggctggcagtggcagtggcagtcgggcagcacgagcggggcaagcagcctgtgccgctgcctgcccaccagtccaccaccagccggcgcctcactgtaaagcagcgaacgcccccggccgtagccctagctagcaccacgcagcgcagaggaaagctgcacgcgcgctttccccgcccggcatccggctcccggcacggcaggcagccaccccaccagttgccgccagcctagcctaggcgctcctcccctttcgcggatgccgcccgggtgggctcgtgggcaagtaaagccccccgcgcccgcggcccccaccggcgtggacgtacgcgcgggcagcctccactggatccagggtgcggccagccatggcggtggcgtgtcccaaaactacccacatttacgccgcggacgcgccgtcctcacagccagccgagccggcccgttggttcaccacctgctgtccgtgccgtgcccgcccgcccgcccgaggctagctgccatggaaaactctcccgtataaatactacacccagactgcagtccatggccatcccaacccactcacagtctcacgctactatcgctatctagagctccggccgtcacagacacgagctagagctagagctgcagggaagaagaagaaggaggaggaggagaagatgagggcgtccgcgctggtctgcttcgtggcggtgtcggcgtgcatagcgtgcatcgcgcatggcggcaacttctaccaggacacggagatgacctgggggcaggggcgcggcaaggtggtggacggcgggcgcgggctggacctgagcctggacagggcctccgggtccgggttccagtccaaggacgagtacctgttcggcaagatcgagatgcagatgaagctggtgcctggcaactcggcgggcaccgtgacgaccttgtacctgtcgtcgcagggcgacgcgcacgacgagatcgacctggagttcctgggcaacgtgtcgggcgagccctacacgctgcacacgaacgtgttcacgcgcgggcgggggcagcgggagcagcagttccgcctctggttcgaccccaccgccgacttccacacctactccgtggtgtggaacccgcggcacgtcatcttcgcggtggacggcacgccggtgagggacttcgccaaccgcgaggcccgcggggtggcgttcccgcggacgcagcccatgcgggtgtacgccagcctctggaacgccgacgactgggccacgcagggcggccgcgtcaaggcggactgggcgcgggcgccgttcgtcgcctcgttccgcgggttcagcgccgacgcctgcgtctggtccggcggcaggtcgcagtgccccgtcggcaccatggaggaggcgggaggaggcggcggctggtggaaccagcagctcagcgacgccagctaccgccgcatgcgctgggtgcagaggaagttcatgatctacaactactgcaccgacgccaagcggttcccgcagggccggggcgtgcccgctgaatgcaggctccggcgataaaggtggctggatgagcgaacgcgaagccacctgcgtgcgtgcacgacgatcgatcccctcgtcgtcgttcacttcagaccagagatcggtggtctggcgaataatgtttgggttttttttttgccatgggcgatggcaatgtaaatgtagcacgtgacgcacgtcgcagtgatattctttcatctgttttctgcaacaccggatgtgtacaagtttggagacgtagcgatcgagttcgttccgtttcaaatccgtccggcgtcgcgctacgctttcgaacacgattcatgcgtgtaaaccc

SEQ ID NO: 130739 - DNA, 468 bp, Zea Mays
caagcagcagcctcactatgataacccatttgttgcactggatccgaaaaccatgggctgttgttggtgccttacgagcagcttgcaggaggctttctttagcatcagtgtactccaactgaattgtcctaattttgcccaagtagaacaagtatcggtagaactgcaaccacatgacttccagaagatcaaaggcccacaacacttgtttctactactaacacattttccatttctagcaggcagcatggacggaccccacaattccacagtctctgcaacgcaacaaagcatggacaagcattgcttgtattaaatgaaccacaattgttattctcaatcaaggcttaaagttcagaaatgtgaaaagtggtgtgtaaacaaattacttgtattgttgttcagctttgtagatatctgaagctagttccctgcagaccccacaccagtttgcataaaactcaacaa

SEQ ID NO: 130740 - DNA, 141 bp, Zea Mays
cgacaaataaagtgagacaagctcttgacatgataatagctaataattatcttttactacacataaaattccctatcattaactacaaaacataaaatgaactcatacataataataaactcatagttacacaacaccatg

SEQ ID NO: 130741 - DNA, 2100 bp, Zea Mays
ttaaaaagacacgagatataccgtgtgtgtgtgtgtgtgtgtgtgaaagtgacgggggcagtcatcgcaatggcattttacatcacgcgttggtggcatgcattgtggttgtggacgtgacggcacccagacacacaaaaaagagagacatggcgtcggtacgagcccgtagagcggccggaatcagctacgacggcgtcggcaaagatgtccctgtgtgctgtgcgtacgatttgcatctctcgggtgaaatgcgagaacgaacggaagtcgctgcacgtcccggtggacccaaaaaatgactcggccggctagccgatgcgggagctccctccctcccctgccccggcgtcatcaagcccgctctgccccgccgcagcccctgccctgtctcctctcatcctctggctggcgccaactcacacgcacaaaccgcacggctgggcagtagcagtagtagcagtacatgctctgcttcccgcggcaggagccattcccattcctatcgccggcagcccaagcccccctccgtctccctataaaaccccctcgccgcctccactcacagagtcacaagctcgaccaccaacccagctcgctcgtcccagctgatcaggtcgagcacctagtagcgacctgctcgatcatcagtgtagagtgtcggtaggtgtctgtctctcttggtggctggttgcaacggtcatggcgacgtcgtctcgtcgggtgcccttgctgctgctgtgcctgggcgtgctggtgtcctgctccttcgcggcgggcagcttggaccaggagctggacatcacgtggggcgacgggcggggcaaggtccttgacaacgggcggctgctgacgctgtcgctggaccgcacgtccggctccgggttccagtcccggcacgagtacctgttcggcaagatcgacatgcagctgcggctggtgccgggcaactccgccggcaccgtcaccgcctactacctgtcgtcgcagggcggcgcgcacgacgagatcgacttcgagttcctgggcaacgtgtccggcgagccctacacgctgcacaccaacgtgttcacgcgggggcaggggcagcgggagcagcagttccgcctctggttcgaccccaccgccgacttccacacctactccatcctctggaaccccaagcacgtcatcttcatggtggacgacatgcccatcagggacttccgcaacctggagagcaagggggtggcgttccccaagagccagccgatgcggctctactccagcctgtggaacgcggacgactgggcgacgcagggcgggcgcgtcaagacggactggtcccacgcccccttctccgcctcctaccgcgggttcaaggccgacgcttgcgtcgccgtcgcgggcggccggacccgctgcggcgccaccgtcggcaccgagggcaccggcgcccccgcctccgccgccggcgccggggactggtacaaccaggagctggacctcaccctgcagcagcggatgcgctgggtgcagcgcaagtacatgatctacaactactgcaccgaccccaagcgctaccagcagggcctccccgccgagtgctccatgcagtagcgcccggttattcctcgcccgtccaacaatggcgcgcgcgcgcgtgtgtgtgcatgtggtccgctctactgctaccgctacgacgatcggtgtcgatcaccggatcaaggcaagacgaaaggcatcgaaacatggtagataaataaaggacttgacgatttgtaacgcagtagctggtgcgtgcgtggtgtggtggtaagaaattcttctgctgcctgtgttcttgtagcctcctcgtcctcgcccaccctgttggtacgtgtacggtgtacgtagtctgccgccgcgcgctgttcgtgttcgtcgtgtctcgtgtctgtattatactcgtcctccccatcaaaaaaaaagttgttccatgtacgtgtgcactgtcgagtgatgtttggctggacgtgatcgtgattactcctggaaactatccggcgcgtgcagatcgattgatacatggtcagtcagcgtcactgtatacgccactctatctactgaagcgaattgaag

SEQ ID NO: 130742 - DNA, 2114 bp, Zea Mays
ttaaaaagacacgagatataccgtgtgtgtgtgtgtgtgtgtgtgaaagtgacgggggcagtcatcgcaatggcattttacatcacgcgttggtggcatgcattgtggttgtggacgtgacggcacccagacacacaaaaaagagagacatggcgtcggtacgagcccgtagagcggccggaatcagctacgacggcgtcggcaaagatgtccctgtgtgctgtgcgtacgatttgcatctctcgggtgaaatgcgagaacgaacggaagtcgctgcacgtcccggtggacccaaaaaatgactcggccggctagccgatgcgggagctccctccctcccctgccccggcgtcatcaagcccgctctgccccgccgcagcccctgccctgtctcctctcatcctctggctggcgccaactcacacgcacaaaccgcacggctgggcagtagcagtagtagcagtacatgctctgcttcccgcggcaggagccattcccattcctatcgccggcagcccaagcccccctccgtctccctataaaaccccctcgccgcctccactcacagagtcacaagctcgaccaccaacccagctcgctcgtcccagctgatcaggtcgagcacctagtagcgacctgctcgatcatcagtgtagagtgtcggtaggtgtctgtctctcttggtggctggttgcaacggtcatggcgacgtcgtctcgtcgggtgcccttgctgctgctgtgcctgggcgtgctggtgtcctgctccttcgcggcgggcagcttggaccaggagctggacatcacgtggggcgacgggcggggcaaggtccttgacaacgggcggctgctgacgctgtcgctggaccgcacgtccggctccgggttccagtcccggcacgagtacctgttcggcaagatcgacatgcagctgcggctggtgccgggcaactccgccggcaccgtcaccgcctactacctgtcgtcgcagggcggcgcgcacgacgagatcgacttcgagttcctgggcaacgtgtccggcgagccctacacgctgcacaccaacgtgttcacgcgggggcaggggcagcgggagcagcagttccgcctctggttcgaccccaccgccgacttccacacctactccatcctctggaaccccaagcacgtcatgtgagtcgtcgttcgttgctctgcttccttcttctgcattcctatcgcctgcagcttcttcatttcatggttggtgtccatgctcttttgctcctccgccagcttcatggtggacgacatgcccatcagggacttccgcaacctggagagcaagggggtggcgttccccaagagccagccgatgcggctctactccagcctgtggaacgcggacgactgggcgacgcagggcgggcgcgtcaagacggactggtcccacgcccccttctccgcctcctaccgcgggttcaaggccgacgcttgcgtcgccgtcgcgggcggccggacccgctgcggcgccaccgtcggcaccgagggcaccggcgcccccgcctccgccgccggcgccggggactggtacaaccaggagctggacctcaccctgcagcagcggatgcgctgggtgcagcgcaagtacatgatctacaactactgcaccgaccccaagcgctaccagcagggcctccccgccgagtgctccatgcagtagcgcccggttattcctcgcccgtccaacaatggcgcgcgcgcgcgtgtgtgtgcatgtggtccgctctactgctaccgctacgacgatcggtgtcgatcaccggatcaaggcaagacgaaaggcatcgaaacatggtagataaataaaggacttgacgatttgtaacgcagtagctggtgcgtgcgtggtgtggtggtaagaaattcttctgctgcctgtgttcttgtagcctcctcgtcctcgcccaccctgttggtacgtgtacggtgtacgtagtctgccgccgcgcgctgttcgtgttcgtcgtgtctcgtgtctgtattatactcgtcctccccatcaaaaaaaaagttgttccatgtacgtgtgcactgtcgagtgatgtttggctggacgtgatcgtgattactcct

SEQ ID NO: 130743 - DNA, 1913 bp, Zea Mays
ttaaaaagacacgagatataccgtgtgtgtgtgtgtgtgtgtgtgaaagtgacgggggcagtcatcgcaatggcattttacatcacgcgttggtggcatgcattgtggttgtggacgtgacggcacccagacacacaaaaaagagagacatggcgtcggtacgagcccgtagagcggccggaatcagctacgacggcgtcggcaaagatgtccctgtgtgctgtgcgtacgatttgcatctctcgggtgaaatgcgagaacgaacggaagtcgctgcacgtcccggtggacccaaaaaatgactcggccggctagccgatgcgggagctccctccctcccctgccccggcgtcatcaagcccgctctgccccgccgcagcccctgccctgtctcctctcatcctctggctggcgccaactcacacgcacaaaccgcacggctgggcagtagcagtagtagcagtacatgctctgcttcccgcggcaggagccattcccattcctatcgccggcagcccaagcccccctccgtctccctataaaaccccctcgccgcctccactcacagagtcacaagctcgaccaccaacccagctcgctcgtcccagctgatcaggtcgagcacctagtagcgacctgctcgatcatcagtgtagagtgtcggtaggtgtctgtctctcttggtggctggttgcaacggtcatggcgacgtcgtctcgtcgggtgcccttgctgctgctgtgcctgggcgtgctggtgtcctgctccttcgcggcgggcagcttggaccaggagctggacatcacgtggggcgacgggcggggcaaggtccttgacaacgggcggctgctgacgctgtcgctggaccgcacgtccggctccgggttccagtcccggcacgagtacctgttcggcaagatcgacatgcagctgcggctggtgccgggcaactccgccggcaccgtcaccgcctactacctgtcgtcgcagggcggcgcgcacgacgagatcgacttcgagttcctgggcaacgtgtccggcgagccctacacgctgcacaccaacgtgttcacgcgggggcaggggcagcgggagcagcagttccgcctctggttcgaccccaccgccgacttccacacctactccatcctctggaaccccaagcacgtcatggacttccgcaacctggagagcaagggggtggcgttccccaagagccagccgatgcggctctactccagcctgtggaacgcggacgactgggcgacgcagggcgggcgcgtcaagacggactggtcccacgcccccttctccgcctcctaccgcgggttcaaggccgacgcttgcgtcgccgtcgcgggcggccggacccgctgcggcgccaccgtcggcaccgagggcaccggcgcccccgcctccgccgccggcgccggggactggtacaaccaggagctggacctcaccctgcagcagcggatgcgctgggtgcagcgcaagtacatgatctacaactactgcaccgaccccaagcgctaccagcagggcctccccgccgagtgctccatgcagtagcgcccggttattcctcgcccgtccaacaatggcgcgcgcgcgcgtgtgtgtgcatgtggtccgctctactgctaccgctacgacgatcggtgtcgatcaccggatcaaggcaagacgaaaggcatcgaaacatggtagataaataaaggacttgacgatttgtaacgcagtagctggtgcgtgcgtggtgtggtggtaagaaattcttctgctgcctgtgttcttgtagcctcctcgtcctcgcccaccctgttggtacgtgtacggtgtacgtagtctgccgccgcgcgctgttcgtgttcgtcgtgtctcgtgtctgtattatactcgtcctccccatc

SEQ ID NO: 130744 - DNA, 744 bp, Zea Mays
atgccgatgcttactcttcgccgccttgtgaagaaactccggcgtgccgtcattcgtgagttcatccgggcatgtcacctgggagttctcgacgacgaccgtatcggcttcgccatccagagtgccatcatgcagatgagcgccgacggtttcaacggcgtgtggcttcctacacttcgcagaaccgctcgccgtgaaccgccgcgccgtggatcgatgccacgccgtgcacgcgcgccagcagtggcggttgttcctccatcttcgactccagtcgaggcaacgccgacctccaacccgtacccaccaggctactgcccggtccatggatacggacagtgtgtgctgcgcgacgccggaatcctcgacaccacaatcatctccgccctacgccaagccgcagtcgctgccacctctaccgcccggccaacgccaacccaggcagcagaggagagacctcggtggaggccacctacgcctgcgccgcctggatttggccgacgaccaaccatggcggctcggacgggctgcccgccgttcttctccaacgcagtggtcaattcccccccgccttccgcgctcccgatgccgtcccccacgcttctcccgccacgacgccatgccggagtagcggccgcgcgccgcccaggtctacgccccgtcaaggatgaggccgacctccccaacggcagcgacagcggatggttctcctcggacgaggagaaggcggactccatctcctaa

SEQ ID NO: 130745 - DNA, 280 bp, Zea Mays
aatcacgtccatggtgcaagcacgctgcaagtcacgccagacaccggaaacgagggagaacggagggaggagtactgccgttgtgggattgctcgtctaccagcatggaagcatcggtaatcgaccaggggtgtgttctctgggacacacggacgggggtcgcactgtcaccgggccaacacgctggccggagcctaaccaatttctcgtcggactgcacggggcgccgctgaactaccagtcgccatggccgacctcgtcgcaatgccatcaccggtga

SEQ ID NO: 130746 - DNA, 104 bp, Zea Mays
gcaaataccccattagacatcttaaaagcctttacattaaacatcactgtacatgcccttaaggacatgacacattatttatgtgaaaaccaaataggccaacc

SEQ ID NO: 130747 - DNA, 2235 bp, Zea Mays
cagctcgccgccatcatccatatcatatcacctcaccgccacacctcggcagggcaagtcgtttgccacccaggccaaccctctgccgccgctacgccaccgcacgtccatccctcgccgacacgtctcgcacgctgacgggccaacccactccaccccgagtccgggcataaaagcaagcaccctaacacacactctctacttccaccccggaccgacaaagcagagcacgcgctggcagccaagtgcacacagacacgtctctctgttcgttctcagcttgctatagcaacctctagtaggtagccatggagatggtcctggactggcgctcgctgggctccctgctggcgaccgtcgtggtgttccgcaccgcgctgcgtaacttcctgccgccggaggccgagatgctcctgcgccgcttcctcgcgtgggtcgccgccgcgttccgcccgcccagcgacaccatcctcatcgacgaggcggacgggcccacggggagcgccaacgacctctacgagtcggcgcagctctacctcagcgcgcgctgcctcgccaccgcgcccgccgtgcgcctgcacaagccgcgccagtcgccgcgccccgtggcgtcgctcccggactcgcacaccaccgacgacaccttccgcggggtccgcgtcaagtggacctccaccacgcgcaccgtcgaccgcagcggcagcggcggcggcggtaacccgtacaacatattcggccgcggcggcgaccagcgcggcctcgagctccagttcccgcgccagcaccgggacctcgtccaccaccactacatcccgcacctcatcgacgaggccacccggatgcggctcaagtcgcgggagcgccgcctctacaccaaccgcgccacggggccctgcgacgaccaccaccgcctctggacgtcgcacgccttcgcgcacccgtccacgttcgacacgctggcgctcgacccggcgctgcgcgacgaggtccgcgccgacctgctgcgcttcgccgcgcgccgggaccactacgcgcgcgtcggccgcgcctggaagcgggggtacctgctccacggcccgcccggcacgggcaagaccagcctcgtcgctgccatcgccaacctgctcgacttcgacgtctacgacctggagctcaccacggtgcccaccaactcccacctccgccgcctgctcgtctccaccacgcccaagtccgtcgtcgtcgtcgaggacatcgactgctccctcgacctctccgaccgcaacaagaagacaaagaagggtgctggcgtcggcgtcggcatcggcaccgccggcgacgaagacgccgcagcacagctcgccgtcatgtcggtgtcgccggtcgcggcggccgtgatggggcgcgagtccgtcagcctctccggggtgctcaacttcgtcgacgggctctggtcgtcctgcgtcggcgagcgcctgatggtgttcacgaccaaccacccggagcggctcgacccggcgctgctccgcccgggccgcatggaccgcaagatcgagctcggctactgcacgccgcccgcgctgcgtgtgctcgccaagaactacctcggcgtcggcgacgagggctgcgacgacgccgacgcggaccccgacacggtcaacgccctcatggcggaggccgagggcctgctcgccgccgccgaggtgcaaatcacacccgccgacatcgccgaggtgttcatgggctgcgacggcgcgggcgccgccgccgcgctgaggaagctcgtgggcgagctgcggcggaggcgggatgctgctgcccttgccacggccgtagcaccgccggaataaaaccagccagggatcctacgtagcgcgccaccatgcatagctgcctagtcagcttccattactttgatgctaggtggtttatttattgagtcgtgacggtgcaatgcgaagtgtcgtgtgtcaggtgtttcccttctcatttagtttgggttcgtgtttttgtgtcgtgctagtacgtacggatcccgtaggctaggcagccaataagccaataatggacgctgattacccaggcacaacaatactgttatatgacagagctcgcccattgcatgcaccagtggtttcattttcagcgcataggtgtaaagtgccgaaaggcaaggccggctggatcgtgactaaaggctgtgttttagttagattcttatctggcatggccaagaataccaaaattgatttccac

SEQ ID NO: 130748 - DNA, 1532 bp, Zea Mays
cgacaaagcagagcacgcgctggcagccaagtgcacacagacacgtctctctgttcgttctcagcttgctatagcaacctctagtaggtagccatggagatggtcctggactggcgctcgctgggctccctgctggcgaccgtcgtggtgttccgcaccgcgctgcgtaacttcctgccgccggaggccgagatgctcctgcgccgcttccggcgaccagcgcggcctcgagctccagttcccgcgccagcaccgggacctcgtccaccaccactacatcccgcacctcatcgacgaggccacccggatgcggctcaagtcgcgggagcgccgcctctacaccaaccgcgccacggggccctgcgacgaccaccaccgcctctggacgtcgcacgccttcgcgcacccgtccacgttcgacacgctggcgctcgacccggcgctgcgcgacgaggtccgcgccgacctgctgcgcttcgccgcgcgccgggaccactacgcgcgcgtcggccgcgcctggaagcgggggtacctgctccacggcccgcccggcacgggcaagaccagcctcgtcgctgccatcgccaacctgctcgacttcgacgtctacgacctggagctcaccacggtgcccaccaactcccacctccgccgcctgctcgtctccaccacgcccaagtccgtcgtcgtcgtcgaggacatcgactgctccctcgacctctccgaccgcaacaagaagacaaagaagggtgctggcgtcggcgtcggcatcggcaccgccggcgacgaagacgccgcagcacagctcgccgtcatgtcggtgtcgccggtcgcggcggccgtgatggggcgcgagtccgtcagcctctccggggtgctcaacttcgtcgacgggctctggtcgtcctgcgtcggcgagcgcctgatggtgttcacgaccaaccacccggagcggctcgacccggcgctgctccgcccgggccgcatggaccgcaagatcgagctcggctactgcacgccgcccgcgctgcgtgtgctcgccaagaactacctcggcgtcggcgacgagggctgcgacgacgccgacgcggaccccgacacggtcaacgccctcatggcggaggccgagggcctgctcgccgccgccgaggtgcaaatcacacccgccgacatcgccgaggtgttcatgggctgcgacggcgcgggcgccgccgccgcgctgaggaagctcgtgggcgagctgcggcggaggcgggatgctgctgcccttgccacggccgtagcaccgccggaataaaaccagccagggatcctacgtagcgcgccaccatgcatagctgcctagtcagcttccattactttgatgctaggtggtttatttattgagtcgtgacggtgcaatgcgaagtgtcgtgtgtcaggtgtttcccttctcatttagtttgggttcgtgtttttgtgtcgtgctagtacgtacggatcccgtaggctaggcagccaataagccaataatggacgctgattacccaggc

SEQ ID NO: 130749 - DNA, 135 bp, Zea Mays
atgaagaccaaaaaaaaattaagttctgtactgcagtgtagctcacgctccaagcgtcttttgcttcttggcagtattgatgtagggccgcagcacaaactcgctctgcgcttccttttgttccacggttcctag

SEQ ID NO: 130750 - DNA, 211 bp, Zea Mays
gatctaatcctctttctcttgggcatctcatgcacttaagtcttctcaccatacattctcatctagagattctcaaaggcttccaacaccacatcaaccaacttaggcttcttgacatagaccctcacaattctatcctcactgtaagcaggtagcaagtggctaacccaatcatctgtgatggggaacttctcgtcgcatccaaaatcct

SEQ ID NO: 130751 - DNA, 796 bp, Zea Mays
aatgttttgaaccccgagcttgttaaaggccatggtagaaagaagtaagtcctaccgttctctggttagggtttgtttcacttttcttaaaacaaatgaatgtcattttggttattgcccaaatactttctacagatcaatggttgtgacagatcacacaaaggccgataagatataccaagagatcgaaggtcacaagcaaaaaattgctcgcgccgaagtcgtatatgcaaactcgaaaactgaaagtaatactgagggcacaaggcctactcataggactggattccttggtcttattggtacaaaggttgacaccattgaatactgtagtgagcagattaaggaattactgcccaaactggaggctgaacagaagactacccttcatgagaaacagcagcgggctgccattgtcatcttcaatagtaggtctgccgtagctttcgcatctcagactctccatgctcaagtgtatgataaatggacagttatggaagctcctgaaccacgccagataatatggtccaaccttcctatgaaactatatgataggcaaatcagacaatctgtggtttatggcattgtctttctcatagttgtgttctatatggtttctctcactgctatttttgctgttacaaccctggaaaacctggagaagctacccttcctgaagccagtggtggagcaaccagcaatcaagacggtcttagaggcctaccttccccagattgcacccattatatgccacatgattcttttattatttcttttttaggaagacagtgccatt

SEQ ID NO: 130752 - DNA, 109 bp, Zea Mays
gaaatttgagattatggttggatatcaagccagctcggctcggctcgttaagccaacgatccataaaatcggtttggctcgtttacgagctcgagccgactcgtttagc

SEQ ID NO: 130753 - DNA, 2927 bp, Zea Mays
gatcccgggcgctcggtccttgggtgccgtcagggatacctgaaattggagtccaacctcgtcctcttacgaattcggtagctggtctgaatatggcagatgccctcttggtcgttctcagaaaagttgctctgttcctgggagaaggagcactagaaaagattggcaaagaggtagtcgaagcagcacccctcatgacagattttgagcatagcatgaaacaaatagagggtgaactctcggttctgcaggcctttattaaccaagttagtgcacagagagtcagtgacaaggcatttgatgcatggttgaaccaagtcagagatgctgcccatgaggtagaagacatcattgatgagtacgcttaccttactgcacaagccgttgatacgagcagcttcttcaagagaaagttccaccagatcaagaacattgcagcatggcagaagttcccaagccagatcagtcaagtagaagcaaggattcagaggctatcagaaatgaggaaccgatatggtttctcgctgggtgaaatagacaggaataacaattttcagctctccagtcacttttgtctgtcagattctgagatagtaggaaatgccgatgaaatcggaaaactgacacaatggctacttgaggagaaacaagatcggtctctaattgccatccttggtatgggaggtttaggaaaaactgctgttgcaagcaccgtctacaagaaccaaaagatcataacatcttttgactgtcacgcatgggttattgtatctcagacttaccaagtcgaggaactactaagagaaattataaatcagctaataataaaggaaagagcaagcatggaaagtggcttcatgaccatgagtcgcatcagattagttgaggtaatacaaagctatttgcaggacaaaaaatactttgttgtcctggatgatgtatgggataaagatgtttggttaattttgaactatgcatttgtcagaaacagacatggtagtaaagtgctgataacaagtcggagaaaagatgtgtcgtctttggcagctgacaaatatgtcattgaacttaaaacccttaaagatgctgaatcttgggagctgttttgtaagaaggcatttcatgcttcagaagataacatttgtcctgaaaatataagatattgggcaaataaaattgttgcaaagtgccaaggattgccactggccattgtaactattggcagtattctgtcataccgtgacttaaaggaacaggagtgggcatttttcttcaaccaacttagctggcaattagccaacaatccagagctcaactggatttcccgtgtattaaagttgagcttgaatgatctaccaagttatcttaggagctgcttcctatactgcagcatctttcctgaagattacaagattagaagaaagatgatttccaagctatggatagcggaaggtcttgtggaagagagaggagacggaacaacgatggaggaagttgccgagtgttaccttatggagctcactcaacgttctctttttgaggtcacagaaaggaaaacatgtggaagagctagaacatttctgatgcatgatcttgtgcgagaggtaacttcaatcattgctaaaaaggagaagtttagcattgcacttgcacatggtggtgccagtacaacccaagttgcccatgaagcacgccgcctatgcatccaaagaggtgcgcagaccattaattctttaagaagctcgcggcttcgctcattcattttgtttgacgctgaagtaccatgttcttggatacatgatactgtatcatgtttcagactactgagagttctatgcctaagatttgtcaatgttgaacaagttccaagtgtagtcacagaactgtataacttgcgttatctagatatgtcatacacaaaagtgaagacggtccctgcatcgttcggaaagctcgttaacctacaatctttggatcttagagagacctacgtggaggagttaccactggaaataactaggctaactaaattacggcagttacaggtgtatgcactctatgatattctacaaagatcatcaaaatttctcagtgctacaaaaattcctggtaacatttgtcatctaaaggatctccaaactttgcatgttgtttcagccaataaagttttggtttcacagctggggaacttgaagttaatgagaagtttggctatcgcggaagtgcaacaaagctacattgcagaattatgcaactcgctgacaaagatgactaacctgaaaacactatttatttccacgtgcaatgtgaatgagactctcaacatagaaatgctaaagccgctgccaaatctgacatcatttctcctatcaggaaagttggagagaggcttgcccccgtcgatattttctatgaatttaaaacagttaaaattgttcgggtctagtctgaagaaggatcctgttagctcgttctctcatatgctaaatcttgttaatctattcctcactggagcatatgatggggaacagctaactttttgcaccagatggttccccaatctcaaatatctgcaattagctgatatggaacatctgaattggattgagctagaggatggaacaatgatgaatctacaatatttgtcacttgctggtttaaggaatctaaaggctgtacctgagggcatcaagtacattagggcactccatgagatgcttctgacagatatgccaaatgagttcatgctaaaactgcatggaagtgacaatcacattgttcaacacatacccaacataaaaaagtatgactcttctgattctcaagcagtaaacaacctggcttatctgccgtggcttgccaataagtttggtcctggtgctgcaattaagtatgcctccataaattgtggctcatctggctcttga

SEQ ID NO: 130754 - DNA, 2859 bp, Zea Mays
aattcagacatggcagatgccctatttgtagttcttagtaaacttgctgattccttgggagaacagacactagagaggattagcacaaagctgattgaagtagcaccagttttgacagattttgagcatagcatgaagcaaatcgaggctgagctattgattcttcaggcttttattgcacaggttgggacaaaagtcggtgataaggcatttgatgcctggctggaccaagtgagagatgttgcccatgaggtagaagacatcattgatgagtatgcttaccttgaggttcaagccgtggatactggcagcttctttaagaggaagttccttcagataaaaaagttcgctgcatggcagaagtttcatagccagatcagtcatgtagaagctcgaattcagaggctaggtgaaattaggaatcgatatggcatcttgtcaggtgaaatagacaggagtaagaaattgaggagccccaatcggctctttatgtcagattcttcttacttaactgataactctgaaatagtggggcatgttgatgaaattggaagattgacacagtggttacttgagtacaaacaagagcgaactcttattgccgtttttggtatgggaggttcaggaaaaactactattgcaagcagtgcatacaagagtcaaaagatcacaaggactttcaattgtcatgcatgggttactgtatctcagacttaccaagttgaagaactactaagagaaatcataaatcagctaatagatcagagagcaagcatgtcaagtgggtttatgactatgagcggcttgaggctagttgaggtaatacaaagctatttgcaagataaaaaatatttcattgtcttggatgatgtatgggataaagatgcatggctatttctaaactatgcatttgtcagaaacaattgtggaagcaaagtgctgataactactcggagaaaggacgtatctagcttggcagttgatcagtatacaattgagcttaaaactcttcaatatgctgaatcctgggaacttttctgtaaaaaggcatttcgtgcatcaaaggataaccaatgtcctgagaaccttaggttttgtgcagagaaaattgttgctaggtgtcagggattgcccctggctattgtaaccattggaagtgttctatcataccatgaattcgaagagcagggatgggaatctttctacagccaacttagctggcagttagctaacaatccggagctgaattggatatctaatgttctgaatatgagcttgaatgatctcccgagttatctgaggaactgctttctgtactgcagtctttatcctgaagattacaagattaaaagaaaagtgatttccaagctatggatagcagaaggtttagtggaagatagagaagatggaacaacaatggaggaggttgccaattattaccttgtggagctcactcagcgttgtcttcttcgagtcacagaaagtaatgcatgtggaaggccgagagcttttgttatgcatgatcttgtgcgagagttaacctccaacattgctaaaaaggagaagtttggtattgcatatggcgatgctagtacaacccaagttccccctgaagttcgccgcttatcagtcaaaactgcaactgctgctgaccacatgacttattccatcacgcggctccgctcatttattttgtttgacactgaagtaccatgctcttggatagatgatgttttatcacgtttcagactactgagggtcctatgcctaagatttgcaaatattgcagaagtgcctggcgtggtcacagaattgtataacttgcgctatattgatttttcatacacaaaagtgaagacaataccagcatcattcagaaaacttgtcaacctacaagttttggatctcagattcacctacgtagaggagttgccactggaaataactacgctaactaacttgcgtcatctacatgtgtttgcagtccatgattttcaacaaagatcattgaattgtttaggcgcaacaaaaattcctgttaacatttgtcatctaaagaatctgcaagctatacagatcgttttggccaacaaagatttggtttcacaacttgggaacttgaaattaatgagaagtttggctatagcggaagtgcggcaaagctacattgcagaattatggaagtccctgacaaagatgcctaacctgaataggttggctatttcaacatgcaacatggaggagattcttgattttaaaatgctaaagcccttatcaaatctggttttcttcaagcttgcaggaaagttggagtcaggcgtgcttcctttgatgttgtattattttgagaagttaacatggttacaattagactggtccggtctaaagaaggaccctatgagctccttatctcacatgtcgaaccttgttcatctgttcatgtgcgggtcatattgtggggaacagctaactttttgttcaggatggttccccaagctcaattatctgcaattatctaaaatggagaatctgaattggattgagatagaggatggaacaatgatgtgtctaaataatttgtacttagttgatttagggaatctaaaggctgtgccctatggcatcaagtacatcaggacactgcaccagatgcatctgacagatatgtcaaaggagtttctaggaagtctgcaaggaagcgcgagtcccgttgttcaacatatatgcaacatccatatttttgaatcctctgattctgaagcagtaaataaattcttctttgagccataccttgccaccaagttcggccctggtgcaactaagcatgcccctacttacctgggatcatctggcatctga

SEQ ID NO: 130755 - DNA, 3082 bp, Zea Mays
gagaagtcagcgaatatggcagacgcgctgtttgttgttctcaggaaagttgccctttccctgggagaaggcgcgctggtgaagattggcacggacgtggtcgaggcagcgcccatcttgacagattttgagcatggcatgcgacaaaccgagggcgagctcttggtcctgcaggcctttatcgggcaggtccgggcgcagaaggccggtgacaaggcgttcggcgcatggttggaccaggttagagatgtcgcccatgaggtagaagatatcgttgacgagtatgcttaccttaccacgcaagccatggatgcaagcagcttcttcaagagaaagttccatcaggtgaagaactttgcagcgtggcagaagctaccgatccggatcagtcaagtggaagctcgggtccggaggctgtccgaaatgaggagccggtatgggatttcggtaggcgaacaagacaggggtagcaagttacagcaatccaatcagttctctgcgtcagattttgcttacctaactgatgattctgaaatagtagggcatggcgaggaaatcgagagactgacacagtggctgcttgaggagaatcaggaccgaactctgatagccatctttggtatgggtggtctaggtaaaactactgttgcaagcagtgtctacaagaaccaaaagatcaggagaacttttgattgccatgcatgggtcacggtatctcagacttaccaagctgaagagcttctgagagaaatcatgaaccagttaatagagcagagagcaagtttggcaagtggcttcatgaccatgagtcgcatgagattagttgagatgatacagaactatttgcgggacaaaaaatattttattgtcttggatgatgtatgggataaagatgcttggttgtttctgaactatgcatttgccagaaacaattgtggaagtaaagtgctgataacaacccggagaaaagatgtgtattctttggcagttcacagtcatgtaattgaacttaaaactcttaactatgctgaatcatgggaactcttctgcaaaaaagcattttttgcattggagggcaacatatgccctaagaatctcacgtctttggtggagaaagtcgttgataagtgtcaaggattgccattggctatcatagccatcggaaggattctatcatgccatggattagatgaatgggagtgggcatttttctacaaccaacttaattggcagttagctaacaattcagagctaagctggatctctactgtcttgaatctgagcttggatgatctcccaagtcatctgaggagctgctttctatactgcagcctatttcctgaagatcactttattaaaagaaaacagatagccaagttatggattgcggaaggtcttgtggatgagagaggggatgggacaacaatggaggaagttgctgagcattaccttgcagagctaactcaccgttctcttcttcaggtcatagaaagaaatgcaagcggaaggccaagaacgtttgttatgcatgatcttgtgcgggaagtgacctcaataaccgctgaaaaggaaaagttcgcggtgatacatggccatgttggtacaacccaagtttcccatgatgcgcgccgcttgtgcatccaaaaaagtgcagattctcaaaactctttagcaaattcacatcttcgatcattcattttatttgacaatttagtaccgtcttcctggataaatgatgtctcatcacgtttcagactgctgagggtcttaggcctaagatttactaatattgaacaaatgccgtgcggggtcacagaactgtataacttgcgttatctggatatttcgtacacaaaagtcaagcagataccggcatcattcagaaaactcatgcaccttcaagttttagatctgaggttcacctgcgtggaggagttgccatttgaaataactacgctaactaatttacgccatttacatgttgctgcggtccatgatcttcaagaaagatcactgaattgcttcagtgctacaaaaattcctggcaacatttgtggcctaaagaatcttcaatctttacatacggtttcagctaatgaagatttggtttcacagttgggaaatttgactcttatgagaagcttgactataatgaatgtgcggcaaagctatatcgcagagctatggaactccctgacaaaaatgcctaacctgagtgtcctgattatttttgcatctgatatggatgagattcttgatttgagaatgctgaggcccttacctaaccttaagttgttctggctggcaggaaagatgaagggaggcgtgctcccatcgatattcaacaagtttgagaagctaacacagttaaaaatggactggtctggtctgaataaggaccctataagctccttttcttacatgctaactctagtcgatgtgtggttcttcggggcatattgtggggaatatctatctttttgtgctggatggttccccaatctcaaatctctgcacattgctgatatggaacatctgactcggattgagatagaggatggaacaatgatgggcctgcatcatctggaacttgttggtttaaggaatatgaggctagttcctaagggtatcaagtatattagaacactccgtcagatgatcctgactgatatgccaaaggagttagttgaaagcctgcgaggaagtgacgcgcacattgttcagcatgttcccaacatccatatttttgactccagtgatcctgaagcagtaaataacttcatattctggcctcatcttgccaagaagtacggctctggtgtaactaagtatgaccctagaaaatgaggatcatctggaacctggaaaattattgggaggtttcagcaataaatatgtctctgatttgtaggacaaccacttgagcagtgagaaaatcatcaaaatgtacttgttgatcttggtgccaaaactctagatgagtgtgttttgtgtgtaatatatgttactcatggattttggccctcgctaccgaatggtttcctactgccaataatgattcattcgaacagaattcaccatc

SEQ ID NO: 130756 - DNA, 2778 bp, Zea Mays
ccagatttcatgatgcttccgtcatctactatctcgtgtatcagtccccgccggcttccgtccccaattactcgctcaaaccctagccccaccgcgcgaatggccgatgtgcttgacccggcctccgacgcgccgcgcgcgcgccgtccgccgccacctcccccggatagcccggaggaccgctcgccgcagctgcccccgcctccacccgggggccccccggcggcgagccggaagcggagtcgctctccgccgccgccgccgccgcctccgctgggttcgtcccggccccaaaggtatcgggaccaccgcagcggcggagggcggggcgggagcagccccagcccgccgccgtaccggggcagccgccgccactcgccgtccaggagatccccgtcgccgccattcaagcggtcgcggagggacgacgggtacgaccgccgcgggggccgcgggagcccgccgcgttacgggtacgatgataggaggcgaggttatgaccatgagcgaggtggcggcagaggtgggtatgaagatgacaggaaccagggcagatatctgaaccgtgctccagattggcctgattcggggtacggagcggccaatgatggtccaggggtcacccaaagggaaggtttgatgacatacaaacagttcatgcaagttcttgaggatgatatttcaccaagtgaagctgaacgcaggtaccaagagtatagaactgagtatatcactactcagaaacgtgcttattttgatctccacaagaatgaagattggttaaaagacaagtaccacccaactaacttgttgtctgttatcgaaaggaggaatgaacgttgcaaggttatagcaaaggatttctttcttgatttgcagaatggaactctggacctaggccctggaataactgccggtgcagcaagtaaactaggtggtagtgatggaaattctgaggatgacatggacaatgacaagagaagaaagcatggcaaagattcctcaaaagcaactgattctctttctggtgcccccaaggctcatccagttagttctgaatcacgtcgagtccaagctgacatagagcaaactctagctctcgtgcgtaagcttgatgctgagaagggcattgatggcaatgtactgtcaagtggtgatcatgacaagtcagatgtagacaaatcacacataggatctatggggcctatagttataatcagaggtttaacgactgtcaaaggcctggaaggcgttgagctcctagacactattcttacctatttgtggcgtattcatggtgttgattactatggcacatcagagtcgcatgaggccaagggccttcgtcacgtgagagtagacagtaagacttctagcacatctgatgtcagttctgctgattgggagaagaagctggatactttctggcaggaaagactgaatggtcaggaccagctggtcatacttactgccaaggacaaaattgatgcagcagctgctgaagttttagaacctcttgtcaggaaaatcagggatgaaaagtatggatggaaatatggctgtggagccaagggctgtacaaagctttttcatgctcctgagtttgttcacaagcatttgaagctcaagcatccagaccttgtattagagtcaacgtcaaaagttcgagaggatctttattttcaaaattacatgaatgatcctaacgcaccaggtggaaccccagtgatgcaacagtctgcaccagacagaggaagacggagacctagcatggacagtcgtctgaaatttgaccgtggcagtaacagagaccatgataaagctgatagagatggagtcaggtatggtagaggtgaccactctccaagccgtgatgggcctgatgatcagatgtttgatggtttccgcggacggccctcgaatgctccttttgttgctgaattcccagctccaccgatattgatgccagtacctggtgctggtcccttgggcccatttgttcctgcacctccagagatagcgatgcatatgctgagagagcaagggccacctcctccttttgaaccaaatggcgcaccacatggcaatgctggaatgcttgggccaatgatgggtggcccagcaccgattatagctatgcctccaaatttccgccatgatcctcgccgcctgagaagttataacgacctcgatgctcctgatgaggaagtcactgtccttgactacagaagcttgtagggtccagcacctccagatacccgtagtcaagtttcccgttcccccattggtgaattgggcttttttctctttatgaaggcaaaagatggaaggttatgttcaattaaaccaatttttgggtcacctgtagtctgttagattctgttgtaacttgaatactctgtggatgcactgcggttgctacagttcttgtccaacttttttttgacacagtgctgtaataaataggcgtctgtttggaacctgggtggggtggttgtagtgagagatacgtacttcgccaccttgttgcagtctgcaatgccccttgaacatttgctgcaatccgtgacttcgtcagaagtcagaacgaagacttggtactgggtgttgaacggtttacaaacaataaggtcaaaattcttatcaactcgcaatatctggactcaggtattggcagtgtagcgaaagtgtgtagtacccatgaacgtgcatgatttgtttgttgtaaaaaatgtagaaagaaaaagcatgtgacaacaacaacagtcttccaattaa

SEQ ID NO: 130757 - DNA, 1636 bp, Zea Mays
actacgtcgtcttcgtctctccaacccggggacattttccaccctccaaatcgaaaccagattgaaatcctaggggctagggttaccctccatcccatcgtccgatccgatccgatcccgccgctcatccatgtcccaccacgacggaagcaagccataccagccgcgccgggggcccgagcggcacccgcagccagcggatgggatcgccgccccgcctcccgccgccgttgccccgtcggtggagcacctcgtggcggccgccgccgaggcggaggcattgaaccgcttcgccgcggaacaacagcagcagctgcaggggcacgagcaggaggttggggaggaagaggaggaggaggacgagcaggaagacgagatggaggaggaggacgaggatgagcacgaaggtcagcacggcggcatcggtggggagcacgttcccatggacgcggatgctgctgccgcggcggcggcggccgcagtctcgcagatggacccgcactcggcgttggtggctgggaccgtgccacccatggcgaccaaccagctcaccctctcgttccagggcgaggtctatgtgttcgactccgtctcccctgataaggtccaagccgtgcttttgctgcttggagggagggagctgagcagcctgggcggagcgtcgtcctctgcaccttatagtaagaggttgaattatccacatcgggtggcatctctgatgagatttagggaaaagcggaaggagcggaactttgataagaagatccgatactctgtccggaaggaagttgcacttaggatgcagcgtaatcgaggtcaatttacatcttcaaaaccaaagcctgatgaaatagcagcatcagaaatggcatccgcagatggctccccgaattgggcattagttgaaggccgacctccatctgctgccgaatgtcatcactgtggtactaatgcaacagctacaccaatgatgcgtcgcggacctgatggaccaagaacattatgcaatgcatgtggcctcatgtgggcaaataagggtctcctgagggacgtaacaaaatctcctgtacctctccaagctacgcaatcagctccgcatctagatggtggtaatggaagcgccatgtctgcgcctggctctgagctagagaatgctgcagcagccatgaccaatggccacgagtcatcgagtagtggtgtttaatccagcgatggggtaaaagccacgaggagcatcatcccggagtgatctctgcagtaggcggtcagctgctgtactataattgagttggaggctgcttagatatggaatccttccatttaccttggtgccctgtagttaagagctatgacagtgctttatcccgtgtcatgtttgcagccgctgcgtctataacgaagctatttcttgtcttgaggcgtgactgttaagaaccgttgaagtccactcagttttaaccgtgcagcaacgtcttcgatcaatatctcagagtacttagggagcgcttgccacacggagcagctaaaccaccgaaacgtttccattttcaactagaatcggactgtgccattttgaaatgcgtcaccgaaatgtaatcgatgtatatcgaattggcagaaggttggttccgtatat

SEQ ID NO: 130758 - DNA, 1452 bp, Zea Mays
actacgtcgtcttcgtctctccaacccggggacattttccaccctccaaatcgaaaccagattgaaatcctaggggctagggttaccctccatcccatcgtccgatccgatccgatcccgccgctcatccatgtcccaccacgacggaagcaagccataccagccgcgccgggggcccgagcggcacccgcagccagcggatgggatcgccgccccgcctcccgccgccgttgccccgtcggtggagagcacgttcccatggacgcggatgctgctgccgcggcggcggcggccgcagtctcgcagatggacccgcactcggcgttggtggctgggaccgtgccacccatggcgaccaaccagctcaccctctcgttccagggcgaggtctatgtgttcgactccgtctcccctgataaggtccaagccgtgcttttgctgcttggagggagggagctgagcagcctgggcggagcgtcgtcctctgcaccttatagtaagaggttgaattatccacatcgggtggcatctctgatgagatttagggaaaagcggaaggagcggaactttgataagaagatccgatactctgtccggaaggaagttgcacttaggatgcagcgtaatcgaggtcaatttacatcttcaaaaccaaagcctgatgaaatagcagcatcagaaatggcatccgcagatggctccccgaattgggcattagttgaaggccgacctccatctgctgccgaatgtcatcactgtggtactaatgcaacagctacaccaatgatgcgtcgcggacctgatggaccaagaacattatgcaatgcatgtggcctcatgtgggcaaataagggtctcctgagggacgtaacaaaatctcctgtacctctccaagctacgcaatcagctccgcatctagatggtggtaatggaagcgccatgtctgcgcctggctctgagctagagaatgctgcagcagccatgaccaatggccacgagtcatcgagtagtggtgtttaatccagcgatggggtaaaagccacgaggagcatcatcccggagtgatctctgcagtaggcggtcagctgctgtactataattgagttggaggctgcttagatatggaatccttccatttaccttggtgccctgtagttaagagctatgacagtgctttatcccgtgtcatgtttgcagccgctgcgtctataacgaagctatttcttgtcttgaggcgtgactgttaagaaccgttgaagtccactcagttttaaccgtgcagcaacgtcttcgatcaatatctcagagtacttagggagcgcttgccacacggagcagctaaaccaccgaaacgtttccattttcaactagaatcggactgtgccattttgaaatgcgtcaccgaaatgtaatcgatgtatatcgaattggcagaaggttggttccgtatat

SEQ ID NO: 130759 - DNA, 234 bp, Zea Mays
atggcgctctcctgttgcttgctcgccggcgcccgggcggcagcctccccttccttctcatcctccgctgccgtccgccggcgggaccaccgtctgctgaggttccgctttcgctctctcagcgatgtcgccacggcctccgcgtgtgctgcgcctcctccacctcttcggctcttcctcatctccgccgccgacaactcccgaggagcccgacgactacgagctaatgcttga

SEQ ID NO: 130760 - DNA, 729 bp, Zea Mays
ttgctatatataggccttctcgtctcgtcatccacccgctcgcccattcccctatccacgagcaaggcacagcagcaggggagtcggagtgacagccgcccgcaggatgccgacactaaacctgagcaccaacgtgccggtggacgcggtggtcgccgccgacatcctcagggactgctccaaggccgtcgccaggatcatcggcaagcccgaatcctatgtcatggtgtcggtcaacgggtcggtgcccatgtcgttcgcggccagcgaagagccggcggcgtacggcgagctcgtgtccatcggcggcatcggccccggcgtcaacggcaagctgagcgccgccgtcgccgaggtactcgaggccaagctctccgtcagcaggtccagattctacatcaagttcgatgacgtgcggggacacaacttcggcttcaacggatccacattctaagtcgactccagcagaaaccgaagatgatggtcgctgcgtccaaacatccagctcaatacataccaacaccactacatcaataaacgctgatcatgtgtcatccatcacccgcacgtccatggaaaatcccgctcgagcacgagacgcaccaccactagtttatgggctttgtactttcacctgaaagcatgcagtgcatgatggcatgtatctgattccaaattttattgaacttcattttttcagtaatgcaattctacagccctaaagaaaat

SEQ ID NO: 130761 - DNA, 348 bp, Zea Mays
atgcggcatcagacgggcagaaacgggcgtaacgacggtgacgaggcggtccgagctacggagacaacgtggaggccgagggggagggcggaggaccgtagacacgacgctggtaaggaggtagaaggggagggcggcgaagatgacgctcggagggaaggcgaagaggacagtagatacgacattgttatagccaacgagagacataaggcaaagaaaactaggagaacgacatttcgagaagaatcaagaggtcacaaggcagagagagcaaggaggaggacgtctgcgagagaatgtagaagtgcaacacgcgagtcccgcgggtgtgaagaaatgaaccgatga

SEQ ID NO: 130762 - DNA, 1069 bp, Zea Mays
gtcctctgcctccgcctgccttgccgccgcccaagtctcgtccgtcgtcgtcgctccgctgccagtcagccgcatctccagcctccagcaggcagagcacccccgctctcgtctccggagccttccggatgggctgcatcttctcgtcgccgggctcggcgcgtgcgctgcggccgtgcgccggggtgcgggtgatccacaccaacgggttcgtggaggacttcgagggccccggcgtggtgaccgtggcgcacgtgacgcgctgcctcggcgggcccggcggccccgcctccgccgccaacgccgccgggaaggggtacgtgctgtgctcgtcggcgcacctgctgcagccggggcgcgggccgttccggcccgacgacgcgctgcagccgggaaccgtctacttcctgctcccgcagtcggtgttccaggccgagtcctccgccgtggacctcgcgtgcctcatgaaccgcctcacggcgctcgcccgcaagggcggcgccagcgccgcgcccaagcccagcccgctcgacgcgctcttcgacgccgccgccgccgctgccgccgcctccgggagccaccgccagcacaaccagcagcggatgccagtggctgcggcggcgagggagaagaagggtcagccctggcgggcggcgccgtggaagccctgcctcgagcgcatcgacgagtccgtcggccgcgcctccatgcgcagcgcgtccagcggctgcagcagcgaggcctgatcattggctccatctagtccccttttcccttcttgtcttctgcagtagtgcatacagatggatggttttgcagaactgtgtgtaaagatctgttgctttgccggtagtgattaattagattcattcagcgacgtgttttcagatccctcccatctgcagctctgctcggctgccgcttaatcaatctcttcctgtacaagctcagctcagctcagctcagcaagtgtgccaacttgtccgactggttttgatttgtcgtcggatcgagactcgtggagcacgagcacgcagcgaagtcgtcagagactcgcgtctggtttcgc

SEQ ID NO: 130763 - DNA, 1976 bp, Zea Mays
gtcaagcagaagcagaagcgctgaagcagcgcgtttgcagactgcaaagacccctgtgaatttgtgatgtactgaggtgttgtccagccaacagtccttgctcccaagattcttccgtactcccccctccatcggaccatcctctaccatagatctcccgaactccgccgtaatcgggacgaatcccgcgcgtgctcttgctccctgtcgttctccgcggccggcgcgagctgccggtggttcgttgccgtcgacctcgtctggccgctcctctgccctgccagctgccggattcctgctgctggactggattgctgcgcgtggagtcgtgagtatagctccatctatcctgactgatacggatcgacctctcctctcgtgggtttttgggttttcatcagttctatcagaggagtgcttatggatgattgcatggctgtagctagctaggccctgctttcctgtttgtaaagatacatcatggcaccacgcagtagggctccatctagaaggcctctctggttcattgtcttggttgcctttgtctgtgtagtagccattggagcctatctttatactccacagcattacacagcctgttatctggtaccatcagaagcctgcaattctcggcctcctccagaacctgctagggtatacactgatgatgagattgctgctcgtgttatcatgagagacatcattcgggctcggccagtgcagtcaaagaacacaaaaattgctttcatgttcttaacacccagtttattgccatttgagaagctatgggaaaaattcttcatgggtcatgaagacagatacaccatatacgtgcatgcatcaagagatataccgagtcattcaagtccaatattcgctggcagggatattcgaagcgaaaaggtgatatggggcacgatttctatgcttgatgctgaaaagaggctcttggcccatgccctacaagatcctgaaaaccagcattttgtcttgctttctgagagttgtgtgccacttcataacttcgattatatatatagttatctcatggagacaaacgtcagttttgttgactgctttgatgatcctggtccacatggagcaggtagatattctgagcatatgctacctgaaattgtgaagaaagattggagaaagggtgcgcagtggtttacagtgaaacggcagcatgcgattcttattctcgcggacaccctttactatgggaagttcaagcgttactgtaagccaggaaacgaatggcataactgctattcagacgagcactacttgccaaccctctttaacatggttgatccgactggaatctcgaactggtcggtgacgcatgtcgactggtccgaagggaagtggcatcccaaagtctacagggctgcggacacaagcttcgatctgctcaaggacatcgcgtccatcgacgagagcgtccacgttagcagcaacgcgaagcatgtcgcgcagaggaggccgtgcgtgtggaacggcatgaagcggccctgctacctgttcgcgcgcaagttctacccagaggcgctggacaacctgctgaacatattctcgaacttcaccatcatctgagcgagcggtggatcggggaggggtttccgtcctccctcttgagtgctgcggcatcagcggccgcccgccgtggtaactggtgaggccgtccggccgtctacttggtgacgggaatctagtagctgaaggaagcaggaacacggttaccggagcacgcagatctgggagatcgggattcagatgttgccacctgcttgctcatcctgccgcactcgtgtgatctcgctctagtagatcgctggtgtttttgcaggtgtagacattggctaggctggtgttggatgcacttctgttggtgttgatgaagaactgtgattaatttaataataatacgtacgtactaagttgtactcctccgtcccaaaatataactagtt

SEQ ID NO: 130764 - DNA, 2080 bp, Zea Mays
gtcaagcagaagcagaagcgctgaagcagcgcgtttgcagactgcaaagacccctgtgaatttgtgatgtactgaggtgttgtccagccaacagtccttgctcccaagattcttccgtactcccccctccatcggaccatcctctaccatagatctcccgaactccgccgtaatcgggacgaatcccgcgcgtgctcttgctccctgtcgttctccgcggccggcgcgagctgccggtggttcgttgccgtcgacctcgtctggccgctcctctgccctgccagctgccggattcctgctgctggactggattgctgcgcgtggagtcgtgagtatagctccatctatcctgactgatacggatcgacctctcctctcgtgggtttttgggttttcatcagttctatcagaggagtgcttatggatgattgcatggctgtagctagctaggccctgctttcctgtttgtaaagatacatcatggcaccacgcagtagggctccatctagaaggcctctctggttcattgtcttggttgcctttgtctgtgtagtagccattggagcctatctttatactccacagcattacacagcctgttatctggtaccatcagaagcctgcaattctcggcctcctccagaacctgctagggtatacactgatgatgagattgctgctcgtgttatcatgagagacatcattcgggctcggccagtgcagtcaaagaacacaaaaattgctttcatgttcttaacacccagtttattgccatttgagaagctatgggaaaaattcttcatgggtcatgaagacagatacaccatatacgtgcatgcatcaagagatataccgagtcattcaagtccaatattcgctggcagggatattcgaagcgaaaaggtgatatggggcacgatttctatgcttgatgctgaaaagaggctcttggcccatgccctacaagatcctgaaaaccagcattttgtcttgctttctgagagttgtgtgccacttcataacttcgattatatatatagttatctcatggagacaaacgtcagttttgttgactgctttgatgatcctggtccacatggagcaggtagatattctgagcatatgctacctgaaattgtgaagaaagattggagaaagggtgcgcagtggtttacagtgaaacggcagcatgcgattcttattctcgcggacaccctttactatgggaagttcaagcgttactgtaagccaggaaacgaatggcataactgctattcagacgagcactacttgccaaccctctttaacgtaagtgttcagaagcttgccccccttttgttctcttcgatcagccaacaacattttttaccgagataaaaaaaactaaactgcatctgcatctgtggccgaagatggttgatccgactggaatctcgaactggtcggtgacgcatgtcgactggtccgaagggaagtggcatcccaaagtctacagggctgcggacacaagcttcgatctgctcaaggacatcgcgtccatcgacgagagcgtccacgttagcagcaacgcgaagcatgtcgcgcagaggaggccgtgcgtgtggaacggcatgaagcggccctgctacctgttcgcgcgcaagttctacccagaggcgctggacaacctgctgaacatattctcgaacttcaccatcatctgagcgagcggtggatcggggaggggtttccgtcctccctcttgagtgctgcggcatcagcggccgcccgccgtggtaactggtgaggccgtccggccgtctacttggtgacgggaatctagtagctgaaggaagcaggaacacggttaccggagcacgcagatctgggagatcgggattcagatgttgccacctgcttgctcatcctgccgcactcgtgtgatctcgctctagtagatcgctggtgtttttgcaggtgtagacattggctaggctggtgttggatgcacttctgttggtgttgatgaagaactgtgattaatttaataataatacgtacgtactaagttgtactcctccgtcccaaaatataactagtt

SEQ ID NO: 130765 - DNA, 4031 bp, Zea Mays
cgcttccgcagacggccaggccaacgcaaccgctcctgccatccgcaccagtccccccctcccctccctcccggactcacccggccgccagcggggtaagtcgccggcgggctttctttgcatgtttatttatgtaacccggcccggccgaaacaaaacccccggccgcgcgcacgccaagattgctgcccccacccccctggcctccgctcaaaccaccgctcgacttctcctcgtgtaggtttggccgcttcctcctcctctgcggcgggagcgggacaacagacacaggggcacagaggaaccggcgcggggcggcgcaatgggggacgctgcggcggcggggaccctgcacaagagctacttcgacgtgctggggatctgctgcccctccgaggtgcccctcgtcgagaagctgctgcggccgctgcccggcgtgcgcaccgtcaccgtcatcgtcccgtcccgcaccgtcatcgtgctccacgacgccgccgccacctcgcccgcgcaaatcgtgaaggcgttgaaccaggcgaggctagaggcgtccgtgcgggcgtacggcggtgggtcggacgggaggcaggcagccggcagcaagagatggccgagcccgtacgtcctcctctgcgggctcctcctcgtcgtctcgctcttcgagcgcctctggcctcccctcaagtggtgcgcgctggcggcggcggccgccggcctgccgccgatcgccctcaggagcttcgcggccgcgcggaggctcaccctcgacgtcaacatactcatgctcatcgcagtttccggggcgatagctctcaaggactactccgaggctgggttcatcgtgttcctgttcactacggccgaatggctggagaccagggcgagccacaaggcgactgctgggatgtcgtcgctgatgagcatggcgccacagaaggctgtcgtagcagagacgggggaggtggtggcggctcaggacgtcaaggtgggcacggtgctagccgtcaaagccggggaggtcgtgcccatcgacggcgtggtcgtggacgggcggagcgaggtcgacgagagcaccctcaccggggagtccttcccggtcgccaagcagccggagtcccaggtctgggccggcacgctcaacatcgatggctacatcgctgtcaggacaactgccatggcggacaactctgccgtcgctaagatggcgaggatggttgaggaagcacagaacagtaggtcccgaactcagaggctgattgatacgtgcgccaagtactatacgcccgctgttgtggtcatggctgcgggggtggcggtggttcctgtggtggtgagagcgcacaacctcaagcactggttccaactggccctggtcctgctggtgagcgcgtgcccgtgcgcactagtgctgtcgacgccggtggccaccttctgcgctctcctgacggccgcgaggacggggctcctcatcaaaggaggggacgtcctcgaaaccctggccaggatcaagattgccgcctttgataagacaggtacgatcactcgaggggagttcagcgtcgaggagttccaggcggttggcgagcgcgtcactacgccacagctcctttactgggtctcgagcattgagagcagatcgagccacccaatggcgtctgtgctggttgattatgcccagtcgaagtcagttggacccaaatctgataatgtcgccgagttccaaatcttccccggtgaggggatttacggtgagatcgatggggaaggtgtgtatattgggaacaagaggattttgtcaagggcctcatgtgaaacagttcctgacatgaaagatatgaaaggagttaccgtcggatacgttgcctgcaaagggcagttaatcggagtattcactctctcggattcctgccgaactggatcagatgaggccatcagggagctgaggtcgctgggcatcaagtcagtgatgcttactggggatagttctgcagcagcttcatatgcacagaaccagcttgggaacatacttgatgaggttcactctgagcttcttccagaggacaaggtgaggatcgtcgacgagctcaaggcaaagcatggcccgactctgatgatcggcgacggcatgaacgatgccccagcgctggccaaggccgacgtcggagtctcgatgggggtatctgggtcagcggttgcgatggagacgagccacataaccctgatgtcaaacgacatccgccggatcccgatggccgtccagctggcgcggaggacgcaccggacgatcgtcgtcaacatcgtcttctcggtgatcaccaagcttgcgatcgtcgggctcgcgctcgccgggcatccgctcatctgggcagccgtcctcgcggacgtcggcacatgcatgctggtgatcatgtacagcatgctgctgctgagatcggaatcgaacggcggccggaaggtgaagaagtgctgtgcctcgtcgcagcatgggtcacactcacacgccaggaagaagcattgtgtctcccaccactgttcagatggcccgtgcaacaagtcgacggcaggctgttccaaggaatcgccgtctgctggtaagcatgcttgcagtgatcatggccatgcccacacccactgcaaagagccgagcaaccaccggccggaaaggcatgcctgtcatgatcacggccacagccataaccactgcaaagagcccagcagccatgtggttacagaaaagcatgtctgccatgaccacggcaacacccatagccactgcgaagaggcaggcaaccagctgctgcttgtagagagccacggttgcaatgaccatggccatgggcatagccatgaccgctgcaaagagctcagcagcccgcgcttcaccagcaagcacgagtgccatgaccatgagcatagccactgcaaagagcccaagactccgtgtgctgacagtgaggctgcttgccatggccatggccatggacacgaacatcggcactgcgaaggggacagccactcacacgctacaggtgagcatggctgccatgaacatgatgcgcacagccactgcgaggagcacggccattcagacaccgctgttgagcatgcttgcgagcatgagtgccatggtgagcaccaaactgtgcacgctgtggaaacacaccactgccatgaccacgaccatgagcacggacagcatgagcttggggagatcgaggaacctgagaaggactgccacgaccacagccaccactgctgccatgagcctcacggcaaggacaaggtcgcggccgagccagttgaagaggtcacgatctcaatcgctgccctgcccaaagacgaaggccaccaccacagcgaggaacaacacaatggggagcactgcaggaaggcgaaagactgcggcggcggcggcggcgctgctcccaccgactgcgctgcgagcaagaactgctgcggcgtcaaaggtggagacgcctgctcgagcgtgcaggccgcgcgtgctagggagaccggcccgtgctgccggagctacgtgaagtgccccaggacggcggcggcgagcaggagcagctgctgcggccacagcatgctgaagctgcccgagatcgtggtagagtagtagtagtactgtagtagggtggaaattccaccgtgggagaagggtgtgcacatatgaacaagcaactgtgaggtgagtgtgactcgccggcgtaaatgtagactaagatcgccggtgcagggtgtttgatctagtagtctagttactatataggtttgctggagaaaaaaatgatgtaggattttgactgagcagagcagggggtctgaaaggtggaaggaagggctctgcttggttttcctgcacactgctcctctgtttgcgtcttctgtggcggcggcggcaatggagactgtcacagacgaaggatgtcatgtgactagtgccggccggggccaacactaatattcaggaactatccatatccatttcggtcccttttaaaatgggagtttctttttctatctcc

SEQ ID NO: 130766 - DNA, 4323 bp, Zea Mays
cgcttccgcagacggccaggccaacgcaaccgctcctgccatccgcaccagtccccccctcccctccctcccggactcacccggccgccagcggggtaagtcgccggcgggctttctttgcatgtttatttatgtaacccggcccggccgaaacaaaacccccggccgcgcgcacgccaagattgctgcccccacccccctggcctccgctcaaaccaccgctcgacttctcctcgtgtaggtttggccgcttcctcctcctctgcggcgggagcgggacaacagacacaggggcacagaggaaccggcgcggggcggcgcaatgggggacgctgcggcggcggggaccctgcacaagagctacttcgacgtgctggggatctgctgcccctccgaggtgcccctcgtcgagaagctgctgcggccgctgcccggcgtgcgcaccgtcaccgtcatcgtcccgtcccgcaccgtcatcgtgctccacgacgccgccgccacctcgcccgcgcaaatcgtgaaggcgttgaaccaggcgaggctagaggcgtccgtgcgggcgtacggcggtgggtcggacgggaggcaggcagccggcagcaagagatggccgagcccgtacgtcctcctctgcgggctcctcctcgtcgtctcgctcttcgagcgcctctggcctcccctcaagtggtgcgcgctggcggcggcggccgccggcctgccgccgatcgccctcaggagcttcgcggccgcgcggaggctcaccctcgacgtcaacatactcatgctcatcgcagtttccggggcgatagctctcaaggactactccgaggctgggttcatcgtgttcctgttcactacggccgaatggctggagaccagggcgagccacaaggtaggtagacacctgcttccgtctcttttttcagcagttttgttcttgcattgcatttgcatacacaacaagtaatgatagtggtgagacctcttagttctaaatgactgtttggcacgcacgtcacgtacgtatgtaggcgactgctgggatgtcgtcgctgatgagcatggcgccacagaaggctgtcgtagcagagacgggggaggtggtggcggctcaggacgtcaaggtgggcacggtgctagccgtcaaagccggggaggtcgtgcccatcgacggcgtggtcgtggacgggcggagcgaggtcgacgagagcaccctcaccggggagtccttcccggtcgccaagcagccggagtcccaggtctgggccggcacgctcaacatcgatggctacatcgctgtcaggacaactgccatggcggacaactctgccgtcgctaagatggcgaggatggttgaggaagcacagaacagtaggtcccgaactcagaggctgattgatacgtgcgccaagtactatacgcccggtaagaagccaaatatacgagacggttcctacgatcagtgcagatagttttacttttctagatgtttattaccaacgcaaatagttagttacacaagacggcggctccttttccttactgttcgtcgtcatcttgttggatcttgtacgtaccttcagctgttgtggtcatggctgcgggggtggcggtggttcctgtggtggtgagagcgcacaacctcaagcactggttccaactggccctggtcctgctggtgagcgcgtgcccgtgcgcactagtgctgtcgacgccggtggccaccttctgcgctctcctgacggccgcgaggacggggctcctcatcaaaggaggggacgtcctcgaaaccctggccaggatcaagattgccgcctttgataagacaggtacgatcactcgaggggagttcagcgtcgaggagttccaggcggttggcgagcgcgtcactacgccacagctcctttactgggtctcgagcattgagagcagatcgagccacccaatggcgtctgtgctggttgattatgcccagtcgaagtcagttggacccaaatctgataatgtcgccgagttccaaatcttccccggtgaggggatttacggtgagatcgatggggaaggtgtgtatattgggaacaagaggattttgtcaagggcctcatgtgaaacagttcctgacatgaaagatatgaaaggagttaccgtcggatacgttgcctgcaaagggcagttaatcggagtattcactctctcggattcctgccgaactggatcagatgaggccatcagggagctgaggtcgctgggcatcaagtcagtgatgcttactggggatagttctgcagcagcttcatatgcacagaaccagcttgggaacatacttgatgaggttcactctgagcttcttccagaggacaaggtgaggatcgtcgacgagctcaaggcaaagcatggcccgactctgatgatcggcgacggcatgaacgatgccccagcgctggccaaggccgacgtcggagtctcgatgggggtatctgggtcagcggttgcgatggagacgagccacataaccctgatgtcaaacgacatccgccggatcccgatggccgtccagctggcgcggaggacgcaccggacgatcgtcgtcaacatcgtcttctcggtgatcaccaagcttgcgatcgtcgggctcgcgctcgccgggcatccgctcatctgggcagccgtcctcgcggacgtcggcacatgcatgctggtgatcatgtacagcatgctgctgctgagatcggaatcgaacggcggccggaaggtgaagaagtgctgtgcctcgtcgcagcatgggtcacactcacacgccaggaagaagcattgtgtctcccaccactgttcagatggcccgtgcaacaagtcgacggcaggctgttccaaggaatcgccgtctgctggtaagcatgcttgcagtgatcatggccatgcccacacccactgcaaagagccgagcaaccaccggccggaaaggcatgcctgtcatgatcacggccacagccataaccactgcaaagagcccagcagccatgtggttacagaaaagcatgtctgccatgaccacggcaacacccatagccactgcgaagaggcaggcaaccagctgctgcttgtagagagccacggttgcaatgaccatggccatgggcatagccatgaccgctgcaaagagctcagcagcccgcgcttcaccagcaagcacgagtgccatgaccatgagcatagccactgcaaagagcccaagactccgtgtgctgacagtgaggctgcttgccatggccatggccatggacacgaacatcggcactgcgaaggggacagccactcacacgctacaggtgagcatggctgccatgaacatgatgcgcacagccactgcgaggagcacggccattcagacaccgctgttgagcatgcttgcgagcatgagtgccatggtgagcaccaaactgtgcacgctgtggaaacacaccactgccatgaccacgaccatgagcacggacagcatgagcttggggagatcgaggaacctgagaaggactgccacgaccacagccaccactgctgccatgagcctcacggcaaggacaaggtcgcggccgagccagttgaagaggtcacgatctcaatcgctgccctgcccaaagacgaaggccaccaccacagcgaggaacaacacaatggggagcactgcaggaaggcgaaagactgcggcggcggcggcggcgctgctcccaccgactgcgctgcgagcaagaactgctgcggcgtcaaaggtggagacgcctgctcgagcgtgcaggccgcgcgtgctagggagaccggcccgtgctgccggagctacgtgaagtgccccaggacggcggcggcgagcaggagcagctgctgcggccacagcatgctgaagctgcccgagatcgtggtagagtagtagtagtactgtagtagggtggaaattccaccgtgggagaagggtgtgcacatatgaacaagcaactgtgaggtgagtgtgactcgccggcgtaaatgtagactaagatcgccggtgcagggtgtttgatctagtagtctagttactatataggtttgctggagaaaaaaatgatgtaggattttgactgagcagagcagggggtctgaaaggtggaaggaagggctctgcttggttttcctgcacactgctcctctgtttgcgtcttctgtggcggcggcggcaatggagactgtcacagacgaaggatgtcatgtgactagtgccggccggggccaacactaatattcaggaactatccatatccatttcggtcccttttaaaatgggagtttctttttcta

SEQ ID NO: 130767 - DNA, 510 bp, Zea Mays
atggcgacggagcttcccaggcccggagcctccaccgcgcgtctaccctacgcgcgacgcataccagcgaggccaccagcgccaccagagactatcgacgccatttccaggacggaacgaagctccctggatggtcatgggtgccctgtcatcggtacttgcacagagtcgctggcgacaacgatccgccatggatcccgcacgacaacgaggtgtccccatccccgatcttggctaaagtgcctaacgaagtcgcgaggaggatgggaggtcatgggtgctcggcttataacccagaggcgtgggcacaaagccaagccggaatccgcggacggcgttgagaggatttcggagcgttctgttggggatttggtggaagaggtggagctgacatgcatggcccaccggtcagtgaccaagcgcacacgagtaactgccaagggggtcagctgggcagagacacgacttcggttgagagcgcgcgggcgagtgagatgctggcgtggctga

SEQ ID NO: 130768 - DNA, 2171 bp, Zea Mays
acatggaatgagaggcaaacacgggcccaggaacggcccacgggagagagaaaccctacccttcccttcgcggtggtggcatccgagacccgtccacaaccaccacagacacggtgcaacccccccccccccccccccccccccccctcttaaaagccgcctctcgccgccgcccgcaaaccctcatttttctctctcctgcgccgcgacgtccctcgccttcgccgccgaatccgagactccgatctcgggttcaccgcagcgcacagagcagccccgactcccggcccgatccgcgctctcctctccgtcgcttcagtcatggcaggaatggcacctgagggttctcagttcgatgctaagcactatgattctaagatgcaggagctgctgagcaccggtgagactgaggagttcttcacttcatatgatgaagtttttgagagttttgatgatatgggcctccaagagaatcttctgagaggcatttatgcttatggttttgagaagccatctgcaattcagcagagaggaattgttcccttctgcaagggtcttgatgtcattcagcaagcacaatctggtacaggaaagacagcaaccttctgttctgggatcttgcagcagctggactatggcctggttgaatgccaggccctggtccttgctcccacccgtgagcttgcacagcaaatcgagaaagtcatgcgcgcgcttggtgattaccttggtgttaaggtccatgcatgtgtgggaggaacatccgtccgtgaggaccaaaggattcttggcagtggtgtgcatgttgttgttggtacacctggtcgtgtgtttgatatgctgcgcagacagtccctccgccctgataacatcaagatgtttgttctagatgaagctgatgaaatgctttctcgtggtttcaaggatcagatttacgacatcttccagcttctcccagccaagattcaggttggagtcttctctgctaccatgccccctgaggcccttgagattacccgcaagttcatgaacaagccagtgagaatcctcgtgaagagagatgagctgactcttgagggtatcaagcagttctatgtgaatgtggataaggaagactggaagctggacacactgtgtgacctgtacgagacccttgccatcacccagagtgtcatctttgtcaacacccgccgcaaggtggactggctcactgacaagatgaggagcagggaccacactgtttctgccactcatggtgacatggaccagaacactagagacatcatcatgagggagttccggtctggctcctcccgtgtgctcatcaccaccgacctgcttgctcgtggtattgatgttcagcaggtgtccctggtcatcaactatgatctccccacccagccagagaattacctgcatcgcattggtcgtagtggtcgtttcggtaggaagggtgttgccatcaactttgtgacccgcgacgacgagcggatgctgttcgacatccagaagttctacaacgtgttgattgaggagctgcctgccaacgtcgctgaccttctgtgatcattttgaagaaaaacagaactaaaagaacggtggtgggggtgatctggtaaggcttggttttgccgaaatattgtgggggaggagtgataaggtcggtggggtttctatgttaaagtcgtggtctcgggcaatatgcgatttttctttatgccatgttttgggaaattttgtagctgcctaggcctcgtgctgttgtggtggttcattagtatgaagacgaaggctctgctggctatgggagtcctttttctttttgttagtattttgtttaaaactatgtatgaccgaattatttgtcatccttgactcaattctgctgcaaccagttgtatcgtgccatgtgtctgcagcaccggtcgttgctgttctgagtaaaatctgtttactctgctttcacctgttgatgtataatgtttgtttaagtggcaccttttggtgttttagcgcaaaggctggtcttcgccttcaagctgtttctagttaacctcatataactttttccacaggagccgggtttttttccccattttgagaagcaagatgaataactcaaccgcctatttcagcgaatggatcattatttgacatcaatcaaataaaac

SEQ ID NO: 130769 - DNA, 2269 bp, Zea Mays
tcccccgcggaaggacgacgacgcaactggcagtcaccgacgcgacgcgggtcgtctcctcagccctcctgttcagcctcctcgccagcgatggcttcgggcgccgacgccgcggcgctggtgacctccggcgccgacgagtgggcagcggcgtgtccgccgctgcggcggaacctgcagctgctcgcgcctgacgaggttgagctagcaaaaatgctgttgaatgagggccagattcacctatttgaacactggcctgaaccaggcattgatgacgacaagaaaagaggcttctttgatcaggttcgccggcttaattcaagctatcctggaggtctggtatcttacatcaagaatgccaaaaaacttcttgcagattcaaaggcaggaaaaaacccatatgatggtttcaccccttctgtgccttcaggggaaattttgaacttcggcgatgacaattttgtttcactggaagcagctgggataaaagaagcccacaatgctgcatttgttcttgtagctggagggcttggtgaaaggcttggttacaaaggaattaaggtagcacttccccgggaaacaacaactggaaaatgtttcattcaacattatatagagtctatcctggttttacaagaggccagctgcaaaacggttgatgatgggtgccaaaaaaagattccatttgtcattatgacttctgatgatacaaatgcactaactatcaagcttttggagtcaaactcttactttggaatggaaccatctcaagtgaaattgctaaagcaggaaaaagtagcttgtctagctgacaatgatgcaaggcttgcattagacccaagtgacaagtacaaaattcagacaaagccacatgggcatggagatgttcattctcttctttattcaagtggcttgcttgagcaatggaagagtgaagggcggaagtgggttctctttttccaggatacaaatggattgcttttcaatgcaattccgtctgctttaggtgtcagtgccaccaagggttacaatgtaaattctctcgcagttcctaggaaggctaaggaagcaattggaggaattaccaaacttactcatgttgatggtagaacaatggtcatcaatgtagagtacaatcagcttgatccactccttcgtgcaactggttatcctgatggagatacaaattctgagacaggctattctccataccctggaaatataaaccagttgatactggagcttggaccatacattgaggagctaaagaaaacgcatggtgccatttctgaatttgtaaatcccaagtatactgattcgaccaagacatcatttaaatcatccactcgtctagagtgcatgatgcaagactatccaaagacgttgccaccctcaacaaaagttggattcacggtgatggatacatggcttgcttatgctcctgtgaagaataatcctgaagacgcggctaaagttccaaaaggcaatccttatcatagtgcaacctcaggagagatggcaatttacagggcaaacagccttattttgagaaaggctggtgcgcagatagctgaccctgtcgttgataccttcaacgggcaagaggtagaggtctggccacgcgtaacctggagtccacggtggggtctcaccttccagagcgtcaaggagaaagtgcatggcagctgttcagtttctcagaggtcagctttggtcatcgatggccggagtgtcttcctcgacggactttcattggacggcacccttattgtcaatgctgtggatggtgcagaggttaaagttactggtcatgtagaaaataagggctggactatccggcatgtggactacaaggacacctcggagaaggaagaggtcaggatccgtgggttcaagttcaacaagtctgagcagctagaggtgaactacaccgagccaggaaagcatagcttgagtgcgtgaaaagaaaacattcttgacctgactagcttcgtaccaaaatggaaatagctcacatctgggtcgcctcccagattctgggagggaggccaatgccagcgtagctgaaaccgttcttctccttcccccacgtacaacaaggagcaaagtgcttcaccaagcactcaacattctttatgtatatcttgtacagaactcctcttcagtgcaatcagagttcattgtttgtttgggatctgatgtttatgttacaattttttattttagaaaacttggcactgaatcaagtaataagtgtggtagtgtgtag

SEQ ID NO: 130770 - DNA, 764 bp, Zea Mays
aacccagcagcctcccaaatccccaaagcctccgacccccttcctctctccctccgccgccgctgcgcacgcagggaacaagcgacatgggcgtctacacctttgtgtgccgcaacaacggcggcgagtggaccgccaagcagcactccggcgagatcgaggcttccgccgctaccccatacgagctgcagcgccgcctcgtcgctgccgcctccgcggccgactctgcctacggcgtccagtcgtccttctccatggtcacccccagctccgccgtgttccaggtgatcgtcggtgctgtcggtggtggtgcaatgatggtgagcggaggtggcggcggcggtgctgctgcatctggtggtgctgctgccgaggctcccaaggaggagaagaaggaagaggagaaggaagagagcgacgacgacatgggattctccctgttcgactagagttgtgtgtgtcatctggatctcagaagtggtggtttggtcctgttgccgtagttaattttgctgtcctgtctgtgaacctgaagaactcttggtaattgttacaagcgacctgttccagtttatgtgagaatttgatatgttgtttggaatcatatattctccttgccatttgttgtgattttcggtgccaaaaggttactgtttcctgtaatgataatatgtagctagtacttgttcaagaaattgaacagcaacagtactacttgttcaagaaattgaacagcaacagctcgtcatgcaccttctttctct

SEQ ID NO: 130771 - DNA, 1270 bp, Zea Mays
aacccagcagcctcccaaatccccaaagcctccgacccccttcctctctccctccgccgccgctgcgcacgcagggaacaagcgacatgggcgtctacacctttgtgtgccgcaacaacggcggcgagtggaccgccaagcagcactccggcgagatcgaggcttccgccgctaccccatacgagctgcagcgccgcctcgtcgctgccgcctccgcggccgactctgcctacggcgtccagtcgtccttctccatggtcacccccagctccgccgtgttccaggtctgttcgccgacgcattccttctggatccaccggatctaacgtttatacagtatatagatgtatatgcgaagttgtctgtattcggcagtgaagtatctcgacttgccactgtttcggctgatcgcgtctgtagagcaataggtttgtcaggttgatattatcgttttgagaatctgatgttgtgtagcatagcagcttatagtgttggagctggtgatgctgtatttgtcttgttggcatagaactattgtcttgttggtaattggtatataactatagattgaagtgttctcctttggccattactgttgcctgaagtgttcccttttggccatagtagaattctgtgttgttgctgatctgcataattcaagcccattcctcgtttatgttatataaactgtgttatatgtcagccaccacctatatactttagctacgttactgtgttttagctgttagtttttgttagaaaatatcaaaattaactaggtttcaatgtaaaaaaactgctatgcttgcgctttggctgactgtggtgtgtaagttctatgattaacccacacctgaattgaacgtggtagtgtttatgatgattagatgtctaggctttctatgtttgcgtgaatcgtttctgctggattgtccattgtcatcaccaccttatgttcaatactttaaatcttgcgcaggtgatcgtcggtgctgtcggtggtggtgcaatgatggtgagcggaggtggcggcggcggtgctgctgcatctggtggtgctgctgccgaggctcccaaggaggagaagaaggaagaggagaaggaagagagcgacgacgacatgggattctccctgttcgactagagttgtgtgtgtcatctggatctcagaagtggtggtttggtcctgttgccgtagttaattttgctgtcctgtctgtgaacctgaagaactcttggtaattgttacaagcgacctgttccagtttat

SEQ ID NO: 130772 - DNA, 115 bp, Zea Mays
gtccttttgttttattagcatcttggcaatcaggttcatcacctattggagacaggtagaaaattttagtttaattaggaatctgacacactcaaagaagtttcgtgaaaataag

SEQ ID NO: 130773 - DNA, 1686 bp, Zea Mays
ctagtcacatccgatccgatgcctgtccggctccatgtcttggccagcaccgcgaggcacgccgccagctcgtcagcgctcgtcttccggctcgtcgccttccgcctcaccccgcttctgctccacctgtcctacttcctcgccatcgacctgctcggcttcctcgccctggtgctgctcaggcgaagcagccccgccgcgggggcgtaccgtccgcgctacgtcgacgtgctcttcatgtccacgtccgcggtcacggtcaccgggctggccaccgtcgagatggaggacctgtccgcctcccagctcgtcgtcctcaccctcctcatgctcctgggcagcgaggtgttcgtctccgtgctcggcctcgtcctcgagtcgtcgcgccagcagcgacagcagcgcggtcagtctcgtcgtcaggatcacgccggcagggtaataaggccgtcgtcggtcacggccgccgtccgcgacgagccggacctcgaagaggcgggtaataatattaatagccaggcgcctccgtcgtcgtctgaggactcgtccggcgacggtgacaaccacaaagagagatgccgcgccgtcagaagcctagcgctcgtgctctcggcctacatggccgcggtcctcgtcgccggctccgtgctggtcttcgcgtacgtggccaccgtcccggccgcgcgcgacgtgctggcgaggaagcgcctcggcgccgcgctcttctcggtgtccgccaccgtgtcgtccttcaccaacggcggcctgctcccgacgaacgagagcatggcggtgttcgccgcgaaccggggcctgctgctgttgctcgcggggcagatcctggcaggctgcacgctgctgccggtgttcctcaggctggcggtaggcgccacgagatgggtggcgagagcggtgtccgcggggcgaggagggcacgacgaggagctcgagcccgtgagcgtggaccggagcgccgccgccgcgggcttcggccacctgctgccgtccgtcccgcgggcggcgtccctcgccgccacggtggtcgccgtcgcggccgccgccgcggcgctcctctgctgcatgaactggaactccgcggtgttcgcggggctcacgcccggcgagaaggtcaccaacgccgtgttcatggccgtcaacgtgcggcaggccggggagaactccgtcgactgctccctcgtcgcgccggccgtgctggtgctgttcctcgccatgatgtgcatcccggcgtcagcgacattgctgtccgtgcacgacagcggcagcgacaggaagaggagcggcgctggagaagcagaacgcaaggatgggacggagaagaagagaagactgtcgctgaacagcatgctgctgtcgccgctggcctgcaacgccgcagcggtgatgctcgcctgcgtcaccgagaggcgatcgatcgccggcgacccgctcaacttctccacgttcaacgtgatcttcgaggtggtcagtgcttatggcaacgtggggctgtccactggctacgcctgctcgaggctgctgcccgcggcggcggaggcgaccaccgcttgccatgacaagccgtacagcttctctgggtggtggagcgaccaggggaagctgctcctggttctcctcatgctctacgggaggctcaaatgctttcacggacagcgacgcagggggtga

SEQ ID NO: 130774 - DNA, 291 bp, Zea Mays
ctaaaacaattaggacaaatgagagccgtgtagaacaaaagatgccacgtattaagctagatatgaatgatatagttgcagatcctggccttagaaaaccaattgatgagttcccccatgaaattagagatgatgctaaaagagcttatttacaaatgggcccatgtcaactatttggtcatacatttccacggacaccggaaattcaagatgaaaagattttgaaacattttcaaggcttaagaactcggaagataaatttacctcgcaacatcaactcatgaacggtat

SEQ ID NO: 130775 - DNA, 1014 bp, Zea Mays
aacaagaggagaggagaggagaccacgtcctccgcggagtgcttggtcgcccgccaccaactccaacaagacagcggtcgacctcgccagaacccgcagccatggcgatgccccacacccacccaattccagcttctgctgtggttacctactactagctaagccctctgcgcactcgcccggcgttagttgttgcgtacgtacgtgttcacggctgcactcgcccggcggccacgctacgtatacgtacgagtacgaccgaccgaccgacgacgcacgagtgacacgatgatggtgatgggctacttccgctcgtcgacgaccaagtccgcgacggcggcggccaagcagaaggcgaggacgacgcgcgaggagctgggcctccgggaggcgctgctggaccagccggcggcggcggaggaggagggcggcgtgcccaagggctacttcgcggtgtacgccggggaggagtcgcggcgccggttcgtcgtgcccaccgggtacctccgggagccggcgttccgggacctcatggagcgcgccgccgacgagttcggcttcgcgcaggcgggcggcctgcgcgtgccgtgcgccgaggaggacctggaggacctcctgcgccgcctccagcgcaagaacgccgccgggaaggggaagaagaaagccaccgtctgccggtagatgccgcaagctagctaggttccttcttaattgtctgtaacgatctgcttgttggcgtggtgcgtacgcgtagatcagatcagatcggttcggttcagtcctggactcgaggatcgatcgatcgatcgatgaagttcttcttgtacagaatgcaagcaagcaagcaagcagccacatgcatgcatgcatgcatgggtcgtagtagcgtagctgaatgcatggcgtgttgttggtcccgtcccgtgaactgtggagaaagagtatactagtacaccgagaactcctgggggaattcagctttttgtttgttttttcgtctaaaactcgtgagat

SEQ ID NO: 130776 - DNA, 3404 bp, Zea Mays
atggtatcactctgctatttctgccccgggctcacaacgcggtcccggatgcccgtgaagcggtacaagaagatccttgctgaaatctttcccaaaacacaggatgaagagcctaacgagagaaggattgggaagctgtgcgagtacgcttcgaaaaaccctcttcgagtgccaaagatcacagtttacttggagcaacatatttatcgggacttaagaagtgagcaatacggctttgcaaaagttgtgatgttgatataccgcagactgtcagtttcctgtaaagaacagatgcctctgtttgcaagtagcctattaagcattgtccacacccttttagaccaaaagaggcaggatgatttatgtatcgttggatgcgaaaccttgtttgattttgctgtcaatcaggtggacggtacatatcagttcaatttggaagggctggtcccaagactgtgtgaaatagcacaagaagtaggagaagatgagcgagcaagtgccctacgagcggcagccctgcaatctctttcagctatggtctggtttatgggggagctttctcatatctcgtcagagtttgacaatgttgttcaagttgtactggaaaactacaaacctcagaagatgcaaaatgatgatcaaggtaccaatgatgccgacaaccagttggtgcaggaagaccagaaggctgagcaccccccttcccctttcattatcactccggccccctcttgggagagcatagttaatgttaagggaggagtcaacctaccagaggaagatgctagagatcccaaattttggtccagaatctgtgtgcacaatatggccaagctttctagggaggcaaccacattccgccgcatcttggaatgtttgtttcggtactttggtaacaatagttcatggttatcagaaaatggacttgctttgtgtgtcttgttggacatgcaacttttagtagaaagctcaggacaaaatatgcacttaatgctttcactgctgataaagcatattgagcacaaaacaatgttgaagcagccggacatgcagcttagcatcgtggaggtggcagctacccttgcagaacaatccagtgctatcgcttcaccaacaactatgggtgccataagtgatcttgtgaggcatttgaaaaggacattccatattactcttggcagcaaagatacggaattagtaaaatggaatgagaaattccggaagggcatagatgaatgcttagttcagctgtcaaagaaggtgtctgatgctgggccagttcttgacatgatggctgttatgctagaaaacattgcgagcactcctgttgtagctagatcaactgcagctgctgtttatcgcacagctcaaataattgcttcggtgccaaatttgcaataccagaataaggtgtttcctgaagctctgtttcatcagttgctgttaacaatgatacaccctgaccatgaagctcgtgttgctgcacaccgcatttttgccattgtcttagtcccatcttctgtttccccttcgattcaagccagtccatctagccgaccaaagaaacatgacatgcagaggacactctctagggctgtctctgtattttcttcttcagctgctatctttgacaagatgaaaaaggacaagaactcagaaaattcacaaggagaaagcaaggacaatagtatgcatagcgttggtgaagggaccggacaatcaaagagtcaaaaccttcacgtgtctcaaagccgccgtagcatgaaagctccgaatttttccatgaaaagaggtccttcaatggccatgagagctccttcagtagcgatcagagctccctcaatatctctgagaggtccttcaatgtctttgagagcatcttctatgtctgtaaaggaagaccaaagttcctcaaacaagtcagatgaggaaacggaatctgtgttggtgaagctgagcgcacgtcagatcacacttttgctgtcatccatttgggctcaatcaacatcccctgaaaatactcctgtgaactatgaagccattgctcatacttacagtttgcttctgttgttctctggatctaaggcatcaacttttgaggctcttactcagagttttcaggttgcattttctttgaggagctattcactcactgaagcagattcattacaaccgtctcggcgccggtcattgtttactctgtccacagccatgattattttctcgtcaagagcttacaatgtcttgccactcatcccgatctgtaaacaaatgatcaatgatcgtgcggccgatccgttccttcatttggtggatgagagcagacttacagctgttaaggattcttcaaatgatccttcaaaaatatatggatcaccagaggacaacaataatgcactgaagtccctttcagaaatagaactatcagaaagtcaatctcgagaatgcatagtctccacaatcatgaacaacatcgcaaatatgctggatgcggaattgcataatgtgagaagccaattgctaagtgatttcactcccgatgacatgtgtcctacaagcactcagttctttgaagtgcatgctgataacccttcatcagggtcttatgagactggtcaccatcaagagggcttgctgattgacctagggaatgaccatgatgcttttggggaagcttcagaaagcgcagaagcttccgcatcttctatacctgcatcagatcttctgagtatcgatcagcttcttgaaacggttggtgcagaaccagcacctcaggctggagtagtgtcagcagacattgggttcaaggatatgactagccactgcgaagccctgacgattgggaaacagcagaaaatgtccgccttcatgagcttccagcaaagcgtgcaagcggcagggctgccgagcagccagcccaaccagatggagctggacctttcccaagacccgcagttgcctcagtacacgaaggggcccaacggcgacaacgcacagccaggccaggacttccaacaacagtccctgaagttaccggcggcgagcccatatgacaatttcctcagagctgctggctgttagaggtccagcttgcagcagccaaaacatcatttacatggacgatggcaatttcaagatagccacgaactttccattccgcaggaaatcaaggaagaggtatgtccgtgtatgaggtcttagctagagactcaaccggattcgacacccattctttatgtatagctgtatatatgtataggttggctctttgctgctgctgctgctgctgtttttgccaatgcaacgagtagagggactgggggggagcagtgccttctatcacagactgtacatgtaaacatgttgcagaaatatatgaagaaaaaaaatgacgtttgaagaaa

SEQ ID NO: 130777 - DNA, 465 bp, Zea Mays
atgttccatgtgagcctcctgaagaagttccattgcgttccaccagaggctcccccgccacttccactggtccacaacgacgtcattactctagagccggaacgtgctgtccgtcgacgagtcgctcgtggcatcgagaaggtcctggtccactcgaagggctagtctgctgcatcggccacctgggaagatgtggtgtcgttccgcgccaagtatccaacatttcagctcggggacgagctacctctcggggaggggagagatagtttcctgttattagctcctaaattagtgggttgattccttcctattattagctcctagattggggggatgttccttcctattattagttaccaaagtagtaggtccttcctattatcagctcctaaattagtgggctgtcggctatatattcttgtaatccacacatggaggaggcaagtaataaactatttcctaacc

SEQ ID NO: 130778 - DNA, 850 bp, Zea Mays
gatgtagtttgtactgcatttattgtcattcggatgatgaatgtgaggactagaaagaactatattttagaacggagggagtggagggagtactgaaaacagaggcctatttctggcgacaactctttatcaatacagtagtccatgcccccatctatctgtttccattacacccatagcccagaatgtgcttatgtgcccaaaatgtggtaggagtatgtacaaatgtgaccttgtgctttctaactacaaagtttatctcctctccacaggagtggaagaaactgcacatgaaggatttccttgcgatgacgaacggtttcatgcacgagctcgagcagcctgaatcgaagacccgggtggagacctaccaggaattcatgcaacaacaggaacagcctgcgccggggacccaggtggagggttgagagctgcaatccgctggctgctgatctacatctagtcaattcccatggaggaattgcattggcattggactgtaccgtatctaataggtcacctatatcatttgtgaagatcaggattatccggtctataataactaaacatacaaataaaatgtccaccgaggtttctgttgattctttatgtcattgttgaccccatggctgctgctcaactgctgatgcgcggtctctataatttgtgaaagaagatagtgattaacttacataatgcaatagttaagtacatgtatatgaaacagttttccttgagatttctgttgattattttgtcgttgttcatcccatggctgtttgtggaatatgattaggagtaacctgtgagatagaataattaagtacagcgatgaagttgtcactgagat

SEQ ID NO: 130779 - DNA, 1579 bp, Zea Mays
ctatgccggtggctgtttggacatctgttgacacaccccaccccgttgccaagcggcgccaaaccaacgagagcacccggaccagacgcccaagtcgatcgccatggcgatgaagccggcggcggcggctccccctaccccggccgcggcgcacagcgtgttcgtctacggcagcctgatggcggacgaggtggtccgcaccatcctcaagcgcgtcccgcccgccgccccggccctcctcccaaactaccaccggttcaacatcaagggccgcatttacccggcgatcctgcccgttgagagcaagagagttgctgggagggttatcatgggtgttactgatgaagagctccagcttcttgacgcgtttgaagacgtggagtacacgaggacaagagttgagatatcattggctgactcttccgagaacatgctggctgacacttacgtgtggagtgatgcagaggatctcaatctttatggagaatgggactttgaggtgatatgacttgtttcctgcagtcctggggtgttaatgctatgtgattatcatgctacgtggatcatatcaaaatgatgaactctatcagctactgccgtcctcgggatctaaaattctgttgcaaccacgcacaatgaatgtagtgattttctcgcatatataatactccctttgtcccaaaatataattcgttttagactaaacacacatttattaattaatctacggatgtagtttgtactgcatttattgtcattcggatgatgaatgtgaggactagaaagaactatattttagaacggagggagtggagggagtactgaaaacagaggcctatttctggcgacaactctttatcaatacagtagtccatgcccccatctatctgtttccattacacccatagcccagaatgtgcttatgtgcccaaaatgtggtaggagtatgtacaaatgtgaccttgtgctttctaactacaaagtttatctcctctccacaggagtggaagaaactgcacatgaaggatttccttgcgatgacgaacggtttcatgcacgagctcgagcagcctgaatcgaagacccgggtggagacctaccaggaattcatgcaacaacaggaacagcctgcgccggggacccaggtggagggttgagagctgcaatccgctggctgctgatctacatctagtcaattcccatggaggaattgcattggcattggactgtaccgtatctaataggtcacctatatcatttgtgaagatcaggattatccggtctataataactaaacatacaaataaaatgtccaccgaggtttctgttgattctttatgtcattgttgaccccatggctgctgctcaactgctgatgcgcggtctctataatttgtgaaagaagatagtgattaacttacataatgcaatagttaagtacatgtatatgaaacagttttccttgagatttctgttgattattttgtcgttgttcatcccatggctgtttgtggaatatgattaggagtaacctgtgagatagaataattaagtacagcgatgaagttgtcactgagat

SEQ ID NO: 130780 - DNA, 1077 bp, Zea Mays
ctatgccggtggctgtttggacatctgttgacacaccccaccccgttgccaagcggcgccaaaccaacgagagcacccggaccagacgcccaagtcgatcgccatggcgatgaagccggcggcggcggctccccctaccccggccgcggcgcacagcgtgttcgtctacggcagcctgatggcggacgaggtggtccgcaccatcctcaagcgcgtcccgcccgccgccccggccctcctcccaaactaccaccggttcaacatcaagggccgcatttacccggcgatcctgcccgttgagagcaagagagttgctgggagggttatcatgggtgttactgatgaagagctccagcttcttgacgcgtttgaagacgtggagtacacgaggacaagagttgagatatcattggctgactcttccgagaacatgctggctgacacttacgtgtggagtgatgcagaggatctcaatctttatggagaatgggactttgaggagtggaagaaactgcacatgaaggatttccttgcgatgacgaacggtttcatgcacgagctcgagcagcctgaatcgaagacccgggtggagacctaccaggaattcatgcaacaacaggaacagcctgcgccggggacccaggtggagggttgagagctgcaatccgctggctgctgatctacatctagtcaattcccatggaggaattgcattggcattggactgtaccgtatctaataggtcacctatatcatttgtgaagatcaggattatccggtctataataactaaacatacaaataaaatgtccaccgaggtttctgttgattctttatgtcattgttgaccccatggctgctgctcaactgctgatgcgcggtctctataatttgtgaaagaagatagtgattaacttacataatgcaatagttaagtacatgtatatgaaacagttttccttgagatttctgttgattattttgtcgttgttcatcccatggctgtttgtggaatatgattaggagtaacctgtgagatagaataattaagtacagcgatgaagttgtcactgagat

SEQ ID NO: 130781 - DNA, 692 bp, Zea Mays
ctatgccggtggctgtttggacatctgttgacacaccccaccccgttgccaagcggcgccaaaccaacgagagcacccggaccagacgcccaagtcgatcgccatggcgatgaagccggcggcggcggctccccctaccccggccgcggcgcacagcgtgttcgtctacggcagcctgatggcggacgaggtggtccgcaccatcctcaagcgcgtcccgcccgccgccccggccctcctcccaaactaccaccggttcaacatcaagggccgcatttacccggcgatcctgcccgttgagagcaagagagttgctgggagggttatcatgggtgttactgatgaagagctccagcttcttgacgcgtttgaagacgtggagtacacgaggacaagagttgagatatcattggctgactcttccgagaacatgctggctgacacttacgtgtggagtgatgcagaggatctcaatctttatggagaatgggactttgaggtgatatgacttgtttcctgcagtcctggggtgttaatgctatgtgattatcatgctacgtggatcatatcaaaatgatgaactctatcagctactgccgtcctcgggatctaaaattctgttgcaaccacgcacaatgaatgtagtgattttctcgcatatataatactccctttgtcccaaaatataattc

SEQ ID NO: 130782 - DNA, 181 bp, Zea Mays
ttatatttttttattttacaaaaaatcgtatatacatatgtacaatttatattctatattaaaaacacatgagcatgatgttctactggttagacggtttcacccagtgtcttctgcacttcttccattattaggacgtgttttcgaaccccaccttctacaccgctttttaacattttac

SEQ ID NO: 130783 - DNA, 1469 bp, Zea Mays
ccgtcgctcgcgtcggccgcccccgccggccagcgagagcgagggacaacgaccgaccgaccgaccagctcgaggtgaatgaacagccgcataccgttcctccagaaaatgcaccgctggatcatccctagctgcggcgacacccgccagccgcgcccttcctcccgccatcgagatgcgttcccgaggccggcgtcggcgtcggcgtcggcgtcggcggccccgtcccctcagaagctgaggaaggtggggtcggaggggacgctggtgctgtccgtgcccaaggacgtagaggagatccggaccatgtcggcgtacggccgcctcaagctcttcacctaccacgagctcaggaaggccaccggcaacttcaacccggggcagatcgtcggcgagggcggcttcggcgtcgtgtacagaggggtcatcgacggctccgtgcggaagggctacccgtccaccgcggtcgccgtcaaggtgctcaacccgcagggactccagggtgacagggagtggctgacggaggtgagctacctcggacagtacagccacccgaacctggtggagctcatcggctactgctgcgaggacgaccaccggctgctggtgtacgagttcatggccaaggggcagcctggagcaccacctgttccgccgctcctgcagactctcgtggacgacgcgggtggccatcgcgctcgacgtcgccaggggcctcgccttcctccacgggcccgaccgccccatcatctaccgggacttcaagagctccaacatcttgctcgacgcgaaattcaacgccaagctgtcggacttcgggctcgccaaggaagggccgatgggcggtgagacgcacgtgtccaccagggtcatgggcacctacggctacgccgcgccggagtacatagccaccgggcacctgacggtgatgagcgacgtgtacggcttcggcgtggtgctgctggagatgctggtgggacggcgcgcgctggagccgagccgggcgggaggccgcgacggcagcctggtggactgggcgcggcccatccttatccggcccaaaaagttggagcggatcctggaccggcggatgggcgaggtctgctcggagatgggcctgcagcgcgtggcccgcctcgcgtacgactgcctcagccagaaccccaaggtccggccctccatggccagggtcgtcaccacgctcgaggcagtcctcgccgccggtgccggtgccgccgacgccgcgccgcggtgagaccggaggttgatgtaggtagtagggtcggcatacggattaattaggtgcgtacgggtatatgcttgggcggaggaggcatgtttaatttggtgtaatcatttgatcgaatcgattattcatggagtttaaatatattaaagttgtaaaagaatagaaaaacaattctgcagcttttctcggacgcttttgtacagcgccaccggcgaccaag

SEQ ID NO: 130784 - DNA, 1571 bp, Zea Mays
ctctcccagcagctcaccgtcgtgcctcctccatcggcatccacccggccgagagcacaacgtgtaccgtctctccccagcgtgcgcgcgcgcgtggtcggaggctgccgtcgctcgcgtcggccgcccccgccggccagcgagagcgagggacaacgaccgaccgaccgaccagctcgaggtgaatgaacagccgcataccgttcctccagaaaatgcaccgctggatcatccctagctgcggcgacacccgccagccgcgcccttcctcccgccatcgagatgcgttcccgaggccggcgtcggcgtcggcgtcggcgtcggcggccccgtcccctcagaagctgaggaaggtggggtcggaggggacgctggtgctgtccgtgcccaaggacgtagaggagatccggaccatgtcggcgtacggccgcctcaagctcttcacctaccacgagctcaggaaggccaccggcaacttcaacccggggcagatcgtcggcgagggcggcttcggcgtcgtgtacagaggggtcatcgacggctccgtgcggaagggctacccgtccaccgcggtcgccgtcaaggtgctcaacccgcagggactccagggtgacagggagtggctgacggaggtgagctacctcggacagtacagccacccgaacctggtggagctcatcggctactgctgcgaggacgaccaccggctgctggtgtacgagttcatggccaaggggcagcctggagcaccacctgttccgccgctcctgcagactctcgtggacgacgcgggtggccatcgcgctcgacgtcgccaggggcctcgccttcctccacgggcccgaccgccccatcatctaccgggacttcaagagctccaacatcttgctcgacgcgaaattcaacgccaagctgtcggacttcgggctcgccaaggaagggccgatgggcggtgagacgcacgtgtccaccagggtcatgggcacctacggctacgccgcgccggagtacatagccaccgggcacctgacggtgatgagcgacgtgtacggcttcggcgtggtgctgctggagatgctggtgggacggcgcgcgctggagccgagccgggcgggaggccgcgacggcagcctggtggactgggcgcggcccatccttatccggcccaaaaagttggagcggatcctggaccggcggatgggcgaggtctgctcggagatgggcctgcagcgcgtggcccgcctcgcgtacgactgcctcagccagaaccccaaggtccggccctccatggccagggtcgtcaccacgctcgaggcagtcctcgccgccggtgccggtgccgccgacgccgcgccgcggtgagaccggaggttgatgtaggtagtagggtcggcatacggattaattaggtgcgtacgggtatatgcttgggcggaggaggcatgtttaatttggtgtaatcatttgatcgaatcgattattcatggagtttaaatatattaaagttgtaaaagaatagaaaaacaattctgcagcttttctcggacgcttttgtacagcgccaccggcga

SEQ ID NO: 130785 - DNA, 2078 bp, Zea Mays
cgcgaggcggcgggctggccacccaaaagctcggggcgcccatgctccgaccattgctcccgccgctagctcgtctccggcccctgcctattcattcgtctctcccagcagctcaccgtcgtgcctcctccatcggcatccacccggccgagagcacaacgtgtaccgtctctccccagcgtgcgcgcgcgcgtggtcggaggctgccgtcgctcgcgtcggccgcccccgccggccagcgagagcgagggacaacgaccgaccgaccgaccagctcgaggtgaatgaacagccgcataccgttcctccagaaaatgcaccgctggatcatccctagctgcggcgacacccgccagccgcgcccttcctcccgccatcgaggtatgcaccatgacctcaaggagctggcgtctgtaaaatgctcgacgtatgtgatctgtgcgttcccgatcgcgcgcggcgcacgcgtgcagatgcgttcccgaggccggcgtcggcgtcggcgtcggcgtcggcggccccgtcccctcagaagctgaggaaggtggggtcggaggggacgctggtgctgtccgtgcccaaggacgtagaggagatccggaccatgtcggcgtacggccgcctcaagctcttcacctaccacgagctcaggaaggccaccggcaacttcaacccggggcagatcgtcggcgagggcggcttcggcgtcgtgtacagaggggtcatcgacggctccgtgcggaagggctacccgtccaccgcggtcgccgtcaaggtgctcaacccgcagggactccagggtgacagggagtggctggtatggtcagggctctggcaccgatccatccatctctgcgcgcgtgcaagcgtcatgcatgtgttccggccatccatctccaatctcacccccgacccgacgacgtgacgtccatggacgtgcttgtgcgtgcgtgcagacggaggtgagctacctcggacagtacagccacccgaacctggtggagctcatcggctactgctgcgaggacgaccaccggctgctggtgtacgagttcatggccaaggggcagcctggagcaccacctgttccgccgctcctgcagactctcgtggacgacgcgggtggccatcgcgctcgacgtcgccaggggcctcgccttcctccacgggcccgaccgccccatcatctaccgggacttcaagagctccaacatcttgctcgacgcggtttgttcgtttttattgcatgcgttggcgtacgatcgatcgtcagttcacattcaccccggcctgccggtgccggtgaccaccaattataaagcaccagactcaccaccgtgcctctctcgatctgccagaaattcaacgccaagctgtcggacttcgggctcgccaaggaagggccgatgggcggtgagacgcacgtgtccaccagggtcatgggcacctacggctacgccgcgccggagtacatagccaccggtaggtatctccgatcctccaccacctccttcttcttcccagacgtagatgagatcactgcctgccggcgtccggcgctcgctgctgcaacgatagtatgcaatgcagggcacctgacggtgatgagcgacgtgtacggcttcggcgtggtgctgctggagatgctggtgggacggcgcgcgctggagccgagccgggcgggaggccgcgacggcagcctggtggactgggcgcggcccatccttatccggcccaaaaagttggagcggatcctggaccggcggatgggcgaggtctgctcggagatgggcctgcagcgcgtggcccgcctcgcgtacgactgcctcagccagaaccccaaggtccggccctccatggccagggtcgtcaccacgctcgaggcagtcctcgccgccggtgccggtgccgccgacgccgcgccgcggtgagaccggaggttgatgtaggtagtagggtcggcatacggattaattaggtgcgtacgggtatatgcttgggcggaggaggcatgtttaatttggtgtaatcatttgatcgaatcgattattcatggagtttaaatatattaaagttgt

SEQ ID NO: 130786 - DNA, 1962 bp, Zea Mays
gccctctttgtcttcttgcttttgctttcttggtcccttcccttctcttttctagcagagctctcgtggttcttggccttccgtgtgtctgccagcgctgccagctttcacataaacaagttggggaagcagttgaggttttctaattcttcttggaaggattgagatctccagttctgataatgggttcttttgggatgaactggaatcagaaggaccccatggtgtgggattgggaacatctagtaccgtctgtctcaaatgcagttacaaggcacggatctgctaattcatctggtggtactcttacttctaactcagagctagggcatggttcatccaagagctctatttcagcgtccattgattcaccctctggagtagggaacagcttagagttcaacttcgccgctgttgagaggcatgttaagaacacgggcacgaacggcagagtcgatgactcggggaattctccatcgtcaatgatagctttcaaccaaggagagccattaatcagcctgaaacttgggaagagggcttacttcgaaaacgcctgcggaggacaggatgccaaggtttctgcagcttcagacgttacttctgcagccagcgtggtcaagaagactaaggtgtctcagcagaatgcaaagaactggtactgtcaggttgaagggtgcaaagttgacctgtcttctgctaaagattacaatcgcaagcacaaggtctgtgtagtccattctaaagctaccaaggtggttgttgctggtctagagcgtcggttttgtcaacagtgtagccggtacacaggaacgctagcatgaaatgaatagtgaagaaaaattggcaattccttttgtttctggcactagctgtaatggtgtaggactgcctaagtggagtgttgaactgttgatgcaacatcttgagaaggagaaattgtacacaagcttataactaacatttacactttgatctgttgttgacataatgaagctccatttccctcttttctttaatccttctctgtttgtagttttcatggtttagcggagtttgatcagaacaaacgaagctgtcgtaggcgtctgatgcatcataatgcacggaggaggaaacctcaggcagacacaatttcattcaattcatcgacaatgttttatgatacaaggcagcggacaaatcttttctttagtcaaccactttatggccaagtgaggagcaatgcagggtcttcatgggataacttgggaggcttaaaattcatggagacgaaacatccgccagtgcatccaacaaaaacagcatcccctgatgaactgcatttctcagccctccagataactagtgctgcggctcacaccggacatcatcatgatctcgatgggttcatggcgttcaagggaaccagcacaaaggtccttaaccaaggcgtggaggcttgggcggccgcttccagctcgaacaacggaggcccagaaggtgggcgtgctctctctcttctgtcagacggctcgtggggctcgagttcagccgtcatccagcagcccacatctcacgcggacgccggtgcattgctgccgcccctcgccaccgttgccgtctccaacgccgccgccgccgccgggcatcctctggacccgtccccgggaaggttctggccgcaagacgatcatcccccgctcgtcgacggacccgccacgcagattccggagctggcgcacctccggatatggtgaaaggaaacgcatgtgatgcggtgactggtgacatgccagttcgagggcctggctgggaacacatctggttggttagcctgccgctctggcttgaatttgccggcgacgacagtctttgtttgtatcttttgatcagaacggacacagacatgtttgcacaatataatgtgacgagtccctctttggggttgaggagtgaggagatggagaacgataggaggcaaaa

SEQ ID NO: 130787 - DNA, 2351 bp, Zea Mays
aggagaaaggttgccatctcgtgtgtgtgtgtctgttggatggatctctgtgagccatgccctctttgtcttcttgcttttgctttcttggtcccttcccttctcttttctagcagagctctcgtggttcttggccttccgtgtgtctgccaggtagaaattttaaccgaaaaaaagattcttccgagcaaaggaggttagatgcttgattccacacccagcatttcccctccttttctgtataaaacaatattccttttttattttggtttgcatcctctttgcccccacccccatacacacaaaagaaactggattcggtgcctattggttcttgtgttggtgggaacagtagggcagcgccaataatgcagtgctgaggtaattgctgcgaaagatgagagagggtcttggatgtgggtggttgtgatggtggataggcatataggatagggccaaacctagatggggctgaggatagggaaggcatgcatgatagggacttcaaagacccaggtgagagctcagtcgacggtaatgccgccgcagctcctttagtcgccaggcgattggcatgccacggttcctggttcatctcgcagagttagtttgagttcgaggcttgtgtggtgttgctgattgcgcacaagaggtccaggaacatataggcggcggatctggctgcgttctttctgtttcgtcagagaaggggtttcagcgctgccagctttcacataaacaagttggggaagcagttgaggttttctaattcttcttggaaggattgagatctccagttctgataatgggttcttttgggatgaactggaatcagaaggaccccatggtgtgggattgggaacatctagtaccgtctgtctcaaatgcagttacaaggcacggatctgctaattcatctggtggtactcttacttctaactcagagctagggcatggttcatccaagagctctatttcagcgtccattgattcaccctctggagtagggaacagcttagagttcaacttcgccgctgttgagaggcatgttaagaacacgggcacgaacggcagagtcgatgactcggggaattctccatcgtcaatgatagctttcaaccaaggagagccattaatcagcctgaaacttgggaagagggcttacttcgaaaacgcctgcggaggacaggatgccaaggtttctgcagcttcagacgttacttctgcagccagcgtggtcaagaagactaaggtgtctcagcagaatgcaaagaactggtactgtcaggttgaagggtgcaaagttgacctgtcttctgctaaagattacaatcgcaagcacaaggtctgtgtagtccattctaaagctaccaaggtggttgttgctggtctagagcgtcggttttgtcaacagtgtagccgttttcatggtttagcggagtttgatcagaacaaacgaagctgtcgtaggcgtctgatgcatcataatgcacggaggaggaaacctcaggcagacacaatttcattcaattcatcgacaatgttttatgatacaaggcagcggacaaatcttttctttagtcaaccactttatggccaagtgaggagcaatgcagggtcttcatgggataacttgggaggcttaaaattcatggagacgaaacatccgccagtgcatccaacaaaaacagcatcccctgatgaactgcatttctcagccctccagataactagtgctgcggctcacaccggacatcatcatgatctcgatgggttcatggcgttcaagggaaccagcacaaaggtccttaaccaaggcgtggaggcttgggcggccgcttccagctcgaacaacggaggcccagaaggtgggcgtgctctctctcttctgtcagacggctcgtggggctcgagttcagccgtcatccagcagcccacatctcacgcggacgccggtgcattgctgccgcccctcgccaccgttgccgtctccaacgccgccgccgccgccgggcatcctctggacccgtccccgggaaggttctggccgcaagacgatcatcccccgctcgtcgacggacccgccacgcagattccggagctggcgcacctccggatatggtgaaaggaaacgcatgtgatgcggtgactggtgacatgccagttcgagggcctggctgggaacacatctggttggttagcctgccgctctggcttgaatttgccggcgacgacagtctttgtttgtatcttttgatcagaacggacacagacatgtttgcacaatataatgtgacgagtccctctttggggttgaggagtgaggagatggagaacgataggaggcaaaa

SEQ ID NO: 130788 - DNA, 1829 bp, Zea Mays
aggagaaaggttgccatctcgtgtgtgtgtgtctgttggatggatctctgtgagccatgccctctttgtcttcttgcttttgctttcttggtcccttcccttctcttttctagcagagctctcgtggttcttggccttccgtgtgtctgccaggtagaaattttaaccgaaaaaaagattcttccgagcaaaggagcgctgccagctttcacataaacaagttggggaagcagttgaggttttctaattcttcttggaaggattgagatctccagttctgataatgggttcttttgggatgaactggaatcagaaggaccccatggtgtgggattgggaacatctagtaccgtctgtctcaaatgcagttacaaggcacggatctgctaattcatctggtggtactcttacttctaactcagagctagggcatggttcatccaagagctctatttcagcgtccattgattcaccctctggagtagggaacagcttagagttcaacttcgccgctgttgagaggcatgttaagaacacgggcacgaacggcagagtcgatgactcggggaattctccatcgtcaatgatagctttcaaccaaggagagccattaatcagcctgaaacttgggaagagggcttacttcgaaaacgcctgcggaggacaggatgccaaggtttctgcagcttcagacgttacttctgcagccagcgtggtcaagaagactaaggtgtctcagcagaatgcaaagaactggtactgtcaggttgaagggtgcaaagttgacctgtcttctgctaaagattacaatcgcaagcacaaggtctgtgtagtccattctaaagctaccaaggtggttgttgctggtctagagcgtcggttttgtcaacagtgtagccgttttcatggtttagcggagtttgatcagaacaaacgaagctgtcgtaggcgtctgatgcatcataatgcacggaggaggaaacctcaggcagacacaatttcattcaattcatcgacaatgttttatgatacaaggcagcggacaaatcttttctttagtcaaccactttatggccaagtgaggagcaatgcagggtcttcatgggataacttgggaggcttaaaattcatggagacgaaacatccgccagtgcatccaacaaaaacagcatcccctgatgaactgcatttctcagccctccagataactagtgctgcggctcacaccggacatcatcatgatctcgatgggttcatggcgttcaagggaaccagcacaaaggtccttaaccaaggcgtggaggcttgggcggccgcttccagctcgaacaacggaggcccagaaggtgggcgtgctctctctcttctgtcagacggctcgtggggctcgagttcagccgtcatccagcagcccacatctcacgcggacgccggtgcattgctgccgcccctcgccaccgttgccgtctccaacgccgccgccgccgccgggcatcctctggacccgtccccgggaaggttctggccgcaagacgatcatcccccgctcgtcgacggacccgccacgcagattccggagctggcgcacctccggatatggtgaaaggaaacgcatgtgatgcggtgactggtgacatgccagttcgagggcctggctgggaacacatctggttggttagcctgccgctctggcttgaatttgccggcgacgacagtctttgtttgtatcttttgatcagaacggacacagacatgtttgcacaatataatgtgacgagtccctctttggggttgaggagtgaggagatggagaacgataggaggcaaaa

SEQ ID NO: 130789 - DNA, 2633 bp, Zea Mays
aaaaaaaccctgtttcaggccaaccaaccagctgccctgccggcgcgatttctctttctttctcctcccccaccgagcgccgatctctgtttcgccctatcgcaggaggcgacatgcaacagtggagtcgctgaccagggaggggatgtgactgtgaaaggctgctgcagctggccatgcgatttcagatttcccattcacaacaattcaccccacccatcgtgcacatgatcctactgttgtgcacactgattgatgagaactgtagtggctttgtcctctacccaccaccaccaccaccaatagcaggcccttttatacattggccatgacaccgatgatcactccaaacagcagctgcaaagatcaccctggattcctggagcacggagagagagccgagcgagcagctgtcggcacttgggagtggcactgtggaatctggagaacctaggtagaaaatcaagcaaagcatctcccactccaagcagtagcaccaacacccccctgcattcagcgctgccagctttcacataaacaagttggggaagcagttgaggttttctaattcttcttggaaggattgagatctccagttctgataatgggttcttttgggatgaactggaatcagaaggaccccatggtgtgggattgggaacatctagtaccgtctgtctcaaatgcagttacaaggcacggatctgctaattcatctggtggtactcttacttctaactcagagctagggcatggttcatccaagagctctatttcagcgtccattgattcaccctctggagtagggaacagcttagagttcaacttcgccgctgttgagaggcatgttaagaacacgggcacgaacggcagagtcgatgactcggggaattctccatcgtcaatgatagctttcaaccaaggagagccattaatcagcctgaaacttgggaagagggcttacttcgaaaacgcctgcggaggacaggatgccaaggtttctgcagcttcagacgttacttctgcagccagcgtggtcaagaagactaaggtgtctcagcagaatgcaaagaactggtactgtcaggttgaagggtgcaaagttgacctgtcttctgctaaagattacaatcgcaagcacaaggtctgtgtagtccattctaaagctaccaaggtggttgttgctggtctagagcgtcggttttgtcaacagtgtagccggtgagatttccttccattaaaactgagttctcctttcattctacgatattcatatttgtatttgccaagttacttttttttggcatctttaatgagggagggagctttgaaaatgtgaccagctgaaagcaataccagccactcaagttgtagagcgaagtggacttgtgctagtctatatgatgctcaattattttgcttggctcagactctcatgatatttatgttatttaatcttttctaattaaggtacacaggaacgctagcatgaaatgaatagtgaagaaaaattggcaattccttttgtttctggcactagctgtaatggtgtaggactgcctaagtggagtgttgaactgttgatgcaacatcttgagaaggagaaattgtacacaagcttataactaacatttacactttgatctgttgttgacataatgaagctccatttccctcttttctttaatccttctctgtttgtagttttcatggtttagcggagtttgatcagaacaaacgaagctgtcgtaggcgtctgatgcatcataatgcacggaggaggaaacctcaggcagacacaatttcattcaattcatcgacaatgttttatgatacaaggcagcggacaaatcttttctttagtcaaccactttatggccaagtgaggagcaatgcagggtcttcatgggataacttgggaggcttaaaattcatggagacgaaacatccgccagtgcatccaacaaaaacagcatcccctgatgaactgcatttctcagccctccagataactagtgctgcggctcacaccggacatcatcatgatctcgatgggttcatggcgttcaagggaaccagcacaaaggtccttaaccaaggcgtggaggcttgggcggccgcttccagctcgaacaacggaggcccagaaggtgggcgtgctctctctcttctgtcagacggctcgtggggctcgagttcagccgtcatccagcagcccacatctcacgcggacgccggtgcattgctgccgcccctcgccaccgttgccgtctccaacgccgccgccgccgccgggcatcctctggacccgtccccgggaaggttctggccgcaagacgatcatcccccgctcgtcgacggacccgccacgcagattccggagctggcgcacctccggatatggtgaaaggaaacgcatgtgatgcggtgactggtgacatgccagttcgagggcctggctgggaacacatctggttggttagcctgccgctctggcttgaatttgccggcgacgacagtctttgtttgtatcttttgatcagaacggacacagacatgtttgcacaatataatgtgacgagtccctctttggggttgaggagtgaggagatggagaacgataggaggcaaaa

SEQ ID NO: 130790 - DNA, 1003 bp, Zea Mays
gaaaggttgccatctcgtgtgtgtgtgtctgttggatggatctctgtgagccatgccctctttgtcttcttgcttttgctttcttggtcccttcccttctcttttctagcagagctctcgtggttcttggccttccgtgtgtctgccaggtagaaattttaaccgaaaaaaagattcttccgagcaaaggagcgctgccagctttcacataaacaagttggggaagcagttgaggttttctaattcttcttggaaggattgagatctccagttctgataatgggttcttttgggatgaactggaatcagaaggaccccatggtgtgggattgggaacatctagtaccgtctgtctcaaatgcagttacaaggcacggatctgctaattcatctggtggtactcttacttctaactcagagctagggcatggttcatccaagagctctatttcagcgtccattgattcaccctctggagtagggaacagcttagagttcaacttcgccgctgttgagaggcatgttaagaacacgggcacgaacggcagagtcgatgactcggggaattctccatcgtcaatgatagctttcaaccaaggagagccattaatcagcctgaaacttgggaagagggcttacttcgaaaacgcctgcggaggacaggatgccaaggtttctgcagcttcagacgttacttctgcagccagcgtggtcaagaagactaaggtgtctcagcagaatgcaaagaactggtactgtcaggttgaagggtgcaaagttgacctgtcttctgctaaagattacaatcgcaagcacaaggtctgtgtagtccattctaaagctaccaaggtggttgttgctggtctagagcgtcggttttgtcaacagtgtagccggtgagatttccttccattaaaactgagttctcctttcattctacgatattcatatttgtatttgccaagttacttttttttggcatctttaatgagggagggagctt

SEQ ID NO: 130791 - DNA, 1095 bp, Zea Mays
atgcaggccttcctcagcagcctgagcaagtgcgaggagggccacaacaaccagacggaggactggatgaagcagatctgggacgtcgcctacgacatcgaagactgcatcgacgacttcgcccacagcctccgcgcctgcaacctctgcaacggtggcatccgcttcgtccgggacaagcaccccaacaggagcatcagggacatgccgctgcagattgagtctaggagggagctcctgcagcgatcagggaggtcccctgacggcatctccagtgttattctcgtcgagaaagacaggtcttttatcaagtctaaagtagtgataaggataatggaatacctcaacctttttgagatccatggcattatccggaagacaaggacagttatggaatgtttgcaccggttctgtagagactgcatcgacaaatctatgcgactaggaaataacgaatgcccagcgtgtcgcacccattgtgcaagcagacgttctttgagggatgatcccaattatgatgcactgattgcagccctgtatccagatattgataagtatgaggaagaggaatttgctttcagtgagcaggagaggattcagaataaaaagatacaagaaaccattgaggaaacattcagaagacagtctgacgcaattggtaagaaacgttccatggcaaaagcaactgcaactgcctttgcaaggaagtacaggagaacacggggaagagttagaaccatcccccctgatattacccctactggctcttctgaggaggaaagaggagaaggaaattccaaagagaccatcagagagcaatcttctactgatgatcattctccagatttaagacagaaaagatgtcggaagaggtctggaccacaaggatcgcctgctggaaccattggcagtatcgactacagctttgaggagaatgatgaattagttggtggaaaagaaattttagccacctctccgttgcagggagagatgcttgcttgggggggaaaatggtgcacggagccaaaatcgacatggcagtgttggttcaaatggcaggactggaaggagtgggcgcattgcaaaattggttga

SEQ ID NO: 130792 - DNA, 346 bp, Zea Mays
aaacaaacaaacccatatatatcgggtggggattcaaacataaacctattccatttccattccaaaggcgaattactatataatacaatggctaagatgtcaagtccaattcacgccaagatatcaacagatcgctggagatactacggctgttcaagttacaaacagtaacaaatagctcctgaactaaaacgggaagtgcaaatgttcagaaaatcactggcgagcccgcacagctacgaacatgagccctcgctatgaacacaggccctcgttttcaagatcagcctgaaccttcgttcgcttgatccttcccggcgatttgcattctgcgtctacacccggg

SEQ ID NO: 130793 - DNA, 935 bp, Zea Mays
ggatcacgatctagcctacactacagcctacaatggtcgttgccttccatccgaccttaccggcctacccttcctcttccaatttgctactgatctcccctgttatcgtcggatttctcgtgacggtgagtccgtgacacgccggcgccatggcgagcaggtgcctagcggctgcatcggaggccgccgtcgtcttcctcatccggcccatcctcgccatcgttttcgtcttcaccctcatcctcctcggctggtacgtggcgtggacgacggtgctggtgcacgtgccgctggtgcaggagatcgccggcctgcgcccgaagaagccctctaaacccaagccagccaaccgcggccgcgtcgccaagttctaccggaaccaggccgaggccgcacaaaggaactgcaaatcagaaggggcaccttaagagaaaatctgctgcacactagtatgcaaattccctggtagttctaattagaatgcaatactactaatgatgacggttttctaggagagaatgtatatctgcatttgatgggagcttcctgcatgacgacttctctaggagagaatgtgtatcagcatttgacgggagcttcctgcatgacgacacatcaggcttatgatactagcgtatcaacttttagttgcatgaccttgtaaaatgaggaccttttaattgtagattgtacatatacttgtacatgacttttagttgcaacgacaacgatcatctattcaatcagccaataattccgtaactgattccctctgggaagaacgaagatctggactcacctggcaagagggaagccgatcattcttcaaattcaactatatggggtgcaaaatgctagcgtggttgaacactatgattgaggtaaggaaatactgagaaagccaatgcatttaagaaagaaaaaaaaatctatag

SEQ ID NO: 130794 - DNA, 595 bp, Zea Mays
ggatcacgatctagcctacactacagcctacaatggtcgttgccttccatccgaccttaccggcctacccttcctcttccaatttgctactgatctcccctgttatcgtcggatttctcgtgacggtgagtccgtgacacgccggcgccatggcgagcaggtgcctagcggctgcatcggaggccgccgtcgtcttcctcatccggcccatcctcgccatcgttttcgtcttcaccctcatcctcctcggctggtacgtggcgtggacgacggtgctggtgcacgtgccgctggtgcaggagatcgccggcctgcgcccgaagaagccctctaaacccaagccagccaaccgcggccgcgtcgccaagttctaccggaaccaggccgaggccgcacaaaggcatagctgggaactggatacttggatagggatggaagaaaaataaagccaatatcattagcaggatcaatctggtttatctagtaaaaacgggctgtgatcgaaatagtttatgtatcctttcttatttaaaccactatcatgggtatgtattccggaaaaatggctatctgaaaagtcttatattttgattta

SEQ ID NO: 130795 - DNA, 863 bp, Zea Mays
cttgtgttagcgctggtgattcggcagccagcgaggctgatccgggaccgggtggctggccggtggccacaccagaggtctattatacctggattccgcgaggccacggaccacggtgcgcgcgctcttgtcttgttcctgtgcctgccactgccagtgccaccatctcgccgtcggcgtcggctcgtcgcctgagagccgaggccacgcaggcacccgggccgggggatgtcggcgccggcggcacaggccgtggtggcgctggctctcgcggccatcctctcgaccccggcgccccaggcggacaccttctccaacgtcccgcccacgctctccgggggcgacgggaagcaagagcggatcaagcaccccaggtcggccaaggcgttgcagtgcacgaccaagtgcgtcggcacctgcatccgcggcggcggcggcgcgcccggcgaggggcccctcaacgtcaggaggcccctcgtggtgttcaaggacggcttccgcagccggcagtactggtgggtactactactacctgcactacagccccctcttcttttcactatagcagatgctaccactgctcgtgggtcaccaaagtgagctcaactttctgatctgatcagtttgttgttcaattagcctgatagagtgctcggacatttgcaatcgcatcaaggatgggcaggacggaccctgagacgggccagaggaacaacatgcccaagcccaaagttgttggagcaactgccatggctgcggtgcaggctagatatgggatccggttcttctgccaggcctccagaagcagaacttcagaggcgacaagggtaataaggtacagtaaaccagtcagtaacatatag

SEQ ID NO: 130796 - DNA, 233 bp, Zea Mays
atggaccgggctttcgcccacgtaagacagtgctggggagccgacgccctcaacaggggaagcggcgcccaggggcgtcgccgtcgccaaagctttcgcccaagaaaatcccagcaaaacgaccgaccaagaacccgtgacaaagcaaccacctttgccgccaccgccgcccacacaacacacacaaacccatccagagggacatcgacgcgccagctgccacaacagccgca

SEQ ID NO: 130797 - DNA, 235 bp, Zea Mays
ctcgcatccagagcgtcagttgcactatgggatctaacccattatgggtcctctcgctgggaggtcctatccctaagaaaaggaacaagaaacaaagaaaacagaggttagtgtataatagaaaacattacctaggtttaaacaaagcaagaacgtaacacaaattcatctggttctttcttgtaaagcaaatgattggctaaaataatagctaacacgcgcaccaatagatgcc

SEQ ID NO: 130798 - DNA, 351 bp, Zea Mays
gaatttacaagcagaaattccggcatgagatgcaagtcatatatttattgcacatacatattagttattttatccattttgacaaagcttcaaacatttaatgcacacacatactatttttaataaaatattgatttgaatgggtagtcaatttaaaagttcgtttaaaaacttatttattctaggagaaatactttctaatgtatcatctccattaagaggtactcttacttaggaattaaatttcttctaaacacctaattgatagaagaacagtcccattaattaaataatggaggatattcctatttcatttcctttacagtttcaaattaaatttcagttttaaaa

SEQ ID NO: 130799 - DNA, 3899 bp, Zea Mays
atggcggccatcgtggcggcgcgggcgtcggcccccggcagagcggccgtcagcaccatcgccgcgttccacagccacgcgtccccttcccgcgcgctcccgctcgcctcctcctccatcggcggcgccaggcggtaccaccacgcccccgcgtgctgcttcgccaccaagcccaccgcgccggccgctgccgagctcgtcgaccaggacctcgccacggccacgcaggaggccgccaagccacgccggaaacgccggtctcggaaggcgaagaagtccgccaccgccgccaaggaggaggatgggacggacgacaagccggtggcggcggcagaggacgaggcgaaaaggaagaaggaggcggccggcgccgaggacagcgcccgggcattggtggccggcctcgacgacgtgatcgtcaaccccgtgggtctgggtcggcggtcgcggcaggtgttcgacgaggtgtggcgcaagttctcgcggctgggccagatttcgagcgcctcgtccaccgcgctggcggaggaggagcaggccgtgcttatccgtggaggacctatgtgcgagttcactgtgccaggggcgcaggacaccaccgtcctcgtcgtcggtgccaccagccgcatcggccgcatcgtcgtgcgcaagctcatgctccgcggatacaatgtcaaggctttagtaagaagaaacgaccctgaagtgatagatatgctcccaaggtcggtggatgttgttgttggtgatgttggtgatcctgcaactgtcaaagcagctgtatcaggctgcagcaagataatctattgtgcaactgcacgctcaactattacaggagacctaaatagggttgataaccaaggagattactacaacgaattggcccagctcagggctggtaaaagcagcaagagcaaactcctgatagcaaaattcaagtctgcaaagtccttgaagggttgggaggtgcggcagggttcttacttcccaaatacttttgtttctagatttgatgaaggtatcgatgcatcactggatttttcagaagatcagcaggctgttttctcaggatttgtattcacaagaggtggatatgttgagatatcaaaaaggctttctcttcctctaggttctaccctagacaggtacgatggtttactcttttcagtgggaggaaatggaagatcatacgttgttattcttgaaactggtccattggcggacacgacccagagcaagaagtattttgctcggatgactacaaaagtaggtttttgtagggtaagagtgccgttttcatcttttcggccagtaaacccacaagatcctcccctagacccttttcttgtgcatacactaaccattaggtttgaaccaaaaaggcagagacctggtgaggcatctcaaaattctagtgatcctcgaaactttgagctaaaactggaatacatcaaggctttacctactggtcaagaaacagacttcatattggtgtcatgttcaggttctgggattgaatctaacagaagagaacaagttctcaaagccaagaaggctggagaagatgcactgcggaggtcaggccttggatatacaatcgtgcgcccgggtcctctgcaggaagaacctggtggccagcgcgcgctgatcttcgatcaagggaacagaatctcccagggtatcagctgtgctgatgtggctgatatctgtgtcaaggcactgcatgattccactgcgagaaacaaaagtttcgatgtatgctacgagtacgtcagtgaccaagggaacgagctttatgaacttagaatgcaaagcctgaggctgcaagagtggtccggactctggagtactctctctttctctgttgggaaagttggtttcggcctgttctgctgctcaagcagcatacggcagctcacgcctatggtggacaaccaaagattcagtgctctgattcttcttggtttgtctttctccggcagatctctaacgagtagatgttctctcttcttttcttttcttctttttttgaaagcttcactctaacctgaaatcggctttacttaaatttcgagccaacttaatcttcttctttgccaattcttttttaaagaaaagtttgagagatgcctctagttttttttttgggggtgtgtgtttgcgactacagagtctgaaatcacaaatcagagctgtatagggagcaggtggcgactgagtgactgacaaacgtggggaagatggagacaaagaaacgcaagcctgtggtctactaaagacgggggcatcgccatcgagggcaaacggaggccacaggattagcagcttctccgtgctgctgcgtctcctcctcatcgtcctctccagtgtccagctcggccatggcgttcaccgtctccttctcccccgccaacgttcagatgctccaggctaggagtggccacggccacgccacctttggaagctgttccgccgtgccaagagccgggccaaggctgcgttccacggccgtccgggtcagcagcgagcaggaggcggcggcggccgtcagggcgccgtccgggaggaccatcgaggagtgcgaggccgacgccgtcgctgggaagttccctgctcccccgccgctggttaggccgaaggcccctgaaggaacgccggagatcaggccccttgacatggcaaagcgcccccgtcgcaaccgcaaatcacctgctcttagggctgcattccaggagacgagcatctcgcctgctaactttgtgcttccattgtttatccatgaaggagaagaagatgctcctatcggagctatgccagggtgctataggcttgggtggaggcacgggctgcttgacgaggtttacaaggcccgcgatgttggtgttaatagttttgttctctttcctaaagttcccgatgcattgaagtctccaacaggagatgaagcgtacaacgataatggtctggttccacgtacaatccgcttgctcaaggacaagttccctgatattgttatctacacagacgtcgcgttagacccttattcatctgatggtcatgatggtattgtgagggaagatggtgtaattatgaatgatgaaacagtttatcagttgtgcaaacaggctgtttcacaggctcgtgccggtgctgatgttgtcagccctagtgacatgatggatggccggattggagcacttcgctctgctctggacgccgagggcttccatgatgtctccattatgtcctacaccgcaaagtatgccagttcattttatggccctttccgagaagctttagattcaaatccaagatttggagataagaagacgtaccagatgaacccagctaactacagagaagccctcatagaaaccgcagcggacgaggcagaaggagccgacattctgctagtgaaaccgggattgccgtacttggacattatccgactgcttcgggatcattcagccctaccgattgctgcttaccaggtctcgggcgagtactcgatgatcaaagccggcggggccctgggcatggtggacgagcagaaggtgatgatggagtcgctcatgtgcctgcggcgagccggcgccgatgtcatcctgacctacttcgcccgtcacgccgccgcggtgctgtgcggcatggggcccaagtaggaggcgaggcccgcccgccattcctgccctgcactgtcattgtggagttgagcgatgagttggcttatcgtatgttttgggggcctggcactggcagaggattgtccgaggccttggatctcttccaataatctgcgccgggagataataagttttggagttatcgcatttcccggtactaatcttctgcgtgttgctagtactgaaaaaggtttggattttgaagcgattttagac

SEQ ID NO: 130800 - DNA, 1494 bp, Zea Mays
ttttccttttttttttttttttttttgccccaacccacctcgttcggtcgcttttctttgctagtggaagtggattggttgattgatcgcacagaagaagaattcacacccacacacacagaccgagctgccgtccgctgctctctccacccctcctctcctcgcggaacaggcaggcaggcaggctgggattccccgtccgcggggggaggtggcattcgccgctagggcaggacggggaaggctggcgtccggcatggcgaccgaggaggtactccataaggtccagagtcttatattgcgctgccttcagatgtacatggaccagaaagaagtggtcgatgccctctcccaccactcgaagatagagccctgcattactgaacttgtttggcgacaacttgagcatcaaaatcctctgtttttcaaggcgtactatatgagactaatgcttaagaatcaaataatggtcttcaacaagcttcttcaggatcagtttgaggttatcaataaagaattttcttcagggatcccttctatgtcgcttcctaatggctctaactccaacctattgaagcaaaatccatgctttttgccagagactgctcctggatctgcaatgccagatggtataatgcacaatggaagttcgcgtggtataataaatggcacaccatctggcgatcaattgctcaatgctagtaaagacttgcatggccttcataatggaatagatgcttcgactagtctgcagtcagaccagaacgcagctgctgtgctgtatggtgtagacaacgagacaagtgcaacgataaagaccgagtcttgctattcgagcaatgctgattttgctttctgtgggaatactttcctggaatcgtgccagtcaataggcgatgcatctggtggtggatccttcagtagctcagagctgaacgggcaaccactaaacgattcaattctggatatggaatcatcgtcatttagcttcttgaaccaaatgccccaaagcttcatctttccggacttgggagacgatttcaaccaaagtgcagagataacacaatttctcaccccggaaacaaatttctccgattcgacagggggagaccatacagcaggttgagcggggtcatgcacagcgcaccaaccatttgtacatacgctcatgggcagtcaaacctgcactgatgaagagcttgaggaccttttgatctagctgtttcttttttctactcttctcgtcttatattgtggtagtttatgggttggtcttctggtatgccctgcgatggcgtcgttatcgtgccttgtacattgccgtgcttgtgtaagaaacattaggagcggcgttgttcgcgtcagcattgatttggctaattcctccgcttggcttggcttgtacaacgaattttatcaaaatattaactggattctgaaatcgagattttcgaccatcggtttgtgctattgtgtatgctgcttccaactatc

SEQ ID NO: 130801 - DNA, 1491 bp, Zea Mays
ttttccttttttttttttttttttttgccccaacccacctcgttcggtcgcttttctttgctagtggaagtggattggttgattgatcgcacagaagaagaattcacacccacacacacagaccgagctgccgtccgctgctctctccacccctcctctcctcgcggaacaggcaggcaggcaggctgggattccccgtccgcggggggaggtggcattcgccgctagggcaggacggggaaggctggcgtccggcatggcgaccgaggaggtactccataaggtccagagtcttatattgcgctgccttcagatgtacatggaccagaaagaagtggtcgatgccctctcccaccactcgaagatagagccctgcattactgaacttgtttggcgacaacttgagcatcaaaatcctctgtttttcaaggcgtactatatgagactaatgcttaagaatcaaataatggtcttcaacaagcttcttcaggatcagtttgaggttatcaataaagaattttcttcagggatcccttctatgtcgcttcctaatggctctaactccaacctattgaagcaaaatccatgctttttgccagagactgctcctggatctgcaatgccagatggtataatgcacaatggaagttcgcgtggtataataaatggcacaccatctggcgatcaattgctcaatgctagtaaagacttgcatggccttcataatggaatagatgcttcgactagtctgcagtcagaccagaacgcagctgctgtgctgtatggtgtagacaacgagacaagtgcaacgataaagaccgagtcttgctattcgagcaatgctgattttgctttctgtgggaatactttcctggaatcgtgccagtcaataggcgatgcatctggtggtggatccttcagtagctcagagctgaacgggcaaccactaaacgattcaattctggatatggaatcatcgtcatttagcttcttgaaccaaatgccccaaagcttcatctttccggacttgggagacgatttcaaccaaagtgcagagataacacaatttctcaccccggaaacaaatttctccgattcgacagggggagaccatacaggttgagcggggtcatgcacagcgcaccaaccatttgtacatacgctcatgggcagtcaaacctgcactgatgaagagcttgaggaccttttgatctagctgtttcttttttctactcttctcgtcttatattgtggtagtttatgggttggtcttctggtatgccctgcgatggcgtcgttatcgtgccttgtacattgccgtgcttgtgtaagaaacattaggagcggcgttgttcgcgtcagcattgatttggctaattcctccgcttggcttggcttgtacaacgaattttatcaaaatattaactggattctgaaatcgagattttcgaccatcggtttgtgctattgtgtatgctgcttccaactatc

SEQ ID NO: 130802 - DNA, 885 bp, Zea Mays
ttttccttttttttttttttttttttgccccaacccacctcgttcggtcgcttttctttgctagtggaagtggattggttgattgatcgcacagaagaagaattcacacccacacacacagaccgagctgccgtccgctgctctctccacccctcctctcctcgcggaacaggcaggcaggcaggctgggattccccgtccgcggggggaggtggcattcgccgctagggcaggacggggaaggctggcgtccggcatggcgaccgaggaggtactccataaggtcagtcccgaattcacgtctctctctctcgagggcatacgactaggttgatcgcattttttcccattcattcctagtcttagtctgtgtgggctcgtcacttcgctaccagctcgtttccatccacgcggatttgattgctcctgttcgttcctttgcgatcttgctctgctctgctctgctcccgggctctgctgattgctggtaggtaccgactcgtgcatcctccggctgccttctgcgcccatgttcaaattggtagttctagggtttcggaggaaaacaccagctgtacctgttctcatccacatatctgcgaatggacggtggcatctggttggtgtacatttccaggtacttcttgtggaagaaccccgctttggaaagaaccatgctgtatgtccctgtccaccaaactgaccaccagcttccgtatcggtatgcatcttcagtgcttctctgcagaagaaacaacaactccggttaagatttgtttttttttttaattttttttacatatacccttcaacatgttcaccacaagcgcgcaacgaactctgtgagcaccacaagcgcttgtggtgctcacagagtcacaggca

SEQ ID NO: 130803 - DNA, 1027 bp, Zea Mays
ggcggaaccaaagccggcccacgctgctcgcctgctccggcgaccgccctccgcctccgccctgagtgacatcccctgcgaccagccgctcgccggcggtgttcgcgcttcgccggcacgccggcgtgcgccctcgtgtgccgtggctgctgcgtgccttgtccaccgaggtgactggtgagatctcgctcttcctttatcctcgcctcctcggtccaagtaggagtcggcggctatggcgacgacggccgcggggtacggctgttgcttggcggggctaccgccctttccgttgttgcctgggatcctctcgacccgcctgcgccgggagccttctcctcctcgcgtggcccttgtggcctcctccccgaagctcagggcgccggcaccgcggttgagagtttcgtgcggtccaaggaggctcgcttcctcctctggcaaggccaattcggacgcggtgccgtcgccaacggaagccactattgatataaagcttcctagaagaagtttgcttgttcaatttacatgcaatgcatgtggtgaaaggaccaagcgcttgataaatagagtagcctatgaaagagggacaatttttcttcagtgtgcagggtgccaggtgtaccacaagtttgttgataatcttggtctagttgttgagtatgatctacgagaggaaaatgtggtacaaggagaaaatgtgattgatactaattctgaagattgatctgttgtgagaagcagtgttggtatgcaaaacatcctgttgtagcctgttgtctgaatgtctgtaggttttgacaatattgattatttatataaaatgacattttagttgctgcatatactcatctgaatacatgggggcctagatgtattttatagtgtgatatatggttttatgaaggaaacaaaggatcacgatactagagtaccctgcatttccaaaaaagacctgtcattaatatgggaccaatacatttttagcagattattctggctcttgtgatatggtactaatatttgatat

SEQ ID NO: 130804 - DNA, 1969 bp, Zea Mays
ctccacggccactactgcgcgaccgccctgcctgcctgcctcgctgtgccccgcgattaacaatgcatttgtttaattacgccctgctcgtctactcataattaatcgcaccgtactgcttctccggccggtcgatcggccggcctccccccccccccccccccccccctgcttcaaaaggtagtgttccgtcggccatgtgtgccgccaccgctgccgccgccgccgtcgtcagggtctggtgatcaggtcagggcgtcaggcacatcgtagtggcgctgcggtttggtttgtatgcatggttgaaaagctgccagtcctggtggtggagcagcagcagcagcagaagaagaagaagcagaagaagagtcggagatgaagccgccggcgccgaggagcaagaagagcaggcccgccttctgcagcctaccgctgctgctcctcatcggcgccatccagttcctggtcatctactcccccgccatcgaccgctacatggtcatggtgaccaaaggcaagcccgggttcccgtcgctgctgctggacggcaggagagggttcaagctggtggaggaggagaccgtcccggagccgcgcgtgcggtgcgacttcgcggacccgaggtcggacgtgtgcgagctggaaggcgccatccgcgtgcgcggcagcacgtcggaggtgttcgtgctggcgcccgcccgcgccgacggcctggcggcgaacgtgacggggctggcgccggggacgacgagctggacggtccagccgtacacgcgcaagggcgaggcgcgcgtgatgcggggcatctcgacgctgacggtgcgcgtggtgcccgccggcgccgcgccgccgtgcacggtgcggcacgacgttcccgccgtggtgtactccaacggcggctactgcggcaactactaccacgacttcaacgacaacatcatcccgctgttcgtgacggcgcgccacctgggcggcgaggtgcagctgctggtggcgcagaagcaggcgtggtggttcggcaagtacagggagatcgtggacgggctgaccaactacgaggcggtggacctgggcgccgacgcggagggggaggtgcgctgcttccgcgccgccacgctggggctgcgcagccacaaggacctcagcatcgacccgcgccgcgcgccgcggaacctgtccatggtcgacttcaagcgcttcctcatgtggcgatacgcgctgccgcgggagcacgccatccggacggacgaggaggaggccgggcccgggcccgggcgggcgaggacgaggccccggctgctggtcgtggcccggcgctcgcggcggcggttcgtcaacctcccggagatcgtggcgctggcggaggaagtcggcttcgacgtgacggcgtcggacctgatgtcggggacggcgtccaagagcaagagcggcgccggggacgaagggcactcgcgcatggcggacgcgtccaagctggtgaactcgttcgacgcgatggtggcggtgcacgggtccgggctcaccaacctggtgttcctgcccatgaacgcggtggtggtgcaggtggtgccgctggggcggatggagggcctggccatggacgagtacggggtgccgccgcgggacatgaacatgcgctacctccagtacaacatcacggcggaggagagcacgctgtcggaggtgtacccgagggcgcaccccgtgctgatggaccccatgcccatccacgagcagagctggacgctcgtcaaggacgtctacctcggcaagcaggacgtcaggctcgacgtccgccgcttcaggcccgtcctcctcaaggccatccagctgctccgctgacctattaactcacgttgatcgggcctcgccccaccgccggccggccagcctgatgccctgatccgatgaccaccaatgtacaatctccactccagtatgcgattgaggtagatgacatgtgacgata

SEQ ID NO: 130805 - DNA, 270 bp, Zea Mays
atggcgcgctcgttgacgaagcggcgcgagctcttgcgcgagatgatgaggaggcggggccggtcccggcgccggggcgcccccgaccgcgacgcgacggcgcgctccagccggaacgcgcggcggagcaggcgcttgaagtcggccaccgtgacgccgccgggcgagcgcgaggggtcgatgcccatggcgcggtggaaggtggagccgatgatgatccgcgggaagcagtgcacctcgcggtcgttgttcacgtcgatgacgtcgtag

SEQ ID NO: 130806 - DNA, 2515 bp, Zea Mays
atgatggaaaggctttcagcgctggttcttgatggtgacccagcgtccttgtcgaccatctctgagacgcttgcaaagttcaacttcagagttgtttccttccaaacagcagaagcggccctggatttcattaaatgtggggctgctaaagcagcggaccttgatttggtgttggtggaggttaatcttaacaatatggcaccaggcacttcagcaaaccctgatctgttccatcacatactgaatgaacttcaagtccctcttaccgcaatgtgttctcgtgacgatgaagaggcactttccaaatgtatgaacctgggtgcatgcttccatctgctgaagccactgaacagaagaagcttcagcattctgtggcaccaagcactggaacacaagtctaaaaaggcagcacctcaaagaccaagtcttaatgatagtaccaaaaatagaatggtttcaccatctactgaaaaacccaaggaagtccttattctagagagaaacaatttatctgttcctcaaagcaatggatatgaagagccaaagaagcagaatcgggtcacatggaccattgaactccatgaaaagttcttggaggctgtcgaagctcttggggggaacaagtctgctagacctgagaagatcctgcacctgatgaatgtaaagggtttgactgtgaagcatataggcagccatctccagaaacatcgattgcgcaaccagaatacaaaacaaggacagcgccaagagaatgccagcagaaaacctatatcaaggcaaggtgaagccacttctgaatccatcacacccagagttgagacagacggggaagtgtacccctcaaggctgtggacaaaggtgaagaaaaggtcagtagacacatcggctctgaagactggcatgcacacatgcacatctggaaacgacaatgagggcacagagtctgtgtgggataggtatgaaaataacctgcaagtgttcgctgagaacaagaaacgttggatgttcacgagcgaacatcagtggcctcggagaaacaatattgataccacagacgaaggggatccaaatgaagcccccgaaactgctgctggtgcatccatagaaatctttggttcaagcagcttaataagtgatcaagtgggagagaaaaatcgtgttgaatctgacagagacaataacaccgtgtggagcactgatttactagaaggttatggtgcatccatagaaagctctggttcaagcagcctgttagcaaatgatcaagtgggagagaacaatcattctgaagctgccagagccaatgacagcatggggaacattactttgcttgaagaaatagcttacggtggtgcatacataggaacctctggttcaggcagcctgttaacaggcgatctagtcaggcagaacggttgtgctgaagctaccagacacaatgacaatttgtggggcgttaatctacctcaaggttatggcgcattcacagaaatctctggttcgagcaacatgttaacgagttatcaagtgggagagaacaatggcactgaatttgccagagacaatggccacatggagaacattagtttgctcgaagtttatggtgcatccatagaaaacgctggttcaagcagcatgttaacaagtgatcaagtcggacaaagcaatcttaccgaagctgacagaatctatgacaccatggggagcattaattaccttgaaggtaccgtggacccggagtacattgcaccaatggattattctgttgcttgggcgcacctagagggcaatggtccggacctgagaagcccttctgatggccgggaggaagcatattcattttggatgagtcagctggcaggaccacaagactatcaaagccttggcccggagggtttccttcaagtaggtgacgacgcatataacgatgctctgagatcggttggtctggttaacgtggatgaacaagcgactcaaggatggcaagagcagcaaagcctcagcatggaagatctcctgcaggtagatgacgttgcatgggatgacactctgatatctatggggcttatcaacttgttagatgaaccaatggctgaagaggccgccattggaggatcacaaggtcagcaaagcctcgccccggaggtcctccaagcaggtgacaatgcgtacggtgatgatcttgggtcgattgagatggtcaacttgttaaacgaaccaatgactcaagaagccgctattgccgatgctctggtggacgatcctatgaccctgattgcccaagacgatgtgccgtgggcttggagtcctgcagtgccgggtgactatggcattgattggatccaggatcctaacgcagaactgtatgggtaaaagatcgatgaccgagccgtggttgcgtacaagaatcggaccgggtggaagagaggtgtgagacagccttgagtccagtcaaaaataattgacttgcttactttattctaaaactgtttttggatggatttattctctttta

SEQ ID NO: 130807 - DNA, 503 bp, Zea Mays
agccctcgtccgcgcctgctcttttgcgcaaagaccctagccgctcaaaaaaatccaacacgcatccttgccactattggctcctctcactgaccacttcacccaaacccctcaacttctctccttttacaaagtctcgaccccgacatggtcgcgcgagctccggcaaaccagcgtttgattaatctgggcggtgcaacgtaatcgacgacaacagcatccccgcgacctccgaaccatggcggacccgggcatgggcgtgaactcactgcgaggacaccacaacccggtcaccgacggcggaaaacgcagcagacgagctcgatctcgcggccaccgtgtggtagaactccaatcaaaggcgtggagagtatcactgatctaccatggccatggtgcatgcaagaatccgagcggagatgacgtgagctgaggggtcggcgtggagactgtccccggcgctgaacggaggcgtcgtgaccccgttccaagcaacacacaac

SEQ ID NO: 130808 - DNA, 458 bp, Zea Mays
cttggatagaggaagctaatctgttctccgcctttcatgtactcctccagcatctgtggatgatactccaaaatctgctcgcgtattatagacaaataataataattctcaagcacggtgactacacttgtttacacaaacaggaaaatagattagaagctattgctcattacctctcgatagatcagttctctaacatcatctttggccagcttctttctttcaaattcaaactcaagtttagaaatcgggtgtcttgatggctcacgttccacattagcaagggatgcaaagtatggatcagctagagcctgaagccggtctttaggatcaaatgcaagcaaacgctctagaagacgaagagccaaaggatcagcatgtcgaaatttatgagtaaagggcacgggatattttttccgcatgcagctcaaatatctcctggccttctcatttcgaat

SEQ ID NO: 130809 - DNA, 2788 bp, Zea Mays
atgtgggctcgggacatgcggggtctacgtgtcagcgtcccggtcacagaatcacatcttcctggccgccatccgccggacggagcaccggacccgccgtacgcctccgtgctctcgctcgccgaggcctctccgcgggccgcagcgcggttccgcctcggtggccgccggagctgctgcctggccacaagaagccgtcgctctcccagctttgaaccggttccgatccgcaccacggagaagcccccgcctcgggagtctcgcgtcgccccgatgaaggtggagctcgccgcgcagacctcccagacgagcacgcccctgccgccgtcccctgaagccgcttctgcgtcgcccccggcggaggatgcgccgctcctccccgacgcgggcgtgcggcgccgggcggcgtgcgggcggttcgcgcagcgcagcggctccttccgccgcgaagtcggccgggccgccgccgagaccttcctcctcacgaggctcaccctgatcctcctccgctacctcgggataggctacagatggattcggcagttcctagccctctgctgttataccctcttgctgatgccaggttttattcaagttgtatattattatttcttctctagccaagttcatagaagtgttgtatatggagatcagccaagaaacagattggacctgtatatgcccactagtacaacagggttaaagccggtcgttgcgtttgtgactggtggagcgtggatcataggttacaaagggtggggagcccttttaggcagacgcttagcagaaaggggcatcatagttgcatgcattgattacagaaactttcctcaagggactattggtgacatggtagaagatgcttctcaaggaatagcttttgtctgcaagaatataacaagttatggaggtgatcctagcaggatatatcttgttggacaatcagctggtgcacatattgctgcttgtgctctcttaaatcaggccattagagaatccggtgaaggagatacttcctcttggagtgtatcacagctaaaagcttactttggtatttctggcgggtacaacctccttaacttggttgatcattttcatagacgtggcctttaccggtctatctttctcaggttcactgttagtatttgttcatgtcttgtaataaaatcgtgatcctgtgagtgtattatgacttcattttgatcatatccttgcagtatcatggaaggtgaagtatcactccagaaattctctccacaaatgatgattatggagtcatctgctaggtctgcagtttctttattgcctcgcatcatccttttccacggaacaagtgattattcaatacctccagctgaaagccaagcatttgctgatgctttacaacagcaaggcgcaagggcagatctatttctgtacgaagggaagacgcatactgatttgttccttcaggatcctcttcggggcggcagagataaaatgctggaagagatcgcccgtgtgatacacagtgaggatccagacgctgctgcccagcacctcgtcgttgtgcctgttgcaaggcgccttgtacccgagttcatgctgaagcttgctgggagagtaagccctttctgaaggtgcttctaagtttgattgcgaccacgactgactagtatttgtgaattttctttttttatcttaagacaaacatggatgtacatgtacttgtgatcggagaaagtactcataattttctagacaggcaaaatgtgtactgacaacgatatcctcctcctcgtacactgctgacacttcgtacggcacaagccgttgtagaactcaaacataccctagactccattggaagaaaacacctcatggtcgacaggctgaccacacttcatcgtccattctgcttcctccatggacgaactagtgctacatcttagttgaactagctgtgggtgtacacaagatccaaacagtgtgtcgtcggcattacagtgcaccagacagaaatcttgtgtcgagattgctgtcgccatggacagtcctgccttaggagtgcatcctggagaccttttcagacaatccatcgacggtgccttccatctcctcaggtattccatcatcctagcagagaaaccaaacatgagtgacagatgcactacctaatctctaaataaggtgaacaaaggaaaaggtacaacttgcatgcaacagatcaatcttagatgtcctttggcacatcctttttcttgatgttgacagtgtgcatgccatcaaaaaaaaacaagaagacaacgacgacgacattggtagtgcacaagttgtgccaccctgcctacttgccacgagttgaattcaggcagttcagcattacctctggctctgggtgtttatttctgacaacgacgcacttggaagcgcttatgcttgcactcttcaggtagctccgagagcttaagcttgtgggtttcacatcatccatgtcagcatcctctgaccttggagggctcacggtagtgcgggcaacagaatctgcgcttctctcctggtcattaatttgttgttcagtattgccatccttggatacaaccactctttccctgccatacacagagacacgcaggatttagcacgaccgagagagagatcaaggcaacgggttctgcgctcctgaatcatgtaccttggtaaggaagcatgctttctttgcagtggggaacctctttctcctttgctgtaatgctcctcaagatgagcgaactgcagtttgaagcggtcgactccgctgcagcaaagg

SEQ ID NO: 130810 - DNA, 1676 bp, Zea Mays
atgtgggctcgggacatgcggggtctacgtgtcagcgtcccggtcacagaatcacatcttcctggccgccatccgccggacggagcaccggacccgccgtacgcctccgtgctctcgctcgccgaggcctctccgcgggccgcagcgcggttccgcctcggtggccgccggagctgctgcctggccacaagaagccgtcgctctcccagctttgaaccggttccgatccgcaccacggagaagcccccgcctcgggagtctcgcgtcgccccgatgaaggtggagctcgccgcgcagacctcccagacgagcacgcccctgccgccgtcccctgaagccgcttctgcgtcgcccccggcggaggatgcgccgctcctccccgacgcgggcgtgcggcgccgggcggcgtgcgggcggttcgcgcagcgcagcggctccttccgccgcgaagtcggccgggccgccgccgagaccttcctcctcacgaggctcaccctgatcctcctccgctacctcgggataggctacagatggattcggcagttcctagccctctgctgttataccctcttgctgatgccaggttttattcaagttgtatattattatttcttctctagccaagttcatagaagtgttgtatatggagatcagccaagaaacagattggacctgtatatgcccactagtacaacagggttaaagccggtcgttgcgtttgtgactggtggagcgtggatcataggttacaaagggtggggagcccttttaggcagacgcttagcagaaaggggcatcatagttgcatgcattgattacagaaactttcctcaagggactattggtgacatggtagaagatgcttctcaaggaatagcttttgtctgcaagaatataacaagttatggaggtgatcctagcaggatatatcttgttggacaatcagctggtgcacatattgctgcttgtgctctcttaaatcaggccattagagaatccggtgaaggagatacttcctcttggagtgtatcacagctaaaagcttactttggtatttctggcgggtacaacctccttaacttggttgatcattttcatagacgtggcctttaccggtctatctttctcagtatcatggaaggtgaagtatcactccagaaattctctccacaaatgatgattatggagtcatctgctaggtctgcagtttctttattgcctcgcatcatccttttccacggaacaagtgattattcaatacctccagctgaaagccaagcatttgctgatgctttacaacagcaaggcgcaagggcagatctatttctgtacgaagggaagacgcatactgatttgttccttcaggatcctcttcggggcggcagagataaaatgctggaagagatcgcccgtgtgatacacagtgaggatccagacgctgctgcccagcacctcgtcgttgtgcctgttgcaaggcgccttgtacccgagttcatgctgaagcttgctgggagagtaagccctttctgaaggtgcttctaagtttgattgcgaccacgactgactagtatttgtgaattttctttttttatcttaagacaaacatggatgtacatgtacttgtgatcggagaaagtactcataattttctagacaggcaaaatgtgtactgacaa

SEQ ID NO: 130811 - DNA, 1534 bp, Zea Mays
atgtgggctcgggacatgcggggtctacgtgtcagcgtcccggtcacagaatcacatcttcctggccgccatccgccggacggagcaccggacccgccgtacgcctccgtgctctcgctcgccgaggcctctccgcgggccgcagcgcggttccgcctcggtggccgccggagctgctgcctggccacaagaagccgtcgctctcccagctttgaaccggttccgatccgcaccacggagaagcccccgcctcgggagtctcgcgtcgccccgatgaaggtggagctcgccgcgcagacctcccagacgagcacgcccctgccgccgtcccctgaagccgcttctgcgtcgcccccggcggaggatgcgccgctcctccccgacgcgggcgtgcggcgccgggcggcgtgcgggcggttcgcgcagcgcagcggctccttccgccgcgaagtcggccgggccgccgccgagaccttcctcctcacgaggctcaccctgatcctcctccgctacctcgggctacagatggattcggcagttcctagccctctgctgttataccctcttgctgatgccaggttttattcaagttgtatattattatttcttctctagccaagttcatagaagtgttgtatatggagatcagccaagaaacagattggacctgtatatgcccactagtacaacagggttaaagccggtcgttgcgtttgtgactggtggagcgtggatcataggttacaaagggtggggagcccttttaggcagacgcttagcagaaaggggcatcatagttgcatgcattgattacagaaactttcctcaagggactattggtgacatggtagaagatgcttctcaaggaatagcttttgtctgcaagaatataacaagttatggaggtgatcctagcaggatatatcttgttggacaatcagctggtgcacatattgctgcttgtgctctcttaaatcaggccattagagaatccggtgaaggagatacttcctcttggagtgtatcacagctaaaagcttactttggtatttctggcgggtacaacctccttaacttggttgatcattttcatagacgtggcctttaccggtctatctttctcagtatcatggaaggtgaagtatcactccagaaattctctccacaaatgatgattatggagtcatctgctaggtctgcagtttctttattgcctcgcatcatccttttccacggaacaagtgattattcaatacctccagctgaaagccaagcatttgctgatgctttacaacagcaaggcgcaagggcagatctatttctgtacgaagggaagacgcatactgatttgttccttcaggatcctcttcggggcggcagagataaaatgctggaagagatcgcccgtgtgatacacagtgaggatccagacgctgctgcccagcacctcgtcgttgtgcctgttgcaaggcgccttgtacccgagttcatgctgaagcttgctgggagagtaagccctttctgaaggtgcttc

SEQ ID NO: 130812 - DNA, 954 bp, Zea Mays
atgttgttcacgcctattgcagaattggatcctaaaagtacaaatgctgcaataagagtgcgtatcattagaaagtgggaattccgaggcgcaacaaatgatgggcctttgcgccatgtcaacctcatcttagctgatgaacagggaacagccatccacgctgagattcaagccgccctagtagctgacaaaggctcactaatccaaattgacaaagtctatgagctcaaacgctttcgtgttgctccatccagaaactattacaaacctgttgacaacagtatgatgatacaattcactctttacactcaagcaaagttagtccaagatccaccacccacctttccaagatacgcctacaaactcacatctttcgaaaatataggcaacaatgttgacaacaaaacgtacttgattgatgttctaggaatcttgacagaaattggatctttacaccatgttggttacaacaactcaaatatcatcagagacatatttctcaaggacataaacaatacctctacaaaagtgacgctttggggacaccaagcatctagcttctctgtcgacaacaactgcgacgagaatgataacaaacctgttgtcgtactatttgttggatgccttgctaaacgattcaaaggagaagcatatctaagtgccacggcagcatgtacatggtatttcaacccagacattcctgaagcccaggtgtattacagcaagttggtaaacactaagcttcaaatgatacgccctgaagcgactgagcaagaattccaggcttctcaaacactcaacatcgaagacaagaccattgaagaactacttcagctagatccggatatgttccctcaacaaggtttcaaatgcactgtcactatatcacgcctcgtacaagatggtagatggtggttcccatcctgtatcaagtgcaacaagtcttcatcctag

SEQ ID NO: 130813 - DNA, 99 bp, Zea Mays
tttttttacgtgatgcagtcctatatacagtacaattccagaaacatagaatacctcatgcgctttcctaatactttcatctctttttttacacgatgc

SEQ ID NO: 130814 - DNA, 280 bp, Zea Mays
atggaacatcaattcagcacgccgtcacatcggcagctcgccgctatctgctatcacaaccttgctcttcggctccccactctgccggccttcagcttcgaccttgtacacaacatccattccagacaacaccttgccaaacaccacatgcttcccgtccaacctaacacacacaaagtaaaaaagcacgaggtaatcagcatagaccttcaacggattaagaaaaaaactttggttatgatacgagaaaatggtgttattgttaccaaagacctgtgaa

SEQ ID NO: 130815 - DNA, 279 bp, Zea Mays
atggaacatcaattcagcacgccgtcacatcggcagctcgccgctatctgctatcacaaccttgctcttcggctccccactctgccggccttcagcttcgaccttgtacacaacatccattccagacaacaccttgccaaacaccacatgcttcccgtccaacctaacacacacaaagtaaaaaagcacgaggtaatcagcatagaccttcaacggattaagaaaaaaactttggttatgatacgagaaaatggtgttattgttaccaaagacctgtga

SEQ ID NO: 130816 - DNA, 1491 bp, Zea Mays
ttctccagcgaccaaccacacccaaaggcccaagtaaacgccagagaggagaggagaggagaggagtggagagcagaggagagcagcagccagccagcagcagcagccgagagcccaaccccaactccacaagcaaagatgctgtcgtcttccacctccaccctccgcctccaccaaccaacccgaccccaccggcgccacccgccggccccggccttgggggtcgccacccacctggcctccccgcggcggtggcgcggacacgccccgggggcgggggcgcccctccgcgcgcggccccagcgcatccgcgcggtggacgccgcccagccgttcgactacgagtcccgcgcggcggggctgctggaggagcggcagcggctgaagatcgccatcgtcgggttcggcaacttcgggcagttcctggcgcgcacgttcgcgcggcaggggcacacgctgctggcgcactcgcggacggaccacacggcgctggcgacgacgctgggggccaccttcttcgcggacccgcacgacctgtgcgagtgccacccggacgtggtgctcctggccacctccatcctgtcggccgaggccgtgctgcgctcgctccccgtgcaccgcctccgccgcaacacgctcttcgtggacgtgctgtccgtgaaggagttccccaagaacctgctgctcagctccctgccccccgactttgacgtcatctgcacgcaccccatgttcgggccggagtcggcgcgcgacggctgggacggcctgcccttcgtgttcgaccgggtccgcgtcggggactgccccgcgcgccgcgcccgcgccgacgccttcctcaacatcttcgagcgcgagggctgccggatggtggagatgtcctgcgccgagcacgacgcgcacgccgccgagacccagttcctgacgcacaccgtggggcggatgctcgccatgctggagctgcgctccacgcccatcaacaccaagggctacgagacgctgctccgcctcgtggacaacacctgcagcgacagcttcgacctctacaacggcctcttcatgtacaacaagaactccaccgagctgctcaaccgcctcgagtgggccatggactccgtcaagaagaggctcttcgacggcctccacgacgtgcttcggaagcagctcttcgaggggtccccgcacgcccccgacgtctcctcctccaacgtccgcaagtagacacggccgccgccgggggggggggggggggttcgtctcgcccccaatctcatcatcatctgttgttagtaataaattaaattccagttccaattctccttgccattgtatttgtagtaccagcctgtatctgtattctccgtttctcctcccaactccctcctgtcagttcagttttacagttgagggatgaaatgtggcagcttggcattgcaatttgtgacaaacaaactgaataaataagcaatctttggcattgcaagtctgtaa

SEQ ID NO: 130817 - DNA, 2770 bp, Zea Mays
tcatcattctgtttccactcatgaagaattgatgtcatcagtatccaatttgttttgtaagttcagatggaggtaatgaaagctgtgagttttatgtacgtgcgcccaccgggatacaatgcagagagtgcaaaagctgctgaaattgaagatgagaagaagaggtcggatccaggtgacatgggtactgcatctgcaagtacctcttcaatacctgacaagggacctgaaaaggctaaatcaggcgcagataagaaaaataggccaaaagatgtttttggtcggccattggcaacagaacaagaatttgaagttctcaagaatgctccaaggttagacacaggtgctcctgcaagggtcaaaccatttggagttgaagttcgtaatgttagatgtttaaggtgtggaaactatggtcaccaaagtggtgaccgggaatgtcccttgaaggatgcaatcatgcctaacgaggagagtcggttgaaaagagacgatccacttacaactataatggcgcagacggattcaagtgagcctctgaagtgggaacttaagcagaaaccaggcatgagccctcctcgtggtggatttgacccagatgatcctaatcagcagattgtggcagaagacatctttgatgaatatggaggttttctgggcaactgtgatatcccagctctcatttccaatttttctgctaccaaatccaagaaacgttccaagaagaaaagcaagcacaagcaggctaagtctgctattcatgaggactctggtagacatgaaagcagttaccatctatcatcggactttgacaatgagaagagaaacataacatcaagaagcaagagaaagaaagcaaactgttctgattcatcatattctgattccgagatagatgctagaaaaggcaagagcaagtcaaagcataagcatacgaagaaataccagttaaagtcttctgattcagaatttgatgtccgtgaagatacaaggcggcgtctgaagagagaccacatgaaggagaaaagagatgagtcaccattgccgttctctaaggatcaaggagacacagaaggcaagaggcattcaaggtgttcaagggagaagcacaactacagttattcatcgagttcttctgagagaggcaggcggcgttcgagggagaaacgtcactacagttattcaccaagttcttctgagagaggcaggcattctctacggcacaaggagaaacaatattacagtgactcaagttctgatcggagccatcgacactcgagaagatcgagggagaagagacatgatagagactcaagttctcctgatgccatcaggcgctcaagtagatcgacggagaaacagcgccgtcctgatacaagcccacgtcatgccaacgggcattcaaagaaatcaagtggcaagcaagactatactgagcgtagccgttacgaaaccagtagacattcaaggagatctcaggagaaacggcactaccctgattctagcgcctctgattactcggactctgatcagcacaaaaaacatcgccaccatccagcagcagccgagagcccaaccccaactccacaagcaaagatgctgtcgtcttccacctccaccctccgcctccaccaaccaacccgaccccaccggcgccacccgccggccccggccttgggggtcgccacccacctggcctccccgcggcggtggcgcggacacgccccgggggcgggggcgcccctccgcgcgcggccccagcgcatccgcgcggtggacgccgcccagccgttcgactacgagtcccgcgcggcggggctgctggaggagcggcagcggctgaagatcgccatcgtcgggttcggcaacttcgggcagttcctggcgcgcacgttcgcgcggcaggggcacacgctgctggcgcactcgcggacggaccacacggcgctggcgacgacgctgggggccaccttcttcgcggacccgcacgacctgtgcgagtgccacccggacgtggtgctcctggccacctccatcctgtcggccgaggccgtgctgcgctcgctccccgtgcaccgcctccgccgcaacacgctcttcgtggacgtgctgtccgtgaaggagttccccaagaacctgctgctcagctccctgccccccgactttgacgtcatctgcacgcaccccatgttcgggccggagtcggcgcgcgacggctgggacggcctgcccttcgtgttcgaccgggtccgcgtcggggactgccccgcgcgccgcgcccgcgccgacgccttcctcaacatcttcgagcgcgagggctgccggatggtggagatgtcctgcgccgagcacgacgcgcacgccgccgagacccagttcctgacgcacaccgtggggcggatgctcgccatgctggagctgcgctccacgcccatcaacaccaagggctacgagacgctgctccgcctcgtggacaacacctgcagcgacagcttcgacctctacaacggcctcttcatgtacaacaagaactccaccgagctgctcaaccgcctcgagtgggccatggactccgtcaagaagaggctcttcgacggcctccacgacgtgcttcggaagcagctcttcgaggggtccccgcacgcccccgacgtctcctcctccaacgtccgcaagtagacacggccgccgccgggggggggggggggggttcgtctcgcccccaatctcatcatcatctgttgttagtaataaattaaattccagttcc

SEQ ID NO: 130818 - DNA, 2109 bp, Zea Mays
tcatcattctgtttccactcatgaagaattgatgtcatcagtatccaatttgttttgtaagttcagatggaggtaatgaaagctgtgagttttatgtacgtgcgcccaccgggatacaatgcagagagtgcaaaagctgctgaaattgaagatgagaagaagaggtcggatccaggtgacatgggtactgcatctgcaagtacctcttcaatacctgacaagggacctgaaaaggctaaatcaggcgcagataagaaaaataggccaaaagatgtttttggtcggccattggcaacagaacaagaatttgaagttctcaagaatgctccaaggttagacacaggtgctcctgcaagggtcaaaccatttggagttgaagttcgtaatgttagatgtttaaggtgtggaaactatggtcaccaaagtggtgaccgggaatgtcccttgaaggatgcaatcatgcctaacgaggagagtcggttgaaaagagacgatccacttacaactataatggcgcagacggattcaagtgagcctctgaagtgggaacttaagcagaaaccaggcatgagccctcctcgtggtggatttgacccagatgatcctaatcagcagattgtggcagaagacatctttgatgaatatggaggttttctgggcaactgtgatatcccagctctcatttccaatttttctgctaccaaatccaagaaacgttccaagaagaaaagcaagcacaagcaggctaagtctgctattcatgaggactctggtagacatgaaagcagttaccatctatcatcggactttgacaatgagaagagaaacataacatcaagaagcaagagaaagaaagcaaactgttctgattcatcatattctgattccgagatagatgctagaaaaggcaagagcaagtcaaagcataagcatacgaagaaataccagttaaagtcttctgattcagaatttgatgtccgtgaagatacaaggcggcgtctgaagagagaccacatgaaggagaaaagagatgagtcaccattgccgttctctaaggatcaaggagacacagaaggcaagaggcattcaaggtgttcaagggagaagcacaactacagttattcatcgagttcttctgagagaggcaggcggcgttcgagggagaaacgtcactacagttattcaccaagttcttctgagagaggcaggcattctctacggcacaaggagaaacaatattacagtgactcaagttctgatcggagccatcgacactcgagaagatcgagggagaagagacatgatagagactcaagttctcctgatgccatcaggcgctcaagtagatcgacggagaaacagcgccgtcctgatacaagcccacgtcatgccaacgggcattcaaagaaatcaagtggcaagcaagactatactgagcgtagccgttacgaaaccagtagacattcaaggagatctcaggagaaacggcactaccctgattctagcgcctctgattactcggactctgatcagcacaaaaaacatcgccaccatcataggagaaaatgaactggcagtgtataaggtaaaatgccctatctgaagtagtgatatttatatatctggggaccgctctggatgtgacgcattaagggtaccttgtccctttcttgagatcaccagaatccgcctggagtcttgtgctcggtggctgatctcagggctttgtgatgttattacagtaatgtacacggtgtaacagagtttcttcatactgggagaatggttgtttgggtcttcaaacggttgtgttgttgtagaacgtggtggggggcgtaacgtcacgggctgtttagttctgtgcctgagctagccttctgatctactgtggactcactaataagcttcatgtgaaatgtgtagcacttgtacgcaagagtgcttcccaaatgccaggacttcattgtttatggctccaacattgaacgttttatcttttcttagctgttttagaagttgtaacgtccttactaaggctgtatgcatggaagtgcaaaagactggaacttgtttccattatagaaaaaaaatgacaggacttcagaaaca

SEQ ID NO: 130819 - DNA, 2266 bp, Zea Mays
gataggggtctttcggtaatttttcgaggagttggggagggagggattcgaccggcggcgatcgggataggcggaggccggcgagagcgatggaggaggaggtgacggggagcggcgggggaattgggcggaagatggcagcgggggaggtggatcttaaggagaaatcggggacggcgtggagccactcgtacctcaaccagaagccgtggcacccgctctcgtacccgaaccagcgccgcaagtggatcgccgagcaggtccacgccaatcacgcgcgccgccaggaggaggtgcagcgggagttcgcacaggaacaggagttcttccggcagaccgcactcttctctaagaaggacaaggagaagatggaggtaatgaaagctgtgagttttatgtacgtgcgcccaccgggatacaatgcagagagtgcaaaagctgctgaaattgaagatgagaagaagaggtcggatccaggtgacatgggtactgcatctgcaagtacctcttcaatacctgacaagggacctgaaaaggctaaatcaggcgcagataagaaaaataggccaaaagatgtttttggtcggccattggcaacagaacaagaatttgaagttctcaagaatgctccaaggttagacacaggtgctcctgcaagggtcaaaccatttggagttgaagttcgtaatgttagatgtttaaggtgtggaaactatggtcaccaaagtggtgaccgggaatgtcccttgaaggatgcaatcatgcctaacgaggagagtcggttgaaaagagacgatccacttacaactataatggcgcagacggattcaagtgagcctctgaagtgggaacttaagcagaaaccaggcatgagccctcctcgtggtggatttgacccagatgatcctaatcagcagattgtggcagaagacatctttgatgaatatggaggttttctgggcaactgtgatatcccagctctcatttccaatttttctgctaccaaatccaagaaacgttccaagaagaaaagcaagcacaagcaggctaagtctgctattcatgaggactctggtagacatgaaagcagttaccatctatcatcggactttgacaatgagaagagaaacataacatcaagaagcaagagaaagaaagcaaactgttctgattcatcatattctgattccgagatagatgctagaaaaggcaagagcaagtcaaagcataagcatacgaagaaataccagttaaagtcttctgattcagaatttgatgtccgtgaagatacaaggcggcgtctgaagagagaccacatgaaggagaaaagagatgagtcaccattgccgttctctaaggatcaaggagacacagaaggcaagaggcattcaaggtgttcaagggagaagcacaactacagttattcatcgagttcttctgagagaggcaggcggcgttcgagggagaaacgtcactacagttattcaccaagttcttctgagagaggcaggcattctctacggcacaaggagaaacaatattacagtgactcaagttctgatcggagccatcgacactcgagaagatcgagggagaagagacatgatagagactcaagttctcctgatgccatcaggcgctcaagtagatcgacggagaaacagcgccgtcctgatacaagcccacgtcatgccaacgggcattcaaagaaatcaagtggcaagcaagactatactgagcgtagccgttacgaaaccagtagacattcaaggagatctcaggagaaacggcactaccctgattctagcgcctctgattactcggactctgatcagcacaaaaaacatcgccaccatcataggagaaaatgaactggcagtgtataaggtaaaatgccctatctgaagtagtgatatttatatatctggggaccgctctggatgtgacgcattaagggtaccttgtccctttcttgagatcaccagaatccgcctggagtcttgtgctcggtggctgatctcagggctttgtgatgttattacagtaatgtacacggtgtaacagagtttcttcatactgggagaatggttgtttgggtcttcaaacggttgtgttgttgtagaacgtggtggggggcgtaacgtcacgggctgtttagttctgtgcctgagctagccttctgatctactgtggactcactaataagcttcatgtgaaatgtgtagcacttgtacgcaagagtgcttcccaaatgccaggacttcat

SEQ ID NO: 130820 - DNA, 510 bp, Zea Mays
atggagaaccaccgcaacttgagggacttcttatcccaaggttgctcttcatcgacgtccaggaaccgcactggtcatgaagctcccgaggacgacgacttcgtcaccttctcgcagtcgtcgtttgctctgccaccacgcatcaatgtcccagcacttcacagccgcattgaagctcttgatctgaactcccagtcccaggataccgattttctatatctctcatcctaccaagatgttctccagtcaggtgatggtggatccgacctagatttgtctcctcttggtcatggtagatcaacgcacacactatttcaatccgccagatccagttctgctcctatttctcatgcccgaggtgcatttcgaggttgccgtggagttagggggagaggcactagtagtcgtggtggaggtcgatatgctatttctgcacctattgaccctgtcctcattgaagattttgagatgaaccaaccaatgaaatggattctcgtgctccagtggtaa

SEQ ID NO: 130821 - DNA, 246 bp, Zea Mays
atggccattctgtcgagaactgtcgttgtgttcatgttgcttctcagcaccgtcttcttcttcgtgcagctcgccgcgccagctcatgccaggaagctgggaacgagcagggcgcctgtcagcggcgtgcgtcctccatgcaccccaaggactgctccgcaggaggctgctgctactgctacccagaccgagtctaccactccaggacacagccccagcattggccacaacactcccccgaactga

SEQ ID NO: 130822 - DNA, 1278 bp, Zea Mays
tcgccgtcggtgttcgcgcccgaccgcacggtgcaccgaacgtggcgctccacttgtcgcgctctccggactccgtcgccgggcgggcgccgcctacttaaccgccccggccgcgagcggggtcgggagaagacggttcgagtccgttctagaatctagacacggcaatgaagcccaggcctctcggttgcggttgcggttgcgtcccggcggcggtagggtgcgtcggctgggcatggaggccgactccgaggccgcgcgggggagggagggcagcaggggtgtcgcccaagtgctcgcactcggcggcggcggcgggagcggtacagtcggaggaccgccgccgcgaggtgctgtaccgcccggtggagctgcccgggacggggtacgggtctgagctggaggcgcggatcgagaaggtcatctacgcctgccgcttcatgaccttcttcggcatttgtggcttgctcctcggctctgtcccatgcttcctcaagggatgcgttttcgtgatggatgccttcgtcgagtactaccggcacggcgcagggaaggtcatcctcctgctggtggaagccattgagatgtttctcattgcaacggtcacgtttgtcttggggacgggcttgtacgagctcttcatcagtaacatggactccttttacgggtccaacctcttcggcctgttcagccttccggaacggcccaagtgggttgaaatcaagtcggtgaatgatctcaagacaaagctgggccatgtcattgtcatggttctgctggttggcatcttcgagaagagcaagagggtgaccatcacatcctgtgctgacctcttgtgctttgctggatcgattttcctgtcttcagtttgcctctacctgctttccaagctccataccaccaagggaggcagccaggcctgagatgagagtgtttgtatgtaagtgatatgtctgttctgttgctgtgcaacgcctgcctccggttctgttcgtgtagtaaataattaggcagtggggaggtaccgatttcccatgtactcatgttcatgtatggctagggagtttcagttaggcacaaccacactacattgagtatcatcctgtatgtgtagctcgatgtaatgcaatcaataactgatattctctttgagtaagcttattttcagttttgttttaagtatgggtgtttttgaagagaccttcactacataaaggaaaaaaagactggttgattggaaagaactgcacatattgatgtcttctgatctgttttatg

SEQ ID NO: 130823 - DNA, 1316 bp, Zea Mays
cgcgggtgtgtggcggcaggaattcgcgggaggaatggctggccggcgggagcccagatcaccctcaatcatgcttcgaccaggccaaagaagacggaattatctccgtcgccatccaccactcacaaccggaccgggggctgatgagatgaacgggaacgggtgcccctcgcctccgccgacgtggactcgctgcctgccccgcaaggcccccaggcctctcggttgcggttgcggttgcgtcccggcggcggtagggtgcgtcggctgggcatggaggccgactccgaggccgcgcgggggagggagggcagcaggggtgtcgcccaagtgctcgcactcggcggcggcggcgggagcggtacagtcggaggaccgccgccgcgaggtgctgtaccgcccggtggagctgcccgggacggggtacgggtctgagctggaggcgcggatcgagaaggtcatctacgcctgccgcttcatgaccttcttcggcatttgtggcttgctcctcggctctgtcccatgcttcctcaagggatgcgttttcgtgatggatgccttcgtcgagtactaccggcacggcgcagggaaggtcatcctcctgctggtggaagccattgagatgtttctcattgcaacggtcacgtttgtcttggggacgggcttgtacgagctcttcatcagtaacatggactccttttacgggtccaacctcttcggcctgttcagccttccggaacggcccaagtgggttgaaatcaagtcggtgaatgatctcaagacaaagctgggccatgtcattgtcatggttctgctggttggcatcttcgagaagagcaagagggtgaccatcacatcctgtgctgacctcttgtgctttgctggatcgattttcctgtcttcagtttgcctctacctgctttccaagctccataccaccaagggaggcagccaggcctgagatgagagtgtttgtatgtaagtgatatgtctgttctgttgctgtgcaacgcctgcctccggttctgttcgtgtagtaaataattaggcagtggggaggtaccgatttcccatgtactcatgttcatgtatggctagggagtttcagttaggcacaaccacactacattgagtatcatcctgtatgtgtagctcgatgtaatgcaatcaataactgatattctctttgagtaagcttattttcagttttgttttaagtatgggtgtttttgaagagaccttcactacataaaggaaaaaaagactggttgattggaaagaactgcacatattgatgtcttctgatctgttttatg

SEQ ID NO: 130824 - DNA, 1007 bp, Zea Mays
atcccttccagttccacccgggcatcgccggcacggcggcgccggagcgagcagcaatggacgggagcgcagagccagcccacggcgcccctcatgccgctgcctctccgacaggcggcgaggtggcgcagcacggccacgggtacaagaggcggcacggcgtgcagcggatccggcaggaggagcggagctggagctccggcctggtgtggcttctggtgatcctgtgcacggtgctgaccatcggcgtgatcgtgacgggcgccaccgtgttcgccgtgtacctgctgtacaagcccacgacgccgtacctgctggtctcgtccgcgcggctggagacgctggcgtacgaccagtcgggcaccatccgcgacctgcagctggcgctgacggtgctggcggagaactccaactcgcgcaccgacgccaccttctcccgcgtcaacctcgccgtgggcttccgcggcgccgaggtggcgctgctccgcgcgggcaccttcgctgtgccgcgccgcagctccttcccgctccgctaccaggtcgtgtcggcggggcgccagctcagccccgaggggatggagtacatggccggcgcgctccgggcgggcgtcgtcccgctcgacctcttcggcaaggcgcgcaccacctggaaggtcggcatcttcgcctcgctccagttctggacgcgcatctcctgccgcttcctcttcttctaccccggcaatggcaccgccatgcccatcgactgccgctccaggtcgccgtagcgtcctcctggcagccaggcaggcgtcacccattgttcacctgctctgtctctgcctgcagtctcctctgcagctacgcgtttgttctgtcattcatttgttcattccctcaggctcagcaacacaatttgacacatgcgccattcttgtacagaccaaaaataataataatactggtacggtacagtgcatagatcgacagatactcctactgtgcaggaacactaacaacaacaacaa

SEQ ID NO: 130825 - DNA, 223 bp, Zea Mays
ccaataacagtttcggctatgcgtgaaattgcatggcacagttattttctgacgccatcagcggcacagcacatgatcagagatagtttaaagacctcaacaggttaaggtcagtatcataattccataaccaggtaatgagcttcccccgctgctcatattgagctgcacaagtgcagcacaagatatggccgcatatttacactacaaaggtgcagctttg

SEQ ID NO: 130826 - DNA, 1752 bp, Zea Mays
cgcaccgcactcactcagctcggctcagctctctgagtcactctgaccacgtacgtacgagcgaacaaggcaatggcatcgtcgctcccggcgttcacggtgcggcgcggggacccggtgctggtggcgccggcggggccgacgccgcgggagacgaagccgctgtcggacatcgacgacgccgagggcatgcgcttctacagctccgggatccacctgtaccgcgccaacccggccaaggccgggcaggacccggccagggtcatccgcgacgcgctggcccgggcgctcgtcccctactaccctctcgccggccgcctccgcgaggtggaaggaaggaagctcgtggtggactgcgccgcgcagggcgtcatgttcgcggaagccgacgccgacggcctcaccgccgccgacttcggggacgtgcagagcccgccgttcccgtgcttcgagcagttcatcctggagagcaccaccgtggccggcgtcgagcccgtggtcgaccgccccctgctgtacgtccaggtcacgcgcctcaggtgcggcgggttcatcttcggccagcgcttctgccactgcgtcgtggacgccccgggcggcatgcagttcgagaaggccgtgtgcgaggtcgcgtgcggcgcggccgcgccgtccgtggcgccggcctggggcagggagatgttcatggcgcgcgacccgccgcggcccgcgtacccgcacctcgagtaccgcgagcccgcgggcgggcccgcagaccggatgctgtgcaccgcgcccgccgacatggcgcgcgtccccttcttcttcgggcccagggagatcgcggggctgcggcagcgcgccccgcccggcgcgcgctgctcccgcttcgagctcgtcgccgcgtgcatctggcgcagccgcaccgccgcgctcgggtacgcggcggaccaggaggtgcgcctgtccttcatcgtcaacgcgcgcggccggcccgacatcccgctccccgagggcttctacgggaacgccttcgcctactccgtcgcggcggccaccgcgggggagctctgcgccggggacctaggcttcgcgctcgacctggtgaggaaggccaagacggcggtcacctacgactacctgctgtccgtggcggacctcatggtgctcacgggccgcccgctgttcgcggtgtcgaggacgtacatcgtgtcggacgtcagccacgccgggttcaagagcgtcgacttcggctggggcgaggccgtctacggcgggccggccaagggcggcgaagggccgctcctcggcgtcaccaactacttctcgagggcaaagaatggcaagggggaggagggcaccgtcgtgcccatctgcctgcccaaggacgccatggagaagtttcagctcgaggtggaaggcctcaccgccgagctctagccgaccgagccgcatgcatatgtgcatgtgtacggtgtgcgcatgcacggcaccgaataaacagtagcccaccaggatatcatcacaatacgatgtacacacgtacgtagatagtaaaacgtcataagcacggacaccatactatactatactatacatagatagtaaaacgtcatgaaccacgaacaccatactatacgtaatatcgtgtgctgttttcgtactgtatttccgtacatactcgacaaaacacgatggtggtgtgcacacatgttttgtgtagggtaactttgtaaacgattcatatactacttgcaggtttgtaatattgtc

SEQ ID NO: 130827 - DNA, 924 bp, Zea Mays
tggccacaaaaatcaaagttcatactccgcgtctgggcgtctgccgtctgggctcaaagaactcgtaagccccattctatcctatacaaagcccacatcagtaacccctagggttccttgtactctataaataaccaaaccctagctctccagccttccgccccgcagtcatccccgagaagagccgccgccgcgcaaagccgcttcgacgccgtcactcatcggggcgcaaccatggtggccgcaaagaagacgaagaagtccacggacaacatcaacaacaagcttcagcttgtgatgaagagcggcaagtacacgctcggctacaagactgtcctcaggaccctcaggaattctaagtcaaagctagtgatcattgctaacaactgtcctccgcttcggaagtctgaaattgagtactatgctatgctggctaaggtgacagtccaccacttccatggaaacaatgttgaccttggaacagcctgtggaaaatacttccgtgtctgctgcctcagcattatcgatcctggtgattctgatatcatcaagactacaccgggcgagcagtaaggatgccacaacagctgtactcggcatctgaattcttagtagctgatgattttgatgtacttgtcttttatcgtgttccgtcagaatttatagagttcttggcaacattgtgtggattgaacatttcgttccagacatttgctaattgttgaatggatctcttgccggatgtgctcggattacagcatttagtcccccactgctcaaaattgcactattctctgttgtgtcaaatttgtatcttgtttactgttggtacacgatgctgctttaaacatggtacctcgggcaggacagtcttgtcttaagtcatcggtattgtgatagtaaattttacatattcaagtcgta

SEQ ID NO: 130828 - DNA, 565 bp, Zea Mays
tggccacaaaaatcaaagttcatactccgcgtctgggcgtctgccgtctgggctcaaagaactcgtaagccccattctatcctatacaaagcccacatcagtaacccctagggttccttgtactctataaataaccaaaccctagctctccagccttccgccccgcagtcatccccgagaagagccgccgccgcgcaaagccgcttcgacgccgtcactcatcggggcgcaaccatggtggccgcaaagaagacgaagaagtccacggacaacatcaacaacaagcttcagcttgtgatgaagagcggcaagtacacgctcggctacaagactgtcctcaggaccctcaggaattctaagtcaaagctagtgatcattgctaacaactgtcctccgcttcggaagtctgaaattgagtactatgctatgctggctaaggtgacagtccaccacttccatggaagtaagttatcatcccttctgtttcttcaatcgatgttgcattatctagggaaatgtcaactgtcagttggcatgttaccttttcttttagcccctgatttgt

SEQ ID NO: 130829 - DNA, 596 bp, Zea Mays
aaaacgcaaatggcgttataaatagtgaagatgtggttgtctacactctaccgctagatagagtagctgattgcataagcaacatacagttggatccatttacacaaaagtcaacaaccagaacatctaatgtgtccagcaattccttgtcacgccaaagttcctaatagatgactcagaacgatagcaacgtgaggaaattcaacaatgtcgatgtgctttcgttttcagagctgttcatgattcgaagagttgcatatatctattgccttaaccacaagcctaactatgtacaagtacaaaggcgaaaaataccggtttatcctggttcattgtttgcttaaagtgcaaaccggcattggtaaacctcatacctttttttcacacttctgtccagcataaacattcaagagccatggaaatacagagttattgtcttgttgctgtgaccatcccagattttgcaggcaatacagttgatgaacagatgcatgaaactgagcctttcttctgagtaggttagaatacgtcaacctactttgcaagcagaacttccagttggatcaacatttgtcacgcctcagaaaaaaaagaaa

SEQ ID NO: 130830 - DNA, 1339 bp, Zea Mays
atgacaacggtcaaaagcgcaggcatccgatgcgtggtggcccccctcggcgaccggccttctacttcttcaccgccacacgccgagagcgtgacaaggaaaggatcggacgccgcctccgctcccgtcgcagtcgcagcacattcaccctacctcactcgccctccccaccctcccctccagaccctcacacggtcacaccaccggcgccgcccgccctgtatggcctactactcgggcggcggcaagctgtcggcggtggacgccatcctggcggaggcggcggacctggtggcgctcgagcaggtcgccaagctcaacacggcccacctcgatgacgactccgcgcttccgtccagcctcgaggcccgcttccgcaagctcaagtccctcccctcgcccgccgcagtgccgcccgtcagcaccctcgcccgcagcgccaccgcgccgcgcccggcccccgctctgcccggccccgatcctcccgctcctgctccgcctgtgcatcacccggtccacgaagacccgccgccgggagacgcggagacgaagggcggcgggtcctcgccgcggcaggctcgcgccccggcacccgcacccacggtccacgccgacgacgccaaggacctagatcagctgttcgggtcggcgccgcggggccggccgacactgcgggagcggaacagggggagcgactcctcctccgtctccccctcgccgccgccgccgccgcgccaggcgtgctgcttcggcttctcccccaagaagcccctgcggagggcgccgtcggccaagggcaagaagaaggaggtctgccacgggtcccgcgacgtcctcggcgtcgacgccgacgagtggggcgacgagaacaggaggatcgccaccgagctcagggagcagcagcgccggctcaggaaggcgctggaggaccaggtgcaggtcagcagggagaccgccaagatggcgcgctgggtcaagcaggcgtccgcgcgcatgacgcacgccgaggccatcgacgacctgctcagtgactgcgaggacgacctcaaatgagctcacgccgacgctttgctcgtcggttcttccactgtctttgtcttgttggtgatcacaagtctgtcaaaaatgctcatatgttttcatgagtgcatttgcatccatgctttggtacaatgcttatacagaagaagcagagtcacgaaacaatgctatttcttttatgtcacatattattaggaccaggcaaagtatatgaatcgatggggcatataaggttttcatgagtgctgaactgctgatataggaaccaagaacgtggtgttgtgaaaaagatttgatc

SEQ ID NO: 130831 - DNA, 426 bp, Zea Mays
aaggaaggatcacggttgaaagtagactatgacgtgacctgggactgtgaaggtttctttcgcatttctcaatatgagctagctcgtaacaatttagaggagagggattcatcagtatcggttaatggccagaggaaacatcacacttcacgaattgaatcagattataggaagagattcagggagtgatgatataagcccatggtatgagcgagatttctttgtcctctggagagggaaaacagctgcattgtaccatcgtatcgtttcattctcagatttcaagttatatttctcatttgttcacaattaatcgaacagaaaaacccattctgatacttactaatttgtagttattattaatataggttttatccttgatgatacccagaggccagagagcgccacaaaacgaactgtttgttt

SEQ ID NO: 130832 - DNA, 2232 bp, Zea Mays
ccattttttccctctcctctctcctccgctcctccgctccggtctccgccctccctcacctctccgtcccaaaaagggcaacgaaatccagacaccgctccccatctccccttccttcctttcctactcccacactcccccaccctccactagtactagtactagtactagtaccacaaccaccccaccgggaaaaaacccaacaaggggtagggccgccgccgccgccagcgccgccgtgcagatcgcggccggatctacggcgctggggcacgggggtccccggatcgacgacgcctccgccgagggttcggatggctatgcgaaaagaaaaccctgtgcttaatgcttgtcaagcatccaatggccggatcacgcgagctcaagctgctgcaaatcgtcgaagctttggaactttcccttctgttccattgcctgcaaaaaccgaacgaaaacagactgcacaagggaaggcaaaacgaggttcttcatatgacaacaccagtgcaagtgttgcactttcaggcccccagcctaaaaggcgcacagtactcagggatgtgaccaatttgagcaatgctaactctaacaaaagttttgctgctgcaccgaagcttcagacaaagccctctctaaggactggaagaaccgtgagcaaaagcaagccgtgcgcaaaaaagattcctaaaaaaccaccaccagctggtaatggaagtgcattgactaatgttttgaacattgctgaagaaacacaagcggagaagattttggcagagagagtggaacccgttctgttgcttgagaacagggggccactttcattgcagaatgttgaaaggaacagggacagtgcttgtcatgaggtattctttgaggaaagaaacctcagggataaatgtgaaccttctgtgtcaaagaatggggactcttatgtgttagacattgtagatatcgacaaagataatggcaatcctcaaatgtgtgcttcctacgttgtggagatatactcaaacctaatggcttcagagcttatgagaagaccaagtccaaattacatggagggtttgcaacgggacatcacaaagggcatgagagaaatactcattgattggcttgtggaggtttctgaagaatacaagcttgttccagacacgctgtacctaactgtatatcttattgaccggtttctttctcggaactacattgaaagacagagactacaacttgtgggaataacaagcatgcttgttgcctcgaaatatgaagagatatgtgctcctcgagtagaagagttctgtttcataaccgacaatacatacacaaaagcagaggtgctgaaaatggagagccagctgctgaatgacctgggatttaacctttctgttccaactacaaaaacatttctcaggagattccttagagcggcacaagcatctcgtaaaactccttctatgactttaggatttctggccaattatctcgcggagttgactttgaccgaatatgagttcttgaaatttcttccgtcgttggtggcagcatcggccgtgtttcttgctagatggacgcttgaccaatccgacctcccatggaaccagactctagagcactacacctcttacaaatgctctgacattcaattgtgtgtctgtgctctacgggaactccagcataacaccagtaactgccctcttaacgccatccgcgagaagtacaggcatcaaaagtttgaatgcgtagcgaacctaacttcaccggagttccctcggtcgttcttcagctgacacgccaatggcaccgattggtgagcaacgttagcagcagccgtagcgcaggttgcgttaacattattgtagcatccccttttaccccccaatgtctgatttggctgtgtgttgttatcgagctgctgtgtcccagcctggcctttttcgagtcgcaagtgagatgaagaaggacagagagatggctccttggcttttcttttgtttgtttgacgtaaaaggttcacccggttgtaaacaacactgtgtgtagggctttttgcttgggctgttgttaattaactgtaaggggagatggtccggctggcttgtatgacgacaaacgacgggatgatgtttgtgttgacacaattcgttcattggtagcctcggaatggaaattagtttattgccagtgattactctggatggaatgactgattgagtgtttgttatatatacatgtgcc

SEQ ID NO: 130833 - DNA, 2685 bp, Zea Mays
ccattttttccctctcctctctcctccgctcctccgctccggtctccgccctccctcacctctccgtcccaaaaagggcaacgaaatccagacaccgctccccatctccccttccttcctttcctactcccacactcccccaccctccactagtactagtactagtactagtaccacaaccaccccaccgggaaaaaacccaacaaggggtagggccgccgccgccgccagcgccgccgtgcagatcgcggccggatctacggcgctggggcacgggggtccccggatcgacgacgcctccgccgagggtgagcctagcttcctcgcctcttcatccccggccccgccttcacgtcgggttcttgtgcgggcttcttcctcctattctcgctgcctccaggaacctagggggctaggctgtcattcttggaggggagagtactcttggggcttgggacggggccaagaaaccctcttgcgccggccttgacttgaccgccccaagatcgaggacgaaccattctcgttctttctgcgaataaagcttctttttggtgagattgtcctatcctggacggctgggtgcttggcggtaccgtctagcgtgccaaagaatcgtcgacgcgttcccattgccgcattacaagagctttttcggcggattatgtggtctgaccatggtgcattcttgatccggatgttgtcatgtgtcgcggactcactgttgcaccgttcgttttaatttcacaatgtgaacgcagcagttcctcagagatccaaataggttcggatggctatgcgaaaagaaaaccctgtgcttaatgcttgtcaagcatccaatggccggatcacgcgagctcaagctgctgcaaatcgtcgaagctttggaactttcccttctgttccattgcctgcaaaaaccgaacgaaaacagactgcacaagggaaggcaaaacgaggttcttcatatgacaacaccagtgcaagtgttgcactttcaggcccccagcctaaaaggcgcacagtactcagggatgtgaccaatttgagcaatgctaactctaacaaaagttttgctgctgcaccgaagcttcagacaaagccctctctaaggactggaagaaccgtgagcaaaagcaagccgtgcgcaaaaaagattcctaaaaaaccaccaccagctggtaatggaagtgcattgactaatgttttgaacattgctgaagaaacacaagcggagaagattttggcagagagagtggaacccgttctgttgcttgagaacagggggccactttcattgcagaatgttgaaaggaacagggacagtgcttgtcatgaggtattctttgaggaaagaaacctcagggataaatgtgaaccttctgtgtcaaagaatggggactcttatgtgttagacattgtagatatcgacaaagataatggcaatcctcaaatgtgtgcttcctacgttgtggagatatactcaaacctaatggcttcagagcttatgagaagaccaagtccaaattacatggagggtttgcaacgggacatcacaaagggcatgagagaaatactcattgattggcttgtggaggtttctgaagaatacaagcttgttccagacacgctgtacctaactgtatatcttattgaccggtttctttctcggaactacattgaaagacagagactacaacttgtgggaataacaagcatgcttgttgcctcgaaatatgaagagatatgtgctcctcgagtagaagagttctgtttcataaccgacaatacatacacaaaagcagaggtgctgaaaatggagagccagctgctgaatgacctgggatttaacctttctgttccaactacaaaaacatttctcaggagattccttagagcggcacaagcatctcgtaaaactccttctatgactttaggatttctggccaattatctcgcggagttgactttgaccgaatatgagttcttgaaatttcttccgtcgttggtggcagcatcggccgtgtttcttgctagatggacgcttgaccaatccgacctcccatggaaccagactctagagcactacacctcttacaaatgctctgacattcaattgtgtgtctgtgctctacgggaactccagcataacaccagtaactgccctcttaacgccatccgcgagaagtacaggcatcaaaagtttgaatgcgtagcgaacctaacttcaccggagttccctcggtcgttcttcagctgacacgccaatggcaccgattggtgagcaacgttagcagcagccgtagcgcaggttgcgttaacattattgtagcatccccttttaccccccaatgtctgatttggctgtgtgttgttatcgagctgctgtgtcccagcctggcctttttcgagtcgcaagtgagatgaagaaggacagagagatggctccttggcttttcttttgtttgtttgacgtaaaaggttcacccggttgtaaacaacactgtgtgtagggctttttgcttgggctgttgttaattaactgtaaggggagatggtccggctggcttgtatgacgacaaacgacgggatgatgtttgtgttgacacaattcgttcattggtagcctcggaatggaaattagtttattgccagtgattactctggatggaatgactgattgag

SEQ ID NO: 130834 - DNA, 193 bp, Zea Mays
ctcccaaggtcatggagcagcaacaactatgaaacccccttcgtgtcacgccttcgatgtgctcgatgaaatactgccgcgagctccacctcgatctatgccgacccggtcaccacttcgtcgaaccccggtgagaactcgttgtttttcttgtgtttattcctcgctagtacatgtactcggcgtagattaa

SEQ ID NO: 130835 - DNA, 1756 bp, Zea Mays
caaaagcaataatgcaaaatgagagaaatatagcatacactactgcctgcctccggatttttttttgctttctaaaaaaatcatctccgaaaactgcacatattccaaatctccctatataagcagacacagctaggtgggtgattacaataggcattcaatcattcaagcgaagcagccaccaccctctccactgtgactccgtgacctgcctgccctgctgcacagcacagcacacacaccccgcacaccgcaccagctcagctcagctcaccaagacaatcaatcatggctcgcccgcgcagtgttgctgccgctgccgctgcccccctcctgctgctgctcgccgccgccgcagcggggctcgtgtccgccgcgtcgccggcagccagcgacttcgtccgcaagtcgtgccgcacgacgcagtacccgtcggtgtgcgagcagagcctggcgtcgtacggcgggtcgccgccgccgcggagcccgcgggagctggcgcgcgccgcgctgtcggtgagcgcggaccgcgcgcgcgccgcgtcggcgtacgtgggccgcctgtgcggcgccagcaacggcaaaggcgcgaagaaggggtcggggtcggggtcggggtcggcgtcggcaggtcccgtgcgagactgcctggacaatctggcggacagcgtgggccacctccgcgacgcggcgcaggagatgggcggcgccgggatgggccgcgcggggacgccggcgttcaggtggcacctcagcaacgtgcagacctggtgcagcgccgcgctcaccgacgaggacacctgcctcgacggcctctcgtcccgcgccgtcgacgccggcacgcgcgccgccatccggggcaaggtcgtcgaggtcgcgcaggtcaccagcaacgcgctcgcgctcgtcaataaggtcgggcctgggtactaacacggtgaggggacccaagatccaggcccaggcccaggccagataccacacccgctactagtataatactaggcgcctccacacctccacggcgttgggtgtttctcgttcgttaatagctcggtttgctttgcttgtgtttgtgtaagatatacattagttaagggcaataagcttgtactattatgagtggcggccgaggagtacagacttacagtacgttcttctctgtccgatcatgccatcattaacattaattaatgtgggagatatcttttgtccaatgtggggctacagcctacaggcaaaggcacgtccgttctacgagtgtcttgttgtgctgcctgggacaggcagaggcgtcgtgcactcatcgatggaaggacaaggaccggacccccagttgccaaacagagagtttgtggtgacctgtcagtcttacgtggccatgtggccttggacccgcacgcggcacgcatgcatggcatgggggcagtgtcagactgccagtcaagtgctacttccgtccgatccatgcttggccggttaattagtttattaccgcgcgatgtctcatcggacggcattcgtgtccgtcgtcgggcgcgccatcgattaggcttctaaaaagttcttattagccctcgtaaaatattaatccctcggcacattaacttgagctctttaagaaagcaatctcagaagtaatgcaaaaaccaaaatattatcgattgaatatgtaaaccgataatattatgtttatgattactgtcagtatgtattgtatgtatattgagacatcagtgagcttatttttatatta

SEQ ID NO: 130836 - DNA, 2244 bp, Zea Mays
ccatcgattaaaaccctaacccgagcatcttccacgccgccgttgtctcgccgcttccagccgttgctcgctgaagaagatggggaggaggaagaagtccaaggagatggagaagaagccgctggacatcctgtcgggctccgacgaggacttcgacagcggggagaacctctccaagatccagatcaacgaggagtacgcgcgtcgcttcgagcacaacaagcggcgggaggcgctgcagcgcctcgaggagcgcaggaagcagggcctggtccccgcctccgacgacgacgagtcggagtccgagtcgtcgtcggaggaggaggacgaggcggccgccattgcctcgcgcctagtcgaccgccgcatgttcgaggtgatccgccgcatccgcagcggcgatccccgcatcctcgacaaggacgccaaggtctactcctcggaggaggaaggcggcgaggaaggtgaggacgccaagaagcaagaagagtccaagcaggagaaggaaaagaccaagaaggagaagcctctgtacctcaaggacgttaatgcccgccacctgctcgaggagggccccgagttcgcagcgcagcccagccggagcagcagcaagttcgagaggatcgcttatgacgagcagcagaagaagggattggaggctttccttgaggcacagaaagaagcattaggcgatggtggagacgatgatggcgatttattccaggtgaaggaaaaggctagagcaggagctgacgacgaagcggaggaggacgaggaggagaagcagacaaaggaccttgctggtgaggtctttgggaaggatgaggagctggatgagaacgagaagttcttgaaggaattttttcttaagaggccgtaccttgagacagagaagagtaagtcctatctagataatatccaggaattgtcagatgaagaggagctcgagattcaggaagagtatgagcatgcttataattaccggcatgaggaggccatggcatcaggggcagtggtggcggatcgggtgttgggacattcaagggttgttgaaggttcggtgaggaagaaggagagcagcagaaagcagcagcgcaagagcaaagaggagcggatggcccgtgttaagcaagagcaagcagaggagctgaagcatctcaagaatttgaagaagaaagagattgcagagaagcttgagaggatccgaatgattgctgggattgaaggagatgctgcttgtaagcttggtgctgatgacttggaggaggattttgatccggaggattatgacaaaaagatgcaggagatgtttgatgatagttactatgaggctgatgaggttgatcctgagtttggaagtggtgaggagatggatttggagaagccggattttggcaaagaagacgaattgcttgggcttcctaagggctgggctagtgaccattcaaaagaagagtctactgccactgatgcgaaaggtgaaaaagggaagatctctctcaaagacaaggtggagcttgagaaagagatggaagagtactacaagttagactacgaggacactattggagatatcaagactcggttcaagtataaacaagttaagcccaatagttttggtctgagtacctatgatatattggcatcagatgacaaggatttgaaccagtatgtttccgttaagaagctagctccttacagagaggatgaatggaaggttacacatcataagaagcagagcaaggatttgatccttggaggccagaagaaggaagggaagaaggacaaatctggcaagaaatctaggtctgaggaagaccctagttcttcaaaaacagagaacgacaggatgacaaatgggcaagagtcaacagatgccaagaaaaagtctaccagaagtgaacggcggaagcgtcgcaagtctgagctaaggccatccagtgatcgattagaggcatatggaaagataaattcaaagcgtcacaagagccattgaccttctgagattcatcaaagtacatctggggaattttgctgttctttttatgcattggacaggtgaaagtcttagatttagctgtccttgcttctattttgggagatgcaaaactagtgttgccctagtagaaacatctgttgtcttatagttttgcagacattgtgttgtgcgcctccttttgattttgattgttttatttgtagaccatatatatataatataatttccctgcaatttttcttgtc

SEQ ID NO: 130837 - DNA, 2764 bp, Zea Mays
cctaaatacaccctcgctccgcccaccttctcccacccactgcctcgtattctattcccctgcctccccatctccgccgtcctcgccttctccaatccactagtcgacaccgcacgcgctcgcctcctcccgcggcgtcgccatagggttagggttccggcgacttccctcctttccgcgtcgcggcgaacgccttgggagacccgccccatgtcgtccgacccatcgccccacctcccctcgccggtggccccgccgggcgcggcggaggcggatccccatcacctgccccaacccgccgagccacacgaggtgatgcaccggacgagggccgtcgacttcctcgggcgacgcacgcccatcgtctaccagaacgacaacgggccctgcccgctcctcgccatctgtaacgtcctgctgctgaagaatgtgatcagtctgaaccctgacgctggcgaggtgtcgcagcagaagctgctctcgctcgtggccgagcgcctcatcgaccccaacattgccggacaggataaggacgaggagtatgtttgcaaccgggagcagaacatcgcggatgccattgatcttctcccgcgccttgcaacaggcattgacgtgaatgtgatgtttaggaagattgatgactttgagttcacccgagaacgtgctatatttgatcttcttgatatcccgctataccatggatggatagtggaccctcaggatactgaaactgctaccgctattggatcaaagtcctacaatgctcttgcttctggacttgctgaattcaagtcaggtaaaccaacagaagaaaacaaatatgtggaggaagaaactgttgattttgctgccgcaacaactgcagctttaaagattccatctcccagtgtttctcgtgggagatcgtttgatgaacatactctctcaaactcatcaactgtaccacataaaaggcgaggtgaccttgaggaagaagaggaactgatgagagtcctcaatctatctaaagctaaaagtggggatgtagaagtttcttttgacacttcacatagtcattcatcctccaatattgagacaccacaaaatgagagttttcagtcagaagcactcgagttggtggtggcgacaaaaaaagaggaatatggtaatcacgctacgagtgatcatgtctctatgctatcagtcacaaatgttgctattaatggcagcgaagttgtacccgaagaatcccaagaaaatttgatatctaaagaaccagaggacaatggaataaagaaccttgatatacccattcaattttcagaaactactccttatccgtctcatgaatcctttgctagcagtgaccaccaacctgctattcctacccttgttgaaggtgataaagaaacctgcaaagaacagttcgatgtacaaattcatggccagtctaatgatactgaggtcgcttgtgactcatcagttacaacttgtgaagctgttccagatcatgctacaacagaactggatgtgaaaagtgattctttagataattctcagtctctaccttcaagcattcaggaatgtgaaccaatataccaaggtgaagagcacatacttggcaccacaaatatggtgtatgaaaatcaagagccagtgtatgagggggaggtggttcttgctgagcaggctgacaagattggggaaagcagttcttctggggatgacaaggccacagaacatcaatgggaactgattgataattttctgctgaccactgctaaccagctgactgtctatggtctcttctgtttacaagagggacttaacgaaagtgagctttgtgtcttcttccgcaataaccactttaacaccatgttcaagtacaacggaagtctatatctcctagcaactgatcaaggttttataagccaaactgatttggtatggcaaaggttggatgaggtgaatggagatggcgtttttcttactagcaacttcacaccatttaatgctgaaactccaagaaatgattcatggaatgaacagcaagctatgacgagtactgctgattatcttgctcaatttgacaactccacttctggaaactctgatcttgagctagctatagcactccaacagcaagagtttgagcggcaaccacaaaggtttcaagctccacagccgcagcagcaacagcaacaacagcaacaaccaccacctcagacgcagtaccagactcaatctggccgaccaggacttgttgttggtccaaggaggtccaacgccccacctccgtccagaagtgaatcgaagaaagagagatgcatcgtgatgtaaaaataccttcaacagaaatgtagaagaaaaagagagaaggaactcattaagtcattatactgtaaagaaatgttttcttctgcggaggcagtgtctgcgtttagtcaccttgagccatctcccatttgagctttttttttggttttactttctctgatgtatgtaaataacctaaacgaataaagtgtagaaacagatgctgtcaaagtgatggccccatgcaatgtgatttcattcatcgccccgtgcaatttgattttttttcgtagccctctgaaatcgattgattctatttcacttgtcacaatgtaacgctaatttttgaattctaaaattgtgggttattttgataacctgtttagttgtatttattttcagaaaagaactacatatttacttttcacgataaatgaaagtttcgtaaaaataaactaaaaataaaggt

SEQ ID NO: 130838 - DNA, 1590 bp, Zea Mays
caaaatacacacccgacccaacccagcccacatccgaggagccaccgcaaccgcatgcaactgcgccgcctctcgcctctcctagcgagcccgcgccgccgcctgcgattgcgctcccccacaaaccctagctctgccaccatgtccccgggcgccgctcacctggccactgccgccgacccggacgaggacctctgcgcgagcgccggggcgtcagaagcggaggtccccgcgcctgccccgcatcttccaccgctgccggtgtccgcggaggagcggttggaacgcgcttgggcgcactggaggcggctggggtccccacggctgctggtggcgccgatggtggacaactcggagctccccttccgcatgctgtgccgccgctacggcgccgacgcggcgtacacgcccatgctccactctcgcatcttctccgagaatgagaagtacaggtccatggagttcaccacgtgcaaggaggaccgaccactttttgttcagttttgtgccaatgatcctgacattttgttgcaagctgcgaagaaggtggaaccatattgcgactacgttgatatcaattttggttgcccgcagcgtattgcaagacggggtaactatggagcatttctcatggacaaccttcccctcgtaaaatccctcgtgcagaatctagcagctaatcttcatgttccagtctcagttaagatccgtgtatttccacgactggaagacacattagcatatgcgaagatgcttgaggaagctggtgcttctcttgtggctgtccacggccggacaagagacgaaaaggatgggaagaaatttcgagctgactgggatgccatcaaggccgtgaaggatgcacttagagtacccgttcttgcaaatggaaacattcgccatatggaggatgtgaagaactgccttgaacatactggtgctgatggtgtgctttcagctgaaactcttctagaaaacccagcagtttttgctggtttcaggacaaaggaatggaaagaagatggtgacgagaatggagacggtggcttggaccaggctgatcttgtgattgaatatctgaagctgtgtgagcagtaccctgtgccgtggagaatggttagatcccatgtccacaagatgttgggcgactggtttagggtgcatccagaggtgagggaggaacttaataagcagaacaagctcaccttcgaatggttgcatgacatggtaatgaggctgaaggacctcggtggaagagtgccactttacagaaaggagactgcactaggacaaacattagcctctagcaatgcctgacaggttcttatatctgcagcctatcattattggagaggagcaattgatgaaaactgaagcattttgtaccaattttgacctgctatagtacagactggaagagattgttggactacaattaaacctcgattagtaaagcatattttgagttgagcagctacagtgcaacggctcacctcattgttgtaacagctgatatgtaaaatcatttttacatcattacatggtctcagataatttggatttgctattgaacttatctttggacgcttc

SEQ ID NO: 130839 - DNA, 4176 bp, Zea Mays
gtcgcaaccaaaccctcgcatacagccgcagcgccaaatctcgccgcctccggggctacaagcgcgccgccgccgcctccgctgacggggaccacggaaggacgcgccgacaccggatctccgaacgcacgccactgaactgacgcgggacttggtttgggtgctcgattgcgcctcccggaagagggagagcccccgccggatttaaccagacacaccgaacgcgcagctcctccgcgccgggggccgcagagaattcatgctgccgaggtcccgcattcggggccgtgacccgccgccgtcgggaggacgctaccgccgccgatctccggccccgccgtcaccgcgccaccagcgccgcccgcgtgacccgccctatccccagccgaagaggcgcagctccgagctgccgccgccgcggcgatacgacgagaatcccctccccagcggcttcgccgccgctgccgagaggcgttcgcgcggcgacatcctgctcgaggccggccgcctggccgctcactacttggtcgccgaaggcctcctccccgagcacgttctcctgtcaagggaggacccaaatcacaatcacagttaccgccccgagcctcccgttcccgttcctgccccggttcccgctcccgctccctccagctatgggaggaagagagacgaggacgacggccccaggtggcggcggagtggaagtggagccggggacctggaccgtggctcaaagtgggacgacaacagggaagccaagaggtcggggtgggacaggaggagccacagctttgacgagaggcgtaaatacaacgatggcggtgacgttgaccggggtggccgccggacacgcgactacaatgagctgaagagaccaccaatgtcaaggtcctattcgcataacgatcgccgggctttggctgatggcacagttgatcggaggaggagaagtagaagcaggagcaggacgaggggctactacactggcagcaggagagatccagatctgcgagcaggcactcgagatttggatcgcaccaaggtgacagactctggcgctgttcctgctgctggtggtgatggaggcatgcacaatgtggatgccaacgaaataccaaggcagccgaaggtgcctggttcagtggtggtttcggagacggatgacagcgctgttgaagctgtggctatcgaagataagcaaatggagtcagataccgctggactggaccatgctcaagacatgtctgaaggcgaggacagtgagtttgccgaagacatttctgaagacgaggatggtgagtttgcaggctctgacttgaatgatgaagatggtgatgaaatggataacacccagagccaactgtccgatgtgcatgttcatacatctgaatctgttgaggaacttgatcttagacagtctcagctcagcaatgctgaggagggaatggaaacatgcattgcacacgtctatgcatgcatggtagagccattggcagagaacaatgtttgctctgaaacaaggtatgaaatggaggaaccacaaaatggatctgaaactgctgttggtgatctttatagtgatgaacaagagcaaccattgacagagtataatggttgctctgaagtaaagtgtgagatggaggctgcacggagtgaatttgaaactggtgttgataatcttgatagagatgaacaagagcgactattggcagagaacaatagttgctctgaagtaaggtatggcatggaggctccacaatgtgaggttgaaactggtgttggtggtcttaatagagatgacaaagagcaaccattggtggtgaccaatgattactctgaattaaggtatgaaacaacagcttcacaaactgaagttgaaaccgtcgtcggtgatctcagtagggatgaacaagagctgccagcttggtacaaaatttttgatctcaacgtcattgaaactccagtgggttgtgagttctccgagatttctcgcagtcctccagcagatgatctttgtgattctgtgcctgatttaattggtctggtgaatcaacaagaaaacaatgacacttcagaaattcatggtcaagatgatcgtgcaggggccaatcaaatgttggaggatgagtctaatttggataactatgatctgaacaatgaggctgatgaacatgcacgggatgatacttcagtaaatcaagttcaagacgagaatgcagaggataatcacctaccagaggatgggcatggtttgatgaagtatgatatgaacattgaggctggtgagcctgcacatgataatcaccaaatgaacaatgcggaaatacatctaaatcatagtatggttgcacatatttcagataattgccatatgaacaatgagaaaatgcttctaaagcaaaatgtggacgagcaacagatggagaatgagcagatgcttatagatcaggtcactactgttcatgttttggatagtcaccatgtgaatcatgaacaattgctgctaggtcatagtgtggatgatcatgaccaaatggagccaaatcccatggctttgggtgttcataatttggataactactatctgagcagcaagcaagtactcctgaataatgatgcagaccaacatgcaggagatatacaccatttgaaggatgggcaaattattttagatgaggctgcagatggacaagctagagttaatgggcaaacaattcatgtaattgatctggaagaagattatgcacagcagtctgagagcaggaatacaggagaatatctagaatccacaagtggcacctcgcataaatacacggataatgttcttcaagagcatatgtgttctcaagactagcaaacctcaacttttcgtgacaatcttcagactaacacacaagcagcttcttcaactgccacaccagatttttgaaactggtgtagtgaaaaggtagctgtgaatgcagatgcacaggtgattcccatttctcagtgatgacgatgtcctgtactcctgtattatatttggattcaacaatatgccattagaagttatggatgtctatgacctgccgtcctctgagcttgggagatcctttgctgaagtaagttagttagtcgactggtcactattctgtatattgtgcagtagtgtaatgccttttagatttcctagtgctcgcattttttttttcttcaaggctcctcgttaacaagttggttacctctgatccccgagatataaggtgcgatgtcagtatgtctcggtagctgaatagatcgttcttttggctagaaatgactcttgctctcctgcttttcaatggaattgtggagtgcacagagaattatggttatggatgcttcacgtgcagctcgtcaggcagaggctgttgcttgcacgggagtaccagtatccatgtccacttcaatcgactctagtctaactgaagcgtgccgtacacatctgcagtaactcctaaggtattcgtggttatcagcttctttaaagcttttggacacgagctttaggatcttccaaacgacaaaaaaaaaaaacttccatgggccaaaagaaaaaaaccaaaaactttgtccccaaataaaggtcgttattatcagcttctttaaaccttttgaacatcagctttgggagttgggaccctccagaagactaaaaactttgtcccaaaataggtggattttgcctatggaatctgtcgttgcagttgacatcacagggaagccgtttgcatgaaagactgagctctggtagctttttccggcgtgatgaggccgaattttttgtattttagcccctaaaccgaagtaaatttacgtttagacctaaaaaaattttaaatgcagttttggaccctttgctcggcgccataggccgtggcaccgagctaacacagctcgacgccacagtctatggcgccgagcttcgtgacgtggcagcccgcgtggcacacctagctcgacgccacagatcttggcgccgagctaggaaacttaaccgaaacgcctttcctcttcgtttcttctctgtttcgctcgcgtcttcattttcctacgcccgccgtcgctcataccgccgccgagctcgccgccagcccgccgccgccgagctcgctgcccgcccgcagcccgccgagcgcgcccggcgagcgcgccgcc

SEQ ID NO: 130840 - DNA, 3555 bp, Zea Mays
gtcgcaaccaaaccctcgcatacagccgcagcgccaaatctcgccgcctccggggctacaagcgcgccgccgccgcctccgctgacggggaccacggaaggacgcgccgacaccggatctccgaacgcacgccactgaactgacgcgggacttggtttgggtgctcgattgcgcctcccggaagagggagagcccccgccggatttaaccagacacaccgaacgcgcagctcctccgcgccgggggccgcagagaattcatgctgccgaggtcccgcattcggggccgtgacccgccgccgtcgggaggacgctaccgccgccgatctccggccccgccgtcaccgcgccaccagcgccgcccgcgtgacccgccctatccccagccgaagaggcgcagctccgagctgccgccgccgcggcgatacgacgagaatcccctccccagcggcttcgccgccgctgccgagaggcgttcgcgcggcgacatcctgctcgaggccggccgcctggccgctcactacttggtcgccgaaggcctcctccccgagcacgttctcctgtcaagggaggacccaaatcacaatcacagttaccgccccgagcctcccgttcccgttcctgccccggttcccgctcccgctccctccagctatgggaggaagagagacgaggacgacggccccaggtggcggcggagtggaagtggagccggggacctggaccgtggctcaaagtgggacgacaacagggaagccaagaggtcggggtgggacaggaggagccacagctttgacgagaggcgtaaatacaacgatggcggtgacgttgaccggggtggccgccggacacgcgactacaatgagctgaagagaccaccaatgtcaaggtcctattcgcataacgatcgccgggctttggctgatggcacagttgatcggaggaggagaagtagaagcaggagcaggacgaggggctactacactggcagcaggagagatccagatctgcgagcaggcactcgagatttggatcgcaccaaggtgacagactctggcgctgttcctgctgctggtggtgatggaggcatgcacaatgtggatgccaacgaaataccaaggcagccgaaggtgcctggttcagtggtggtttcggagacggatgacagcgctgttgaagctgtggctatcgaagataagcaaatggagtcagataccgctggactggaccatgctcaagacatgtctgaaggcgaggacagtgagtttgccgaagacatttctgaagacgaggatggtgagtttgcaggctctgacttgaatgatgaagatggtgatgaaatggataacacccagagccaactgtccgatgtgcatgttcatacatctgaatctgttgaggaacttgatcttagacagtctcagctcagcaatgctgaggagggaatggaaacatgcattgcacacgtctatgcatgcatggtagagccattggcagagaacaatgtttgctctgaaacaaggtatgaaatggaggaaccacaaaatggatctgaaactgctgttggtgatctttatagtgatgaacaagagcaaccattgacagagtataatggttgctctgaagtaaagtgtgagatggaggctgcacggagtgaatttgaaactggtgttgataatcttgatagagatgaacaagagcgactattggcagagaacaatagttgctctgaagtaaggtatggcatggaggctccacaatgtgaggttgaaactggtgttggtggtcttaatagagatgacaaagagcaaccattggtggtgaccaatgattactctgaattaaggtatgaaacaacagcttcacaaactgaagttgaaaccgtcgtcggtgatctcagtagggatgaacaagagctgccagcttggtacaaaatttttgatctcaacgtcattgaaactccagtgggttgtgagttctccgagatttctcgcagtcctccagcagatgatctttgtgattctgtgcctgatttaattggtctggtgaatcaacaagaaaacaatgacacttcagaaattcatggtcaagatgatcgtgcaggggccaatcaaatgttggaggatgagtctaatttggataactatgatctgaacaatgaggctgatgaacatgcacgggatgatacttcagtaaatcaagttcaagacgagaatgcagaggataatcacctaccagaggatgggcatggtttgatgaagtatgatatgaacattgaggctggtgagcctgcacatgataatcaccaaatgaacaatgcggaaatacatctaaatcatagtatggttgcacatatttcagataattgccatatgaacaatgagaaaatgcttctaaagcaaaatgtggacgagcaacagatggagaatgagcagatgcttatagatcaggtcactactgttcatgttttggatagtcaccatgtgaatcatgaacaattgctgctaggtcatagtgtggatgatcatgaccaaatggagccaaatcccatggctttgggtgttcataatttggataactactatctgagcagcaagcaagtactcctgaataatgatgcagaccaacatgcaggagatatacaccatttgaaggatgggcaaattattttagatgaggctgcagatggacaagctagagttaatgggcaaacaattcatgtaattgatctggaagaagattatgcacagcagtctgagagcaggaatacaggagaatatctagaatccacaagtggcacctcgcataaatacacggataatgttcttcaagagcatatgtgttctcaagactagcaaacctcaacttttcgtgacaatcttcagactaacacacaagcagcttcttcaactgccacaccagatttttgaaactggtgtagtgaaaaggtagctgtgaatgcagatgcacaggtgattcccatttctcagtgatgacgatgtcctgtactcctgtattatatttggattcaacaatatgccattagaagttatggatgtctatgacctgccgtcctctgagcttgggagatcctttgctgaagtaagttagttagtcgactggtcactattctgtatattgtgcagtagtgtaatgccttttagatttcctagtgctcgcattttttttttcttcaaggctcctcgttaacaagttggttacctctgatccccgagatataaggtgcgatgtcagtatgtctcggtagctgaatagatcgttcttttggctagaaatgactcttgctctcctgcttttcaatggaattgtggagtgcacagagaattatggttatggatgcttcacgtgcagctcgtcaggcagaggctgttgcttgcacgggagtaccagtatccatgtccacttcaatcgactctagtctaactgaagcgtgccgtacacatctgcagtaactcctaaggtattcgtggttatcagcttctttaaagcttttggacacgagctttaggatcttccaaacgacaaaaaaaaaaaa

SEQ ID NO: 130841 - DNA, 1923 bp, Zea Mays
cttttgtagcttttgtatcctattgtgtaatattttcatttatatgcgtttatgttattgtgattattttgacagtattttgttgtttttgcaaactagttcttaaggaaagatgagtttgatatcccagaacgcggtccagaagcgctgcctcagaaaaagtgaagctgataatggcaatgatgaggacattggctctccgacctctatagatgcagaagttgggaaggaagcaaaattgaagaatcacaataaggaaaggaagaagaaaaagactaagttgttggaatcccagcagaacaaagaggaagaggagatgcggcagctggagagctcattgtttggttccctttatgctccactagagtttggcactgaggtaggggctgcagtagctcctgaccgggatgcgcctttgtttttcacagataggtctgctggtggtggcatggattattttcctacatatgaggaggatatggcccatgaagatgaggaagacatggtgggtatcaagaggaggaagcctgtatgggtggatgaggaggaagaaatgacagaggtggacattgtgaaggttccaaggttgaggaagctgagaaaagaggaagatgagcatttgatttcagggaaagagtatgaggccaggttgcgtggtcagcatgcgaaattgaacccctttactggctgggctgatatggaccagaaaacttctcttcctgctgcgtcagatggtgagtctgatgatgagggttgtgtcgatgatattcttcggaataatgatgagcttgttgccaaggatactgtcaagctcttaccggggatgctggaattctcaaggctcgttgatgccaatatccaggatccatcaagtggtcctatcaattcagtgcagtttcataggaatgggcaactgatgcttgctgcaggtttggacaagcatctgaggtttttccagattgatggaaagagaaaccccaagatccagagcatatttattggggactgtccagtacacaaggcttcttttctacccgatggctctgaggtgatcctatcaggcaggaggaagttcttctactcatttgacctggtgaatgctgctgttagcaagattggacctttgacgggacgcgaggagaaaagcctggagagctttgagatatcacctgattcgagaaccattgcttttgttggcaatgaagggtacatccttcttatttctgccaagacaaagcagctcatcacaaccctcaagatgaacggaagcgtgcgttcactggcttttgcggatggtgggaaccagctactgagcagcggtggagatggccatgtttaccactgggaccttggaacaaggaaatgcatccacaaggcaacagatgacggttccctggctggcctctcgctctgcacctcgcgggatagctctttgtttgccacaggctccagcagcggcatcgtgaatgtgtacaagagggacgattttctcggcgggaagaggaagccgatgaagactatcgagaacctgaccactgatatcggtgagatgaagttcaaccatgacgcccagatcctggcgatcagctcgaggaaagagaggaacggcatgaggctcgtgcacgtcccgtcgttcagcgtgttccagaactggccggggcctcggtttagtctccactatccacggtgcctggatttcagccccggcagcggcttcctgtccgtcggacatgcaggtggaaaggtcctgctgtacaagctccaccattacgagaatgcatgatgagactaggatggttgcttggcgaaaacccatttttgacattatatttgtactcatgaatactccattaatcgagtgagtgtatgctggtccgttccagtcattgtgcctttctatttggtgccgctggtgtcaatgct

SEQ ID NO: 130842 - DNA, 1934 bp, Zea Mays
gccgccaaactgcccacacgcacagccctagccgccaaactgcccacacgcacagccgcggagcagccagagccagacgctgccgccgtcggccgtcctccgccctccagttcttaaggaaagatgagtttgatatcccagaacgcggtccagaagcgctgcctcagaaaaagtgaagctgataatggcaatgatgaggacattggctctccgacctctatagatgcagaagttgggaaggaagcaaaattgaagaatcacaataaggaaaggaagaagaaaaagactaagttgttggaatcccagcagaacaaagaggaagaggagatgcggcagctggagagctcattgtttggttccctttatgctccactagagtttggcactgaggtaggggctgcagtagctcctgaccgggatgcgcctttgtttttcacagataggtctgctggtggtggcatggattattttcctacatatgaggaggatatggcccatgaagatgaggaagacatggtgggtatcaagaggaggaagcctgtatgggtggatgaggaggaagaaatgacagaggtggacattgtgaaggttccaaggttgaggaagctgagaaaagaggaagatgagcatttgatttcagggaaagagtatgaggccaggttgcgtggtcagcatgcgaaattgaacccctttactggctgggctgatatggaccagaaaacttctcttcctgctgcgtcagatggtgagtctgatgatgagggttgtgtcgatgatattcttcggaataatgatgagcttgttgccaaggatactgtcaagctcttaccggggatgctggaattctcaaggctcgttgatgccaatatccaggatccatcaagtggtcctatcaattcagtgcagtttcataggaatgggcaactgatgcttgctgcaggtttggacaagcatctgaggtttttccagattgatggaaagagaaaccccaagatccagagcatatttattggggactgtccagtacacaaggcttcttttctacccgatggctctgaggtgatcctatcaggcaggaggaagttcttctactcatttgacctggtgaatgctgctgttagcaagattggacctttgacgggacgcgaggagaaaagcctggagagctttgagatatcacctgattcgagaaccattgcttttgttggcaatgaagggtacatccttcttatttctgccaagacaaagcagctcatcacaaccctcaagatgaacggaagcgtgcgttcactggcttttgcggatggtgggaaccagctactgagcagcggtggagatggccatgtttaccactgggaccttggaacaaggaaatgcatccacaaggcaacagatgacggttccctggctggcctctcgctctgcacctcgcgggatagctctttgtttgccacaggctccagcagcggcatcgtgaatgtgtacaagagggacgattttctcggcgggaagaggaagccgatgaagactatcgagaacctgaccactgatatcggtgagatgaagttcaaccatgacgcccagatcctggcgatcagctcgaggaaagagaggaacggcatgaggctcgtgcacgtcccgtcgttcagcgtgttccagaactggccggggcctcggtttagtctccactatccacggtgcctggatttcagccccggcagcggcttcctgtccgtcggacatgcaggtggaaaggtcctgctgtacaagctccaccattacgagaatgcatgatgagactaggatggttgcttggcgaaaacccatttttgacattatatttgtactcatgaatactccattaatcgagtgagtgtatgctggtccgttccagtcattgtgcctttctatttggtgccgctggtgtcaatgct

SEQ ID NO: 130843 - DNA, 390 bp, Zea Mays
tctgagcgtaaggttggaaaacttgaactggaagctatccaagaaggtcgttatcttgcagatttcagatatgcatgcattggctattcaatgtacttaaatggcaaggaaactcctacgggggtacgagataagccacgtgcccatctgcctgtttgtgctggagtcgagctgttgatagatagaaaagtcccaacaaacgttaagaaagaagctccaaaaccacgtcaatataaaccagggcatgcaggagatgatttcttaacgaaatttcagaggaatgcaggtcttgtggccagtggtgtggctaagaacctgaatagagttgggacctacatcaaagacactgtcagtgatatgatgcagcctcaccgcaagcgtcccaaataa

SEQ ID NO: 130844 - DNA, 884 bp, Zea Mays
gtgacaactctatcttcctctctccacagccgccgcaaaccccactcccccctcgtgcccccaattcccacctcccagatcccaccgccagatcaccgcaatgcagccgccacgagaccccatcaccgcgcgagccatccccggcgtcgacgcctcctccacggctgtagtcgccaccgcgcccaccgaggtcccgctagcatggcccccgacctcgtcgctcagtgttggtgcgagatcgaggccatcagccccaccacgccgcgatccgccaacactgctgacccgggctcctcgccctctgccttcgactctgacaccggctcgtcgctcggccacatcggctgcctacgctcgatccgtcgtgccgcctctccgtccttattcgtcgcgttcgtcctcggcttcctcttctgccttccccgcgatgcctccccgcgtcatcgcccaccagcgtcatcgcgtaggcctcactcgagacagacatggcagtggattgggtgtttggttctctttgcagcaattggaggcgaacaggaagacactgtagaggcactctcgcgcgctgttcaacgcagtggcaacagaggtggcatcaaggggcaccgatggcggcaacacgctgtcgcagcgtgtggtggagagacagtgtaggtcagacctggcaaacaggacatgggagacggacatgatctccatgcaggagaacatgtctgccaggacactcacgctctctagctccgcgcagcggacaattgtgcggttcgttaagctgccattggttgacaagatccctctgcataccgcttggatctccctggaaaagttactggtattcttgtgttcatatgttttgcaatcggctaaccatgggcattattttg

SEQ ID NO: 130845 - DNA, 887 bp, Zea Mays
gtgacaactctatcttcctctctccacagccgccgcaaaccccactcccccctcgtgcccccaattcccacctcccagatcccaccgccagatcaccgcaatgcagccgccacgagaccccatcaccgcgcgagccatccccggcgtcgacgcctcctccacggctgtagtcgccaccgcgcccaccgaggtcccgctagcatggcccccgacctcgtcgctcagtgttggtgcgagatcgaggccatcagccccaccacgccgcgatccgccaacactgctgacccgggctcctcgccctctgccttcgactctgacaccggctcgtcgctcggccacatcggctgcctacgctcgatccgtcgtgccgcctctccgtccttattcgtcgcgttcgtcctcggcttcctcttctgccttccccgcgatgcctccccgcgtcatcgcccaccagcgtcatcgcgtaggcctcactcgagacagacatggcagtggattgggtgtttggttctctttgcagtagcaattggaggcgaacaggaagacactgtagaggcactctcgcgcgctgttcaacgcagtggcaacagaggtggcatcaaggggcaccgatggcggcaacacgctgtcgcagcgtgtggtggagagacagtgtaggtcagacctggcaaacaggacatgggagacggacatgatctccatgcaggagaacatgtctgccaggacactcacgctctctagctccgcgcagcggacaattgtgcggttcgttaagctgccattggttgacaagatccctctgcataccgcttggatctccctggaaaagttactggtattcttgtgttcatatgttttgcaatcggctaaccatgggcattattttg

SEQ ID NO: 130846 - DNA, 887 bp, Zea Mays; identical to SEQ ID NO: 130845

SEQ ID NO: 130847 - DNA, 887 bp, Zea Mays; identical to SEQ ID NO: 130845

SEQ ID NO: 130848 - DNA, 903 bp, Zea Mays
atggagatcttcacgtctgccggcgttgtcgcctccggatttgtccggctagaagctctcgacctgtccggcaacaagatctccggcgatggcgacctccggtggatagtgggcgccggcgtcagagcagtccgccaactggacctctccgggaacaagatctctagcctgccggagttcaccaactgctctgggctggagtacctcgacctctccggcaacctcatcgccggcgaggtggccggcaggactctcgctgactgtcgtggtctgagaacgctcaacctctcaggcaaccacctggtcggcccgttcccgccggacgtcgccgccctcacctcgctcgccgcactcaacctctcaaacaacaacttctccaacgacctctccgccgacgctttcaccgagctacaccagctcaaggtggtcgccctctccttcaaccacttcaacggcagtaatccggactccttggcggcgctaccggagctcgacgtgctggacctcagctccaacaccttctccggcaccatcccttcgtccatctgccaaggccccaactcaagcctctgcatgctgtacctccagaacaactacctctccggcgccatccctgagtcaatctccaactgcaccaggctcgaatctctcgatctcagcctcaacaacatcaacggcaccctcccggcatccctcgggaagctcggggagctccgggacctcattctttggcagaacttcttggagggcgagattcgggcgtccctggaaaatttggacaagctcgagcatctcatcctcgactacaacgggctcatcggcatcatcccgtcggaactctccaagtgcaaggagctgaactggatatccttggcaagaaaccagctgtctggaagagaatag

SEQ ID NO: 130849 - DNA, 870 bp, Zea Mays
gctcatggtttgtcttgtcaatgcaggtgcataccagagttctcaaggcaattgttcagagaatgatcccaacaatacaatagtaagtgggttttttttcaaaaaggtgacttagaattcctgttaccttatattcattattttgcaataggtatttgtgggtgggttagattccaatgtagacgaggagtatctaaggcaaatttttactccgtatggagaaatttcctatgtgaagattcctgtaggcaaggattgtggatttgttcaatttaccagcaggtcatgtgctgaggaagccatccaaatgttgaatgggagtcagattggtgggcagaaaactcggctttcatggggccgtagtactcaaaacagacaggcttctcagcatgatgccaacagccagtataatgggaacaactattatcgataccaacagctgggtaatgaaggttatagctatggtgcacccaatgcacaagacccaagcattcaaaactactatggataccctggttatggtaactatgagcagcagtcaacacaggagcagcagcagcagcctccaccagcacaggagcagcctccaccggcacaacagtaacaatcatcgtggtgacgattgcttgggcacttctagaatgctatcagattagagggacgatagtcacagagcactgtcgtgcctaatgagacgtcctaaagatatggagggcatatagtcgcatggggccagtgttaatttatgatgacacttctgatgtctcttttgtttgtcattgagatcttgacggctgaagtatgctctgttgaaaatgatattgatgtattcgtcatcggattgtttatttgctcggaaccattttttgc

SEQ ID NO: 130850 - DNA, 345 bp, Zea Mays
gatgcgttctaatgaattggctcttttttcattcacgtcggccccgcctcttctccccccgacgcgcttgccgatccgcccattccgccgctaccactctcccgccgccgccgcgcgcctcagccgcccgtggcccggacatggagggcgccgccggggaggagggcgcctccacgccggcggcgagagggggagcggaggcaggggcaggggcaggggcaggtggagggatgctgaaggggaggtcctgcaagggctgcctctactactcgtcaaagctcaggtcgcgagcgcgcggccccgtctgcgtcggcgtcacccgcgcccttccccaaggtagtcgcg

SEQ ID NO: 130851 - DNA, 927 bp, Zea Mays
ccgcagagagggggaagaaagacgagtgtataaagtggaccgggaagaaaacgggaagcaaaatgggccggccctagcgcgctagaagcccaaacagcccatagacagctgagaggccgtgaccccgcgtccgaatccgacccccaacctcccaacccgactactactgcagcgagaggaaagagaaaaaggaaaggaaaggacaaaggagcggcggcgaggtctatggcgtcgacggcggggtacctggcgcggcgggcggcgcagaaggagcgggtgcgcctgctctaccgcagggcgctcaaggacacgctcaactgggccgtccaccgccacctcttctaccaggacgcgtcggatctccgggacaagttcgaggccaaccgacacgtggataacctggacgtggtcgataggctcattgacgatgcggaggctcagtacaggaacttccagcaccccgatccctacattgttccatgggcaccaggcggcactaaattcacaagaaacccccctccacctcaagggatcgagatcatctacaattatggcaaggaggaccagtaaacaagagtcctgcaagcggggggcagaacttccacagttccaaatcacttcctgtttaatcgagttgttgtacgagaaataagaatggaaattactggactccatccatgcttctcatttgcttgttctgataatcatgtgctcttcatctagtgcatattgaagtcatgtttcctgtcataaaatggaactgtactatctttgtcgtgcagtttaaactgaccgccggcatctcagtttttttctttggtttttctgcgttttcacgtttttctagagaaagtatatagattcatgacataagatttatgtttttagatttactatgaaaaatactttcataatatatgattcata

SEQ ID NO: 130852 - DNA, 816 bp, Zea Mays
ccgcagagagggggaagaaagacgagtgtataaagtggaccgggaagaaaacgggaagcaaaatgggccggccctagcgcgctagaagcccaaacagcccatagacagctgagaggccgtgaccccgcgtccgaatccgacccccaacctcccaacccgactactactgcagcgagaggaaagagaaaaaggaaaggaaaggacaaaggagcggcggcgaggtctatggcgtcgacggcggggtacctggcgcggcgggcggcgcagaaggagcgggtgcgcctgctctaccgcagggcgctcaaggacacgctcaactgggccgtccaccgccacctcttctaccaggacgcgtcggatctccgggacaagttcgaggccaaccgacacgtgttccatgggcaccaggcggcactaaattcacaagaaacccccctccacctcaagggatcgagatcatctacaattatggcaaggaggaccagtaaacaagagtcctgcaagcggggggcagaacttccacagttccaaatcacttcctgtttaatcgagttgttgtacgagaaataagaatggaaattactggactccatccatgcttctcatttgcttgttctgataatcatgtgctcttcatctagtgcatattgaagtcatgtttcctgtcataaaatggaactgtactatctttgtcgtgcagtttaaactgaccgccggcatctcagtttttttctttggtttttctgcgttttcacgtttttctagagaaagtatatagattcatgacataagatttatgtttttagatttactatg

SEQ ID NO: 130853 - DNA, 903 bp, Zea Mays
ccgcagagagggggaagaaagacgagtgtataaagtggaccgggaagaaaacgggaagcaaaatgggccggccctagcgcgctagaagcccaaacagcccatagacagctgagaggccgtgaccccgcgtccgaatccgacccccaacctcccaacccgactactactgcagcgagaggaaagagaaaaaggaaaggaaaggacaaaggagcggcggcgaggtctatggcgtcgacggcggggtacctggcgcggcgggcggcgcagaaggagcgggtgcgcctgctctaccgcagggcgctcaaggacacgctcaactgggccgtccaccgccacctcttctaccaggacgcgtcggatctccgggacaagttcgaggccaaccgacacgtggataacctggacgtggtcgataggctcattgacgatgcggaggctcagtacaggaacttccagcaccccgatccctacattgttccatgggcaccaggcggcactaaattcacaagaaacccccctccacctcaaggggtaagaccacagcttacaccactctttatgcgatatcgagatcatctacaattatggcaaggaggaccagtaaacaagagtcctgcaagcggggggcagaacttccacagttccaaatcacttcctgtttaatcgagttgttgtacgagaaataagaatggaaattactggactccatccatgcttctcatttgcttgttctgataatcatgtgctcttcatctagtgcatattgaagtcatgtttcctgtcataaaatggaactgtactatctttgtcgtgcagtttaaactgaccgccggcatctcagtttttttctttggtttttctgcgttttcacgtttttctagagaaagtatatagattcatgac

SEQ ID NO: 130854 - DNA, 1586 bp, Zea Mays
ttatagatatttgacgtgtagaatgagatatagaagaagacgttgaagagaaataatatacataggtaaaagaattttgtatagaagaaaagatataaagaagcataaagaggatacatttgaagattatatgggcttcgtggtgcgacatgtcctagctggattgggccctacctctagcccgggcatgggggtctcgggcaggacgacacctctgcacatctatacatatacagcggcgcgtcgcctcctcccttctctcccctctcttcacgcgaaccagcagtccagcacacagcacagcacgactcgggcgcgccgcgcacacggacggcagtgcacgcctcgccggctcaccaatcgacaccctgtccaaccagcaccacccggcgtcgtcctccctggcggggggttaggctagctagagctgtacagcgcgagagcgacgaacggcaggtcgatcggcggtcgtacgtacgtcgtcgaccgagagcagagcaggcgaccgcggcgccagagatagttcgaatccgattccgacccatccatgggggttcacctgctgaagaagcagcactcgtcggcgccgtcgtcgctgggccgcggctccggctccgggtccgcatccgggtcgtcggtgtcggcgtcgtcgatgccgcccaaggggtgcatggcggtgcgcgtggtggggccttcctccgccgccgccgggcggaaggagcaggagcaggaggaggaggaggagcggttcgtggtgcccgtggggtacctgaagcacccgctgttcgtggcgctgctccaggcggcggaggaggagtacgggttcgagcagaagggcgccatcaccatcccctgcggcgtggaccacttccgccgcgtgcagggcatcatccaccaccacggctccggcggcgggcaccaccatggccaccacagcagcagcagcagcaaccacttccacatcgccggctgcttccgcgcctgatcggtcggtcggtcggtcttccatctacaccacgtggatgatggatgaaaatggagaccgatccatgccccgctgggctcctctcctctcctctctagcgccgacgggacgacggatcgatcgaggaacaacaacaatatttactagctctaccgctaaattttctagggttttcttctccttggttaggatttagacgcatggcctctctctggactggaccgaccgaggatcgaaggaccatggttggctcctgcctgcggccgacggagtctaccagaggatggactggtcgctctcgcttttggtcatgcgctgcgcgcggatcaatcgatcggtggatgatgatatattgatatgttttgccatgtgttttttttggagtttttaatatcttaggagtaatttggattgttgttgttgttgttattgttgttgaggatgatgaaaacaaattaaggccttgttcggttaatcccgttacccatggattggatgagattggaaaaaattaagaaagagtttgacttagctgggatttaaacccactcaatcccacttaagggcttgttcggttattgatattacatgtgtattggag

SEQ ID NO: 130855 - DNA, 718 bp, Zea Mays
caagcttctgtgcgtccccgaaccacttgctcatgagattggagatcctgacattgatgaagacggcgccggactccctggcgatggccttggcgagcatggtcttgcctgtgccgggcgggccatagaggaggacgcccttctgggggctgaggagcttgccgaaggtgaagagctcggggcggcgcaggggcaggatgacgagctcgtagagcgcctgcttgatctggtccaggccgccgatggagtcgaattcgacgtcgatgctgtcggggttgatgacgtcgcacgcaatcacgtcctgtcgggcgtggtggagacgaggggccggccgaggcgcttggcgatctccttcttctgttgctgcgccttctgggaagcggcgcggttggggtcgaggtggcggaggccagcgaagaggacgaggcagctgagcgcggcgctggcggcgtacagcacgagctcctgcacgagccgcgacgacgcctccgaagacctcatcgcccgcactcgccgctgaggctttgctccccgtccgtcccgcggatgcccgagtgaacgccggcccctgtctgccttgcggaggagggattagagggggcggcgcgagctggggattggattggattctgctgcttacacagctttagctttgtgcttgtgctcgcagggggtttgggctatcgggttggaccggaggttggttactttttctttt

SEQ ID NO: 130856 - DNA, 761 bp, Zea Mays
gagagagacggccggccggccggccggagaaggaagccattcgctgcagctgcaagcaggatagtcaggagtagcgtgcaacggagatggaggaggactacgtgttcaagatcgtggtggtcggcgactcggcggtgggtaagacgcagctgctggggcgcttcacccgcgacgagttcttcctggactccaagtcgaccatcggcatcgagttccagacgcgcaccgtcgacatcgcgcgccaccgcgtcaaggcccagatctgggacaccgccggccaggagcgctaccgcgcggtcaccagcgcctactaccgcggcgcgctcggcgccatgctcgtctacgacgtcaccagccgccgcaccttcgaccacgccacgcgctgggtcgccgagctgcgcgcccacgccgacaagtccatcgtcgtcatgctcgtcggcaacaaggccgacctggcgcgcgacgccggccgccgcgcggtggacgcggacgaggccgccgccttcgcggaggagcaggggctcttcttctcggaggcgtctgccctcagcggcgacaacgtcgagcgtgccttcctcacgctgctccgggagatccacgccatcgtgtccaggaagacgctggatgcggcggcggaaaccggcggcaccaccgacgtcctggctctcaagggcaccaagctgtcgcttgctgatgagatatccatcatggagacgagcgccttgagaacagcaagcggcggcagctgctcgtgcacgtga

SEQ ID NO: 130857 - DNA, 922 bp, Zea Mays
cgtgcgcgtgcggccgtgccgccgtcgggacccacatcccgtggcgtggcgtggggagccacccgcaagcagaataaaacgtgtggctgtccctcgtctcccccaactccagcacagcacaatggacgccgccgtctccctctccctgcccctgcaccaccacgcccacggcccgctcccgctcccgcacccggcgccccaccacctccactgcgctgtcccgctcaggcaccacgccacctccgcgtccgccgtaaccgcgccgccgcccaagcctgacgttcaggctcctccagcggcgcgcctgagccccgccctcgccgcgccatcgccaccccgctcgtccccggccgccgcgcgctcctccagccgcgccgccacgggatacgcggcagcgctggccgacgcgtgcgtccgcgcgggcacgctgcgccgcgccgcgcgccacgcgcgcgcgctcctccaccttctcctccggctagagcggcccctggaagagggcgccgccgcggtcgaggctgccgtgacggtcgcggggcagcagctggacgcgcgggtggccgcgctcgtcaggatgctcgtcgctaagggcagggccggggtgctcgccgaggccctggccgagttcgccgccatctgcgaccacctgctgtcgacgcgcccgcgcgcgcgccacgcctactagctaggcatgctgcttaatcgagtacagtgcccaacaaacagcacgccttttcgacacgaaacacttcatccaccagcgtagcgtttgtactcgtgcatggccttcgttcgccatggatgcatggtctgtactcttctacaagcaaattctgctacatggcgcttagccaacgttgtgtacttgtgttgccattggttatcagtacaacgctacggagcccataaatcttcaataaaa

SEQ ID NO: 130858 - DNA, 740 bp, Zea Mays
gcgtccacttcgctcccctaggtcgcgagcgagcgacggccgactgcgcgagaccgcgagtgaccgccggtcgagccccgaggccggagcggctcccccgcaggcctgccctcgtctggtcgccgcctcgccgcgcagcaaccccgcgacccgctgcccggccggcccgcgttactgtgcagccgtgtccattactgcatttgtagacagcgcagctactggctgacccgactcccttctctcccaattctcagcgggcgatgcaggcgaagaagctgaccctgctgcagacggtggcagctgcgggagtcttctctgccgtctccttttggtatggcttcatgttcggaagggagtccgcgcggcgcgagcttggtggcatcatagacgacctccgcagcaacaagcccaccaatacccctgccggtcccgatgctcattcgaagccatagtggggtccaggtctgcagtgcgaaggataagatcgtgtggggatcataaacgatgtggttagctgttagaagtgttcagcgaggacaaagatcgttagaggaaggtcgaagaacctggcctatgtttttgtaggtttatgtcttagggaggccgcacttttgaatttgaagaaacgagagacgatatcattgttcgtatttcgtatggcgcgcaggcgcggctaccagtcttcgagcatagcgttgctgttgatgcatcgtactcttgatctgtgattagtttgttcc

SEQ ID NO: 130859 - DNA, 693 bp, Zea Mays
gcgtccacttcgctcccctaggtcgcgagcgagcgacggccgactgcgcgagaccgcgagtgaccgccggtcgagccccgaggccggagcggctcccccgcaggcctgccctcgtctggtcgccgcctcgccgcgcagcaaccccgcgacccgctgcccggccggcccgcgttactgtgcagccgtgtccattactgcatttgtagacagcgcagctactggctgacccgactcccttctctcccaattctcagcgggcgatgcaggcgaagaagctgaccctgctgcagacggtggcagctgcgggagtcttctctgccgtctccttttggtatggcttcatgttcggaagggagtccgcgcggcgcgagcttggtggcatcatagacgacctccgcagcaacaagcccaccaatacccctgccggtcccgatgctcattcgaagccatagtggggtatggtgttctgttgttcctcctttgccgtactaaatctaaatgtggtcaagcttgtcttgtggatcctgctaggctgtagacggaagaactagccttggagctaccagttttttgtccccttctttcataatgtgtatacggcttgaacatcagtttttagactgaaaaaaaaaacaagttaacctgccacaaaagacaaggaagaaaaacaagttaaaacctcctttggttcag

SEQ ID NO: 130860 - DNA, 1842 bp, Zea Mays
gtccgttctctccctccacgacatcacagcgcgcgctgccgtcgccgtcgccctaatccaccagcagcagtgccgccacgtgcgtgctcatttccttgcagctgccgggttgcagctgccgggtgcccggctctgccttcgtcaagcacgcggggcctctttcttgtttcttcccgtctggtccaaccctcctccttcccctgcccctcccggcgcttccgaggaggagagggctcttcaattccccaaccgattccaaccccacccggacccgggtacactacagcgacgcgcctgccacttctccttccaccaagtcctcgctcgccagcccgcgctgcagcgctcgtcgtccgatggggtgcttcgcgttcaggagcggcggcaagagcggcagcagcagcagcacgtcctccaggccgcagcagcacccgcgcccgggcgcccggacgccgccggccaagtcggccccggcgtccacgtcgtcgtcctcctcctcctccggcgccggcgccggcgcgcagagcaacaccaaggcggcggcggcctcggcgcccgcggcggcgtcgtcggccacgcccacgcgcaccatccaggagctgtcggaggagcggggcgcccagcgcctccgcgtgttcgacctcgacgagctcggcagcgccaccaacggcttcagccgcgcgctcaagctcggcgagggcggcttcggctccgtctaccgcgccttcttccgctccgccgccggcgcccgcgtcgtgctcgccgtcaagcgcctcaaccagcgcagcctccaggggcacaagcagtggttggctgaagtccagttcctgggtgttcttgagcacccgaacctcgtaaagctgataggctactgcgccgtggattcagaagccagcaagcacaggctgctggtctacgagttcatgcccaacaagagcttggacgaccacctgttcaaccgagctcaccctccgctttcatggagactgaggctgcagatcatgctgggcgctgcgcggggcctggattacctccatgaaggagtgccagaagttcaggtgatctacagggatttcaaggcatccaacgtccttctggacgctgaattcaagccgaagctgtcggatttcggcctcgcaagagagggtccaacagaagggaagacacatgtctccaccgcggtggtggggacgcacgggtacgcggcgccggactacatcgagacggggcacctgacggtgaagagcgacgtgtggagcttcggcgtggtgctgtacgagatcctgacgggccgacgctcgctggagcgcagccgccccgcggaggagcagaagctgctggggtgggtgcggcagcacccgccggacggcgccgggttccgggccatcatggacccgcggctgggcgggcggtacccgctggccgccgcgcgcgaggtggccaggctcgccgaccgttgcctcggcaagaaccccaaggagcggccggcgatgagggacgtcgtcgaggtgctcgagcgggttgtgcagatggagccgacgactacgaccgcagacaagagaggaggtgacggcaggctgccggcgaagaggtgacggacggcggcggcggcggcgttgccgggatacgccgctccgtcgtcccgttctggccctccgggtgtgttctaacttccgaagtttgtatgtatcggaaagtatacgtcaggagaaacgaacaatttcctgaacaggctatatactacatgtgagattcgatggtgaatttgtgatttgaacacgcaaatgaagattcagtaaaaattcacataactaactaacacgtgttgcagaaatgcatgag

SEQ ID NO: 130861 - DNA, 1829 bp, Zea Mays
atggccctgccgggttgcagctgccgggtgcccggctctgccttcgtcaagcacgcggggcctctttcttgtttcttcccgtctggtccaaccctcctccttcccctgcccctcccggcgcttccgaggaggagagggctcttcaattccccaaccgattccaaccccacccggacccgggtacactacagcgacgcgcctgccacttctccttccaccaagtcctcgctcgccagcccgcgctgcagcgctcgtcgtccgatggggtgcttcgcgttcaggagcggcggcaagagcggcagcagcagcagcacgtcctccaggccgcagcagcacccgcgcccgggcgcccggacgccgccggccaagtcggccccggcgtccacgtcgtcgtcctcctcctcctccggcgccggcgccggcgcgcagagcaacaccaaggcggcggcggcctcggcgcccgcggcggcgtcgtcggccacgcccacgcgcaccatccaggagctgtcggaggagcggggcgcccagcgcctccgcgtgttcgacctcgacgagctcggcagcgccaccaacggcttcagccgcgcgctcaagctcggcgagggcggcttcggctccgtctaccgcgccttcttccgctccgccgccggcgcccgcgtcgtgctcgccgtcaagcgcctcaaccagcgcagcctccaggggcacaagcagtggttggctgaagtccagttcctgggtgttcttgagcacccgaacctcgtaaagctgataggctactgcgccgtggattcagaagccagcaagcacaggctgctggtctacgagttcatgcccaacaagagcttggacgaccacctgttcaaccgagctcaccctccgctttcatggagactgaggctgcagatcatgctgggcgctgcgcggggcctggattacctccatgaaggagtgccagaagttcaggtgatctacagggatttcaaggcatccaacgtccttctggacgctgaattcaagccgaagctgtcggatttcggcctcgcaagagagggtccaacagaagggaagacacatgtctccaccgcggtgcgttcaggccttcagggtcgtcctcgttcacggccatgcatcatgtctcttcttgcatagttgttgcattgcatggcgtgctcgcgcatctgaagctttggactcgctggttgtgattgctcaggtggtggggacgcacgggtacgcggcgccggactacatcgagacggggcacctgacggtgaagagcgacgtgtggagcttcggcgtggtgctgtacgagatcctgacgggccgacgctcgctggagcgcagccgccccgcggaggagcagaagctgctggggtgggtgcggcagcacccgccggacggcgccgggttccgggccatcatggacccgcggctgggcgggcggtacccgctggccgccgcgcgcgaggtggccaggctcgccgaccgttgcctcggcaagaaccccaaggagcggccggcgatgagggacgtcgtcgaggtgctcgagcgggttgtgcagatggagccgacgactacgaccgcagacaagagaggaggtgacggcaggctgccggcgaagaggtgacggacggcggcggcggcggcgttgccgggatacgccgctccgtcgtcccgttctggccctccgggtgtgttctaacttccgaagtttgtatgtatcggaaagtatacgtcaggagaaacgaacaatttcctgaacaggctatatactacatgtgagattcgatggtgaatttgtgatttgaacacgcaaatgaagattcagt

SEQ ID NO: 130862 - DNA, 2733 bp, Zea Mays
attaagtggcctgttggagttgctctaattgtagctataaatgagagagtttaaagggttatgaaaaaaaattaagagcgttttagggaactgttggaaacacgtttttatgttttttcaaaaaaatatatcaaaaaaccatctctaattgcacccaacaaaaaggtaccgcatgcaagcaaagcaactgatctgtgatcgaaggacgagagggtcattgccagcctctaactccccaccacctcacacaccaaccgacgccattgccggcggcacgtcctgcccgcccgcccgcgcagttggtacccccgtacgtacgtggcggctacccattcgttccccgcgcgcgtggatggtcggttgatgcagccaaggggatcgtgccccgccgcggatggccgttgctgtcctccttcctgtcgtcgtcgtcgtcgatctctctcgcggtcgcgccgcgcctctgaataatcatcgatctggtggcttcgggaagggccccgcgggcgaccaataatggcgcggaggtgctgcggctgcagcgtgcggtgctgttgctgcctcctggtgctgacgctgctcgcgctcgcggtcacggccgccgtcgtgttcgcccgctacaaggacggcggcaacatcttccccatccccggcttgccggaccccaagtatgccgaggcgctcgccgtggcgctccgcttcttccaggtccaaaaatccgggaagctggtgaacaacacgatcccgtggcgaggtgactcggcgctgcgcgacggcgaggatgccaagctggacctgtccaggggcatgtacgacgcgggcgaccacgtgaagttcgggttcacgatggcgttcacgggcaccatgctgtcgtggtccgtcctcgagtacggcgacgccatgagcgacgcccagcagcgcgacgccgccatggacgcgctgggctggatcatggagttcctcgtcaacgcgcacccctctgacgacgtgctctacatccaggtgggcgacccgaaatcggaccacaagtgctgggagcggccggagacgatgtcggagaagaggccgctgacgaagatcaccgcgaaatcccccggcagcgacgtggccgcggagacggcggcggccatggccgcggcgtcgctggtgtacaagcccggcaacgcgacgtacgcgtcgtcgctcctggaccacgccgagcggctgttcaagttcgccgatgcgcaccggggctcctacacgcgcacgttcccggagctcagcgcctactacaactccacgacgtaccaggacgagctcctgtgggcggccgcctggctgtaccacgccaccggcaaccacagctacctgagctacgccaccggcaggaacgccgacgagttcgccgacctgggcaaccctaggtacttcagctgggatgacaaacgcgccggcaccgaggttctcttgtccagggtgatgttcttcgccggagatggatctgatgccggacaagacgaggtccttgggtcgtataaggacaccgccgacgccgtcatgtgcatcctcctaccggagtcggacactgcggctttcagaacagaaggggggttactgtacgtggcggagtggaactcgctgcagcacccggtggcgtcagcgttcctcgccaacgtctacagcaactacatggcgacgtcggggaagtcggagctgacctgcagcggcaagagcttcacggcgctggacctccgcaggttcgccaagtcccaggcggactacgtcctcggcgacaaccccatgaagctgagctacctcgtcggcttcggggacagctacccgcagcgggtgcaccaccgcggcgcgtccatccccgccggcgtcgacaccggctgcgacggccaggagtggctcaagtcgcctgagcccaacccgaatgtcgccacgggcgcgctggtcggcgggccgttcaagaacgactcgttcgtcgacgacagggagaacgtgcagcagaacgagccgaccacgtacaacagcgcgctcgtcgtcggcttgctctccggcctcctctcaactgcccccgtcgccaagtccctctcgtgatccggcctgctctgctcgattaatcgattggtttccttttctaactgaccgactctgctgtggatgtgacttcgactgatggcatgtggatttaatttgttcctctgaaaatgctgatgtcaaactgttcaatcgatcagtgttaagtgttagcgtgttgcgatagcaattagcatacttgtgtgatgcagtgtctttggtcttctgtctaacaagttagcagtcactactaattatacatgctatccatgagagtgcaggtgtcaagctgatcaatgactgataggttgttgtgttagcatcgaaaaattaagagattggcatcagaacataatggaaatgacttggaattacatctagttccatctgctccccataatgggcttctgaatataagcatccgaaggtcccaacaacaggatttaatagtgtttctggagtataatgtgtgaacaggtatcttcggactcaagtcaggcatcactgtagaccagaataatacgaaggttggtgaagcgccgaaggtgcaagcaggaaagcttcggcgagacagcagcagaaagcggaaccgacttaaagatgaaaaggctatttagacctcaacagattactatagaattattatcaaatgtaaagggcatgaatgtaattttg

SEQ ID NO: 130863 - DNA, 1851 bp, Zea Mays
cgtggccagtgtgggtttaatggcaaatggagtatcatccgggctctatttctaaacccaagactgatcaagcgaacaaatcattaataaaaagtttgctagtgagtcgagaagagagagagaggcgtccggaattcatcgccagcgatgtctccgtccgccgacgcccccggcccggcctcctccgcctcggcgcccccgctcgcgcccctcatcgccgcgcagctcaactacctcctctcgcactccaagctgcccattagggtggtacagatctggtccggctgccgcaacggtcgccctgccgatcggttcaggctcgccatccccttctgcctcgactacgtccactgggatttcgtgtacaatgcgctgtctcccaaggtggcaccagacgtggtgttcggtccggaggatgagaggttccagccgctggtcgattacgctgctgctggaaatggcgataagagctgcttggcgcgttgggattgccgcgcccccgagggactccatgcgctcgtacaggagcttcgagaattgtacattgaataccaaaaggagcgggttcacatggtggatgacgcgagactagcgtttgaactaagcacagttctctctaaggaggggattgaagtctgcatggtaccttctgctgataggccagatgaggccaaatttgctgtaccacttctggagtctgactttgactttgccaaactggtgccaggatgtccttggagattacctcaaaagatccatctccaggtcatttttcctatcagcaggagttcaagctactcttctatgccttctgctccacgactcaaactaatctcaacaccagatttgaggtcacttctctcagttgaggatgtgaaactccctccatggtcaaatgggatgtgtttggcggagtatcttcctgctttagaagacagtcttaacggtctgcttgtagatgcgtcggcttcaattggttccagaagacgctttattgaggcactagctcccatctttgggagaccattagaggctgatccggtactaatgtagtattgttttcccttaaataatcatgcatttaacaaatctaccaatgatacatctgcacatcagattttttgcaggagggctacagttctttccatttctggaatgttcacatttctggttcactttgccatcccccttcaattcccaaagcaacaacctgtcgtcacactgcagagttctcagcactgtaatgccgatgggatgcctatcacgtcgcctccgataaatgactatccctggagtcctagatgggaccaggcagagatggttgaacggatctacgacttcctgaccgacgagtgccaaaatttcaagaagttctgcagcgatgctatcactcagcagaagtagctgacatcgttctgcagcagaaagccgtggtgctgattttctcagcaacaggctttcttattcccagcaagcggcacacgtgtctacttgtgcgcccgccccaagcctgcaaccgttgatgctgttctctttcttgtcatgtgagaggacgcaacctcaggcgttggttaggatcggcataaaccaagcaggacaacacaagacctgttggttgtttacgatgtcgtacccctgtataagctgccgacatggtgactgtttgggatatggtatagatggatacaatccagttcttttgtaaatatgatatgaaggatggtggcactcctacccccgttgcattctcctctccaaagcaccacatgctgtcgatgccgttgggaagtttgcaaaaatcttactcttattgttatgcaatcaaattgtgtgtttccacgcgatatttcc

SEQ ID NO: 130864 - DNA, 1748 bp, Zea Mays
cgtggccagtgtgggtttaatggcaaatggagtatcatccgggctctatttctaaacccaagactgatcaagcgaacaaatcattaataaaaagtttgctagtgagtcgagaagagagagagaggcgtccggaattcatcgccagcgatgtctccgtccgccgacgcccccggcccggcctcctccgcctcggcgcccccgctcgcgcccctcatcgccgcgcagctcaactacctcctctcgcactccaagctgcccattagggtggtacagatctggtccggctgccgcaacggtcgccctgccgatcggttcaggctcgccatccccttctgcctcgactacgtccactgggatttcgtgtacaatgcgctgtctcccaaggtggcaccagacgtggtgttcggtccggaggatgagaggttccagccgctggtcgattacgctgctgctggaaatggcgataagagctgcttggcgcgttgggattgccgcgcccccgagggactccatgcgctcgtacaggagcttcgagaattgtacattgaataccaaaaggagcgggttcacatggtggatgacgcgagactagcgtttgaactaagcacagttctctctaaggaggggattgaagtctgcatggtaccttctgctgataggccagatgaggccaaatttgctgtaccacttctggagtctgactttgactttgccaaactggtgccaggatgtccttggagattacctcaaaagatccatctccaggtcatttttcctatcagcaggagttcaagctactcttctatgccttctgctccacgactcaaactaatctcaacaccagatttgaggtcacttctctcagttgaggatgtgaaactccctccatggtcaaatgggatgtgtttggcggagtatcttcctgctttagaagacagtcttaacggtctgcttgtagatgcgtcggcttcaattggttccagaagacgctttattgaggcactagctcccatctttgggagaccattagaggctgatccgattttttgcaggagggctacagttctttccatttctggaatgttcacatttctggttcactttgccatcccccttcaattcccaaagcaacaacctgtcgtcacactgcagagttctcagcactgtaatgccgatgggatgcctatcacgtcgcctccgataaatgactatccctggagtcctagatgggaccaggcagagatggttgaacggatctacgacttcctgaccgacgagtgccaaaatttcaagaagttctgcagcgatgctatcactcagcagaagtagctgacatcgttctgcagcagaaagccgtggtgctgattttctcagcaacaggctttcttattcccagcaagcggcacacgtgtctacttgtgcgcccgccccaagcctgcaaccgttgatgctgttctctttcttgtcatgtgagaggacgcaacctcaggcgttggttaggatcggcataaaccaagcaggacaacacaagacctgttggttgtttacgatgtcgtacccctgtataagctgccgacatggtgactgtttgggatatggtatagatggatacaatccagttcttttgtaaatatgatatgaaggatggtggcactcctacccccgttgcattctcctctccaaagcaccacatgctgtcgatgccgttgggaagtttgcaaaaatcttactcttattgttatgcaatc

SEQ ID NO: 130865 - DNA, 1793 bp, Zea Mays
cgtggccagtgtgggtttaatggcaaatggagtatcatccgggctctatttctaaacccaagactgatcaagcgaacaaatcattaataaaaagtttgctagtgagtcgagaagagagagagaggcgtccggaattcatcgccagcgatgtctccgtccgccgacgcccccggcccggcctcctccgcctcggcgcccccgctcgcgcccctcatcgccgcgcagctcaactacctcctctcgcactccaagctgcccattagggtacccgctctgcctcgcctcgcggctcgccgctccctttctcacttcgctcgcttgcaggtggtacagatctggtccggctgccgcaacggtcgccctgccgatcggttcaggctcgccatccccttctgcctcgactacgtccactgggatttcgtgtacaatgcgctgtctcccaaggtggcaccagacgtggtgttcggtccggaggatgagaggttccagccgctggtcgattacgctgctgctggaaatggcgataagagctgcttggcgcgttgggattgccgcgcccccgagggactccatgcgctcgtacaggagcttcgagaattgtacattgaataccaaaaggagcgggttcacatggtggatgacgcgagactagcgtttgaactaagcacagttctctctaaggaggggattgaagtctgcatggtaccttctgctgataggccagatgaggccaaatttgctgtaccacttctggagtctgactttgactttgccaaactggtgccaggatgtccttggagattacctcaaaagatccatctccaggtcatttttcctatcagcaggagttcaagctactcttctatgccttctgctccacgactcaaactaatctcaacaccagatttgaggtcacttctctcagttgaggatgtgaaactccctccatggtcaaatgggatgtgtttggcggagtatcttcctgctttagaagacagtcttaacggtctgcttgtagatgcgtcggcttcaattggttccagaagacgctttattgaggcactagctcccatctttgggagaccattagaggctgatccgattttttgcaggagggctacagttctttccatttctggaatgttcacatttctggttcactttgccatcccccttcaattcccaaagcaacaacctgtcgtcacactgcagagttctcagcactgtaatgccgatgggatgcctatcacgtcgcctccgataaatgactatccctggagtcctagatgggaccaggcagagatggttgaacggatctacgacttcctgaccgacgagtgccaaaatttcaagaagttctgcagcgatgctatcactcagcagaagtagctgacatcgttctgcagcagaaagccgtggtgctgattttctcagcaacaggctttcttattcccagcaagcggcacacgtgtctacttgtgcgcccgccccaagcctgcaaccgttgatgctgttctctttcttgtcatgtgagaggacgcaacctcaggcgttggttaggatcggcataaaccaagcaggacaacacaagacctgttggttgtttacgatgtcgtacccctgtataagctgccgacatggtgactgtttgggatatggtatagatggatacaatccagttcttttgtaaatatgatatgaaggatggtggcactcctacccccgttgcattctcctctccaaagcaccacatgctgtcgatgccgttgggaagtttgcaaaaatcttactct

SEQ ID NO: 130866 - DNA, 1819 bp, Zea Mays
cgtggccagtgtgggtttaatggcaaatggagtatcatccgggctctatttctaaacccaagactgatcaagcgaacaaatcattaataaaaagtttgctagtgagtcgagaagagagagagaggcgtccggaattcatcgccagcgatgtctccgtccgccgacgcccccggcccggcctcctccgcctcggcgcccccgctcgcgcccctcatcgccgcgcagctcaactacctcctctcgcactccaagctgcccattagggtggtacagatctggtccggctgccgcaacggtcgccctgccgatcggttcaggctcgccatccccttctgcctcgactacgtccactgggatttcgtgtacaatgcgctgtctcccaaggtggcaccagacgtggtgttcggtccggaggatgagaggttccagccgctggtcgattacgctgctgctggaaatggcgataagagctgcttggcgcgttgggattgccgcgcccccgagggactccatgcgctcgtacaggagcttcgagaattgtacattgaataccaaaaggagcgggttcacatggtggatgacgcgagactagcgtttgaactaagcacagttctctctaaggaggggattgaagtctgcatggtaccttctgctgataggccagatgaggccaaatttgctgtaccacttctggagtctgactttgactttgccaaactggtgccaggatgtccttggagattacctcaaaagatccatctccaggtcatttttcctatcagcaggagttcaagctactcttctatgccttctgctccacgactcaaactaatctcaacaccagatttgaggtcacttctctcagttgaggatgtgaaactccctccatggtcaaatgggatgtgtttggcggagtatcttcctgctttagaagacagtcttaacggtctgcttgtagatgcgtcggcttcaattggttccagaagacgctttattgaggcactagctcccatctttgggagaccattagaggctgatccggtactaatgtagtattgttttcccttaaataatcatgcatttaacaaatctaccaatgatacatctgcacatcagattttttgcaggagggctacagttctttccatttctggaatgttcacatttctggttcactttgccatcccccttcaattcccaaagcaacaacctgtcgtcacactgcagagttctcagcactgtaatgccgatgggatgcctatcacgtcgcctccgataaatgactatccctggagtcctagatgggaccaggcagagatggttgaacggatctagtaagtacatggtctatctatcccttttccaatctatgctgcctgtcaatggtacagctttgagatcctgtccaattttgcagcgacttcctgaccgacgagtgccaaaatttcaagaagttctgcagcgatgctatcactcagcagaagtagctgacatcgttctgcagcagaaagccgtggtgctgattttctcagcaacaggctttcttattcccagcaagcggcacacgtgtctacttgtgcgcccgccccaagcctgcaaccgttgatgctgttctctttcttgtcatgtgagaggacgcaacctcaggcgttggttaggatcggcataaaccaagcaggacaacacaagacctgttggttgtttacgatgtcgtacccctgtataagctgccgacatggtgactgtttgggatatggtatagatggatacaatccagttcttttgtaaatatgatatgaaggatggtggcactcctacc

SEQ ID NO: 130867 - DNA, 1928 bp, Zea Mays
gttggtaatactgtacaaattttcgtctagttgcgtgctctcgctagggttccgccccgccggcatacccgaccataaaccccgcgccgcccgccagcaaccttcagtctcatttctcacgcgtagctcggacaggcagcttgaagctcgcgaaccagccatggcgaatggggacgcggccgtggaggtcggcgggaacggggagcaggaagccgcggcgcgccaggcgtcgacgttcgcggagctgggtatctgcgcggagctggtggaggcgtgcgacgccatggggtggaaggagcccaccaggatccaggccgaggccatcccccacgcgctccaagggaaggacctgatcgctctggcgcagacggggtccggaaagacgggcgcgttcgcgctgcccatcctgcaggagctgctcagcaaccgccaggctgaacagtctttcttcgcttgcgtgctctcgccaacaagagagctggcgattcagatcgcagagcagtttgaggcgcttggatcagctattggtttgcgttgctcagtgcttgttggaggagtggatcgggtgcagcaagtgttatccatcggaaaacgtccacatattgtagttggaactcctggccgtcttttggaccatttgacagagactaaaggttttagccttaagaaaatcaagtatttggtattggatgaagctgataaattacttaatgtggagtttgagaaatcccttgatgacattctaagcgagatgcctaaagacaggaggactttccttttttcagcgactatgaccaaaaaggtaaataaactgcaacgtgcttgtctcaggaatcctgctaaggttgaagtgtcctccaaatattctacagtagattcacttaaacaagagttctattttgttcctgcagatgacaaggattgctatcttcttcatgttctgaacgagaggctggagagcatgatcatgatctttgtgcgcacctgtgaatctactagactccttgctcttatgttgaggaatcttggtttgaaagctatgtctatcagtggccagatgagtcaggacaagagattaggtgctttgaacagattcaaagcgaaagattgcaatatccttatttgcactgatgtagcaagtcgcggcctcgacattcaaggagttgatatggtcatcaactatgatattccaatgaattctaaggattatgttcatcgggtgggcaggactgcacgtgcagggcgatcaggatacgctgtatctttggtgaaccaatatgaagcccagtggttcgtgctgatcgagcagctccttggcaagaaaattgaccagtgtaaggtggacagagatgaagtccttatacttaaagggcccatatccgatgcaaagagaattgcgctgacgaaattgaaggattccggtggccacaagaagcggagaaatgtgggagatgacgatgaagaggttgaagatcattcttctcattctagaagaccgaaatccttgaagagatcaaacagacgatgaaggctctggagcatgtctggactgcctcgtttcgtgcaagtcctttgtggttcagcgcagatccaccctgtggtggtttggagtgatgctttgcctatttatactagggccagttaagacgttcacttgacaccattccttgggttgaaagcaagtctcccccaattttgtcatcccgacccaaaccatgcttacataaggaatcattttttgctgatggctgccattggtgtattgtagcttctgagtcgcatgtgcggttttgcccaaggcacaggcagccgttgctttgtgtcaacacggaagtgctagcttgacgttttaccggccatatcaccgtatgtccggtatggctataaagtttttaataatgctataaaaatatcgtctcagtctaaat

SEQ ID NO: 130868 - DNA, 1798 bp, Zea Mays
gcgtgctctcgctagggttccgccccgccggcatacccgaccataaaccccgcgccgcccgccagcaaccttcagtctcatttctcacgcgtagctcggacaggcagcttgaagctcgcgaaccagccatggcgaatggggacgcggccgtggaggtcggcgggaacggggagcaggaagccgcggcgcgccaggcgtcgacgttcgcggagctgggtatctgcgcggagctggtggaggcgtgcgacgccatggggtggaaggagcccaccaggatccaggccgaggccatcccccacgcgctccaagggaaggacctgatcgctctggcgcagacggggtccggaaagacgggcgcgttcgcgctgcccatcctgcaggagctgctcagcaaccgccaggctgaacagtctttcttcgcttgcgtgctctcgccaacaagagagctggcgattcagatcgcagagcagtttgaggcgcttggatcagctattggtttgcgttgctcagtgcttgttggaggagtggatcgggtgcagcaagtgttatccatcggaaaacgtccacatattgtagtattggatgaagctgataaattacttaatgtggagtttgagaaatcccttgatgacattctaagcgagatgcctaaagacaggaggactttccttttttcagcgactatgaccaaaaaggtaaataaactgcaacgtgcttgtctcaggaatcctgctaaggttgaagtgtcctccaaatattctacagtagattcacttaaacaagagttctattttgttcctgcagatgacaaggattgctatcttcttcatgttctgaacgagaggctggagagcatgatcatgatctttgtgcgcacctgtgaatctactagactccttgctcttatgttgaggaatcttggtttgaaagctatgtctatcagtggccagatgagtcaggacaagagattaggtgctttgaacagattcaaagcgaaagattgcaatatccttatttgcactgatgtagcaagtcgcggcctcgacattcaaggagttgatatggtcatcaactatgatattccaatgaattctaaggattatgttcatcgggtgggcaggactgcacgtgcagggcgatcaggatacgctgtatctttggtgaaccaatatgaagcccagtggttcgtgctgatcgagcagctccttggcaagaaaattgaccagtgtaaggtggacagagatgaagtccttatacttaaagggcccatatccgatgcaaagagaattgcgctgacgaaattgaaggattccggtggccacaagaagcggagaaatgtgggagatgacgatgaagaggttgaagatcattcttctcattctagaagaccgaaatccttgaagagatcaaacagacgatgaaggctctggagcatgtctggactgcctcgtttcgtgcaagtcctttgtggttcagcgcagatccaccctgtggtggtttggagtgatgctttgcctatttatactagggccagttaagacgttcacttgacaccattccttgggttgaaagcaagtctcccccaattttgtcatcccgacccaaaccatgcttacataaggaatcattttttgctgatggctgccattggtgtattgtagcttctgagtcgcatgtgcggttttgcccaaggcacaggcagccgttgctttgtgtcaacacggaagtgctagcttgacgttttaccggccatatcaccgtatgtccggtatggctataaagtttttaataatgctat

SEQ ID NO: 130869 - DNA, 1754 bp, Zea Mays
gcgtgctctcgctagggttccgccccgccggcatacccgaccataaaccccgcgccgcccgccagcaaccttcagtctcatttctcacgcgtagctcggacaggcagcttgaagctcgcgaaccagccatggcgaatggggacgcggccgtggaggtcggcgggaacggggagcaggaagccgcggcgcgccaggcgtcgacgttcgcggagctgggtatctgcgcggagctggtggaggcgtgcgacgccatggggtggaaggagcccaccaggatccaggccgaggccatcccccacgcgctccaagggaaggacctgatcgctctggcgcagacggggtccggaaagacgggcgcgttcgcgctgcccatcctgcaggagctgctcagcaaccgccaggctgaacagtctttcttcgcttgcgtgctctcgccaacaagagagctggcgattcagatcgcagagcagtttgaggcgcttggatcagctattggtttgcgttgctcagtgcttgttggaggagtggatcgggtgcagcaagtgttatccatcggaaaacgtccacatattgtagtattggatgaagctgataaattacttaatgtggagtttgagaaatcccttgatgacattctaagcgagatgcctaaagacaggaggactttccttttttcagcgactatgaccaaaaaggtaaataaactgcaacgtgcttgtctcaggaatcctgctaaggttgaagtgtcctccaaatattctacagtagattcacttaaacaagagttctattttgttcctgcagatgacaaggattgctatcttcttcatgttctgaacgagaggctggagagcatgatcatgatctttgtgcgcacctgtgaatctactagactccttgctcttatgttgaggaatcttggtttgaaagctatgtctatcagtggccagatgagtcaggacaagagattaggtgctttgaacagattcaaagcgaaagattgcaatatccttatttgcactgatgtagcaagtcgcggcctcgacattcaaggagttgatatggtcatcaactatgatattccaatgaattctaaggattatgttcatcgggtgggcaggactgcacgtgcagggcgatcaggatacgctgtatctttggtgaaccaatatgaagcccagtggttcgtgctgatcgagcagctccttggcaagaaaattgaccagtgtaaggtggacagagatgaagtccttatacttaaagggcccatatccgatgcaaagagaattgcgctgacggtatgccctcctaaaacatcagtatttgattctgtaaatcttttgcgccatgtttgtaatacgaagtatgtgcaaaaggatgcctatctgttggctattcatttcatgccacgttatctcgctttgtagaaattgaaggattccggtggccacaagaagcggagaaatgtgggagatgacgatgaagaggttgaagatcattcttctcattctagaagaccgaaatccttgaagagatcaaacagacgatgaaggctctggagcatgtctggactgcctcgtttcgtgcaagtcctttgtggttcagcgcagatccaccctgtggtggtttggagtgatgctttgcctatttatactagggccagttaagacgttcacttgacaccattccttgggttgaaagcaagtctcccccaattttgtcatcccgacccaaaccatgcttacataaggaat

SEQ ID NO: 130870 - DNA, 414 bp, Zea Mays
atggtaggaatgggaaccacttacccggggtggttgaggaggggagcactgggagctcgaggcctcctgcacgagcagcggcggtgggattcggagtcaaccgcaaaaaccccaaacagcagcggcggcgtcgcgggtaggacagggggccatgcgacggatctggttggaggagggggcagcggggaggacggggccatgcggcggatctggggcgtcgggcaacgcgagaccgggggcgtcgggcggcggcgtgctatcgagggacgggaggagggccgagggaggggagagtgggagcaaggggcacaatgtcgcggggtgggaatgagcggagcggatgatgtcgcggcgtgcgagtggcaggcagaaccgcttagctgtgcacgcctacactcctttcttaaggagtag

SEQ ID NO: 130871 - DNA, 1119 bp, Zea Mays
cttatccggctcatttctgctttcccttatacaggtggcggaggacacacttacctctccgagcctctatggtgggcgggaatgaccacaatgctgcttggggaggtcgcaaacttcattgcttacatatttgcgccggctgtactcgtgactccacttggggcgttaagcataatcgtaagttcagtgttggcgcactttgtgctcaaggagcggcttgagaagctcggggtccttggctgtgtgtcgtgcatagtaggttcagttgttgttgtcatgcatgctcctgaagagcatatgcctaactctgtcaaggaaatctggaacctagctactcaaccagggtttctagcatatgtggtgacagcattgttacttgtgggagcgctagtactcttctttgaacctcgatacggtcagactaacatcctgatatatctgggtatctgctcttcaatgggatcgctaacggtcgttagcatcaaagccattggtgttgccataaagcttacgttggatggggtgaatcaggctgcttatccatacacatggctttttcttatggttgcaattgtttgtggggtttctcaaataaattacctgaacaaggcattggatacctttaatctggctattgtctctcctatatattatgtaatgtttactacccttacaatagtggcaagtggaattatgtttaaggactgggctggtcaaagcttaagtagtattgcttctgaattatgcggcctgataaccatcctttctgggacaattttgttgcacacagcagaggagggagccaacaattctgcagctttgttgccttggcctttggataaagggtctatatcatggtgtatcaacttaagcagtgacaatcttctaaagaatgtcgaagaggactacttcacagctctgcaaagttcacctgccccagtataatgaagaaactgataaatatctaaaagggaacatgcaaatcaaggatagaacttctccattgtttgttcaaggcaagcagaattatcgcctgcatgttgtattttgtataaatgttcatcctttaactaaaactcagaagtgaagattgatatatctagctgctgtgttctacgt

SEQ ID NO: 130872 - DNA, 1220 bp, Zea Mays
cttatccggctcatttctgctttcccttatacaggtggcggaggacacacttacctctccgagcctctatggtgggcgggaatgaccacaatgctgcttggggaggtcgcaaacttcattgcttacatatttgcgccggctgtactcgtgactccacttggggcgttaagcataatcgtaagttcagtgttggcgcactttgtgctcaaggagcggcttgagaagctcggggtccttggctgtgtgtcgtgcatagtaggttcagttgttgttgtcatgcatgctcctgaagagcatatgcctaactctgtcaaggaaatctggaacctagctactcaaccagggtttctagcatatgtggtgacagcattgttacttgtgggagcgctagtactcttctttgaacctcgatacggtcagactaacatcctgatatatctgggtatctgctcttcaatgggatcgctaacggtcgttagcatcaaagccattggtgttgccataaagcttacgttggatggggtgaatcaggctgcttatccatacacatggctttttcttatggttgcaattgtttgtggggtttctcaaataaattacctgaacaaggcattggatacctttaatctggctattgtctctcctatatattatgtaatgtttactacccttacaatagtggcaagtggaattatgtttaaggactgggctggtcaaagcttaagtagtattgcttctgaattatgcggcctgataaccatcctttctgggacaattttgttgcacacagcagaggagggagccaacaattctgcagctttgttgccttggcctttggataaagggtctatatcatggtgtatcaacttaagcagtgacaatcttctaaagaatgtcgaagaggactacttcacagctctgcaaagttcacctgccccagtataatgaagaaactgataaatatctaaaagggaacatgcaaatcaaggtgtaaatcttaacagtgccagaaatctggcagttttgggtgaggagattctacctgccatttttcggtttgtacataggagcctgtaacatttgtggttttttttatatgggccaggatagaacttctccattgtttgttcaaggcaagcagaattatcgcctgcatgttgtattttgtataaatgttcatcctttaactaaaactcagaagtgaagattgatatatctag

SEQ ID NO: 130873 - DNA, 840 bp, Zea Mays
attaacatctagcaaaacgtaggggagggcgggtgcgagtaggaaggcagtctatctaggccatcaattacgtcaagatccctgccccggccgcgctgctgcacggcgggggtcctgccgaactccgtcgccggggagctgccgtggctccggcacgggtcccagctcctgtgggccttgctccgtcggtggccaggcggaggctcgcagctctggctcctgccgtaggccgtcctcctgaagctcaggtggtccagcgccgcgcgctcgcagtccgacagcgggctcgaggccgtgcggctgttcaccggcgacgtgttgtgccgagtctccgtctccggtcggaggtccgttgccgccgccttgcgggaccgggacgacgcgtcgtgcctcgacgatttgctggtcccgtagcctctgttcttcacctggatcaccaggtggtggaggagcgccaccagctccagcatgtagtgctcggttttcgccttgtcggcgtgatggagcgtctggatgcgggtgacgctgtgctgggagcctgatttcttgctcatgtcgctcctgcgagcaaggtggatgcatgttaggtggtgctgcaactgcaagcaaaacatgttacgctacattgtcgatggggagatcataataaggtttatcaacggtcgcatgggaatcatggtttctcaattcggtactcacccaagatttgcccactcgccgacccatccaaaaccttggtgtgccctggtgaatgaatcagaaggaaacaactgttagcgcattagcactatagtctaagtcagatcgtcagagtacaacttttttttaaaaaaaaaaaaa

SEQ ID NO: 130874 - DNA, 2907 bp, Zea Mays
tggccccggcccattttaaggcgtttcctctccggcgcagagcgggtagcgggacgaactcgtcactggtgtgggccgtggctgtacgccgcagagtgaagcgagacgagacgacgatgcgcaagtgggcgctctcctccgcgctcctccttctcttcctcctcaccaccctccccgacccagctaagaagctacaggtgaatgcggaagagagcagcgatgacttagctaacccacccaaggtagaggagaagcttggtgctgtccctcatggcctgtccaccgactctgaggttgcccagagggaagctgagtctatctctaggaagactcttaggagctccgccgagaagtttgagttccaggctgaggtgtccagactcatggacatcatcatcaactcactctacagcaacaaggatatcttcctgagggagctcatatccaatgcctctgatgcattggataagatcaggttcctttcccttactgataaggaagttctgggtgaaggtgacactgcaaagcttgagattcagattaagttggacaaagagaagaaaatcctctccattcgggataggggtattggtatgaccaaggaggatcttattaataaccttggaaccattgctaagtctggcacttcagcttttgtcgaaaagatgcagtctggaggtgacctcaatcttattggacagtttggtgttggcttctactcggtgtacttggttgctgactatgtcgaagtggtcagcaagcacaatgatgataaacaatatgtttgggaatcaaaagctgatggatcgtttgctatctccgaggatacatggaatgaaccccttggccgtggaaccgagataagattacatctgcgagatgaggccaaggagtacttggaagaggataagcttaaggatttggttaagaagtactctgagttcatcaacttccctatctatttgtggtcaaccaaggaggttgatgttgaagtgccagctgatgaggatgagacaagtgaagaagaggattcgtccccagaaactacagaagaagagacagaagaagatgaagagaaagagaaaaagcctaagacgaagacgataaaggagactacttctgaatgggaacttctgaatgatatgaaggctgtatggcttcgcagcccgaaggaggttactgatgaggaatactcgaagttttaccactcactagccaaggacttcggtgatgacaagcctatgggttggagccacttcactgctgaaggagatgttgagttcaaagctttgctcttcattccaccgaaggctccgcatgatctctatgagagttactacaacagcaacaagtcaaacctcaagttgtatgttagaagagtgttcatctctgatgaatttgatgaccttcttccgaagtatctcagctttttgaggggtattgttgactcagacacactgccgctgaatgtgtcacgagaaatgctccaacaacatagcagtctgaagactatcaagaagaagctgatccgcaaagctcttgacatgattaggaaacttgctgaagaagaccctgatgagtacagcaacaaggataagacagatgaagagaaaaatgagatggaggagaagaagggccagtacgccaagttctggaatgagtttggcaaatcaatcaagctgggtatcattgaagacgcaactaacaggaaccgccttgcgaagcttcttagatttgaaagtaccaagtcggatggcaaacttgcctcccttgacgagtacatttcaaggatgaagccagggcagaaagacatcttctacctcacgggaagcagcaaagatcagctggagaagtctccgttcctggagaggctaaccaagaagaactacgaggtcatcttcttcaccgaccctatggacgagtacctgatgcagtacctgatggactacgaggacaggaagttccagaacgtgtccaaggagggcctgaagctgggcaaggactcgaggctcaaggacctcaaggagtcgttcaaggagctgacggagtggtggaagaaggccctggagagcgagagcgtggactcggtgaaggtcagcagccggctgcacgacaccccctgcgtcgtcgtcacctccaagtacgggtggagcgccaacatggagaagatcatgcaggcgcagacgctgtcggactcgagcaagcaggcgtacatgcgcggcaagagggtgctggagatcaaccccaggcaccccatcatcaaggagctccgcgacaaggtcgcccaggacaacgagagcgaggagctgaagcagacggcgaggctggtgtaccagacggcccttatggagagcgggttcaacctccccgaccccaaggagttcgcgtccagcatctacaagtcggtgcacaagagcctggacctgagccccgacgcggccgtggaggaggaggacgaggccgaggagcagccggaggtggaagagaaggagccggcggccaaggaggggtcggagccgtccttcgacaaggacgagctgtagtcggcgtgctgtggtctcgtctcgtcttcgggatctgttttgaagtctagctgtagctcccgtttagttgagatatcggggagcccactcactgccagctttgtgtttaggaacgtgatacgggatctttttttttttgttgcctgtctttgtacttgtacaaacctcagttcagtgactcggtctaattaccggctccgattagtgaactgtttctgtctgattagtgagctcaccgacatccatagggtggcgctccctcccttctaatttaacttgtattcttaagttcagctgctcagcttttgtagcttcggtcggatttatatgaagatacaaaaatacaaaccatgtttatagcaag

SEQ ID NO: 130875 - DNA, 1188 bp, Zea Mays
gtcgcttcccaggcacgactccatccccctctctctttctctctctctcttcgacgactcccgccgctgtcttccactcgggggccgccgtccctgtcgtcttccgcccatcactgtcttcttcgctccaccacacttgggaaacgcagcgatggatggccagccaggtgctgctgcgttgtcgagtcctggtccgagagtaaaagcaagcctggttctgggatccgaatcgttcgctatcaactccgagttcggtaccctgtcggagcagctggccgcggtgaaggagaagagcatggcggtcctcaaggaacacatcgccaggcacaatgctccgaacgaggtccccgacgaggccgccgagggcgagtctgacagtgagggcgaagcgccgcttgtcgacaacccgccgaagaaacctaagaagcagaagtgaccgtctctagtcatgcacttgacttttttttttttgccatgcgttgcttgtgtaacgccagactgttgtcagtcacaatagcaatatgcaggtgttagcactcacttgctgttcgtaccactatcattagttctgcttctctgtcatgtgttcatatttttcttcccatacacttgcaagggtgttcttgtctgtcggtgtgctgcacgctccgtatatctgtagcagaaacacaattcactaacagcttggtttgaggaatgggttagcctatcatcttctcagtcaattttttgtttggtttatagaatgaaatgagttgatccatcaacaattagtaatagcagctgtaacacagagctagctggttaattctgtccccgaaggagtatggtttcctctcggtggttattatccagtaactcagccggcaggaaactactgttctgtggctctcaggctgaatggtgatggtgaggtgatcaagttcccaggacaatctcaggcgatgagcaagttcaatgcagctccggagctgctcgtctctgacggagacctgacaagccttggggcagtggtagaccggtagctcgatgccatgcgcggcgggttcttgttttgctggtcgagttttggggtgttttggtatgtgtttagtcgggttcgctgggcgatatgccacccctgtgttgtactaatgaacatgttattacaatttacatgcatgtttggtcagtgaactctaaaacaaa

SEQ ID NO: 130876 - DNA, 390 bp, Zea Mays
atggcgtcgtccggtcgatccgcctacagcttcctcctgcagagcgggcaggagccgtgcttgatgagccagccgtcgatgcacggcacgtggaacacgtgccagcagtccggcaggctccgcaccttctccccgacctggaaatcctggaggcagacggagcagccggagaggtcgccgacggcgtcgcgcctgtactcctcggtgatccacgactcggggagcttgtcgatggacgcccgcggcatgccgttggtggcctccacctcgaacaggtccggcgactccctgaacggcgacgagtccaccgcgttcatctggctgcggaccacccgctgcaccgccgggtcgaccttctcgcgcaccagcctgcccgtcaggaggctgtag

SEQ ID NO: 130877 - DNA, 2292 bp, Zea Mays
acggccagcccacgccacgcctacggttcgcgccacttgcgggcgcggatcaccaccgccgtccgccggtgatcccctcgtccgccgctggcggttcggttcaccctcgccgtccgtcatctctgactccgacgggtcgtgctcacacgcccacccaagtctccccaaccctgcacctggtctgctcccagctcccagctcccagctcacctcgtgtcgggtcgggtcggtccgagccggaccgggccggagcgcgccacccaacccgttttgcggctgctccggtccgcttttccccctcttcctctgctattctccagtccccccctcccccgtcccccacccactccctcgtccagagtccagacccagaaggagagggagacagaggagaggaggagcagcgtggcgacgcccaaatcgagcgacctgatcgaggcccctcgccccaactcgctgaatcccaatccgagcccgccaattgggcgccccgcccacgccaaggctgaaagtcagtggagttctcagttctcaccaacattcagaaaactgttggctcgctgacaagtccaactgtgtttttcttggactacagatgaagcgagctcgaaggcgtatgtgcaagagatgactgatgagggatgctagtgacattgatgaacttgttacgggcgtgctggcgaccgtcatcgaaccggcatgcccgaacaggctcagatgttaccggtaggcaggatggacttctatggtacaaggacgccgggcagcatgtcaacggggagttttccatggctgttgttcaggccaataacttacttgaggaccagtgtcagattgagtcgggcccactgagttttctagattccggaccatatggcacttttgttggcgtttacgatggacatggtggtccagagacggcctgctatatcaatgatcatctcttccagaatctgaaaaggtttgcatctgagcagaatacaatgtctgctgatgtactgaagaaggcgtatgaagctacagaagatggattcttttctgttgttaccaaacaatggcctgtaaagcctcagatagcagctgtcggctcatgctgcctggtcggtgtaatttgtggtggcatgctttatgttgccaatgttggggattcccgtgttgttttaggaagacatgttaaggctactggagaagttttggctgtccaactgtcagcagagcataatgtaagtattgagtcagtgagaaaagaactgcagtcaatgcacccagaagataggcacattgttgttctcaagcacaatgtttggcgtgtaaaaggactaattcaggtttgtagatcaatcggtgatgcttatctcaagaagcaagagttcaatagggaacccctatatgtgaaatttcggcttcgtgaaccttttcacaagccgatactaagttcagaaccatcgatcaatgtgcaaccactacaaccacacgaccagtttctcatatttgcatctgatggactttgggagcacttaaccaaccaagaagctgttgatattgttcacagtagcccccgcagtggctgtgctaggaggctgataagagcggcgctgcaagtggcagccaagaaaagggagatgaggtactcagacctcaagaagatcgaccgcggtgttcgccgccacttccacgacgacataacagtcatagtagtgttccttgattccagcctcgtgagcaaggcgagcacgcaccgaggccccactctttccctgcgaggcggcggtgccagcgctggtctgcgcagcaacacgcttgcaccaacgtcaatgtggctatgaggaggctacaccctgactggaggacgttttctttcctcgtgtcgaatgtgttatatatgtacttgtaccggccaaggtcatccatctcccctcaatggtgtaaagaactaggagaggcgtggaagctcctctccagcgtctttgaatcccctcaatggtgtcaaggtgtggactcaagtcaatagcttcgctgttctgatgatgctctgtggaaactcgaatccttccacctgaaaaccaagtagtatgtcttctagtgctggaattaaccctagtgcatatatacatatgaaataaaaaaaagccaaaaggaggagtaacttatttaactgatgctgtgaggtgtatgtatgttttgtattgtatgtgtactgattttgactgccactgcatatactgttgttaatcgacccctggtaaagtgaaatcgctgatttcgtcctactattatcagctgttcccagta

SEQ ID NO: 130878 - DNA, 2201 bp, Zea Mays
acggccagcccacgccacgcctacggttcgcgccacttgcgggcgcggatcaccaccgccgtccgccggtgatcccctcgtccgccgctggcggttcggttcaccctcgccgtccgtcatctctgactccgacgggtcgtgctcacacgcccacccaagtctccccaaccctgcacctggtctgctcccagctcccagctcccagctcacctcgtgtcgggtcgggtcggtccgagccggaccgggccggagcgcgccacccaacccgttttgcggctgctccggtccgcttttccccctcttcctctgctattctccagtccccccctcccccgtcccccacccactccctcgtccagagtccagacccagaaggagagggagacagaggagaggaggagcagcgtggcgacgcccaaatcgagcgacctgatcgaggcccctcgccccaactcgctgaatcccaatccgagcccgccaattgggcgccccgcccacgccaagatgaagcgagctcgaaggcgtatgtgcaagagatgactgatgagggatgctagtgacattgatgaacttgttacgggcgtgctggcgaccgtcatcgaaccggcatgcccgaacaggctcagatgttaccggtaggcaggatggacttctatggtacaaggacgccgggcagcatgtcaacggggagttttccatggctgttgttcaggccaataacttacttgaggaccagtgtcagattgagtcgggcccactgagttttctagattccggaccatatggcacttttgttggcgtttacgatggacatggtggtccagagacggcctgctatatcaatgatcatctcttccagaatctgaaaaggtttgcatctgagcagaatacaatgtctgctgatgtactgaagaaggcgtatgaagctacagaagatggattcttttctgttgttaccaaacaatggcctgtaaagcctcagatagcagctgtcggctcatgctgcctggtcggtgtaatttgtggtggcatgctttatgttgccaatgttggggattcccgtgttgttttaggaagacatgttaaggctactggagaagttttggctgtccaactgtcagcagagcataatgtaagtattgagtcagtgagaaaagaactgcagtcaatgcacccagaagataggcacattgttgttctcaagcacaatgtttggcgtgtaaaaggactaattcaggtttgtagatcaatcggtgatgcttatctcaagaagcaagagttcaatagggaacccctatatgtgaaatttcggcttcgtgaaccttttcacaagccgatactaagttcagaaccatcgatcaatgtgcaaccactacaaccacacgaccagtttctcatatttgcatctgatggactttgggagcacttaaccaaccaagaagctgttgatattgttcacagtagcccccgcagtggctgtgctaggaggctgataagagcggcgctgcaagtggcagccaagaaaagggagatgaggtactcagacctcaagaagatcgaccgcggtgttcgccgccacttccacgacgacataacagtcatagtagtgttccttgattccagcctcgtgagcaaggcgagcacgcaccgaggccccactctttccctgcgaggcggcggtgccagcgctggtctgcgcagcaacacgcttgcaccaacgtcaatgtggctatgaggaggctacaccctgactggaggacgttttctttcctcgtgtcgaatgtgttatatatgtacttgtaccggccaaggtcatccatctcccctcaatggtgtaaagaactaggagaggcgtggaagctcctctccagcgtctttgaatcccctcaatggtgtcaaggtgtggactcaagtcaatagcttcgctgttctgatgatgctctgtggaaactcgaatccttccacctgaaaaccaagtagtatgtcttctagtgctggaattaaccctagtgcatatatacatatgaaataaaaaaaagccaaaaggaggagtaacttatttaactgatgctgtgaggtgtatgtatgttttgtattgtatgtgtactgattttgactgccactgcatatactgttgttaatcgacccctggtaaagtgaaatcgctgatttcgtcctactattatcagctgttcccagta

SEQ ID NO: 130879 - DNA, 1575 bp, Zea Mays
acggccagcccacgccacgcctacggttcgcgccacttgcgggcgcggatcaccaccgccgtccgccggtgatcccctcgtccgccgctggcggttcggttcaccctcgccgtccgtcatctctgactccgacgggtcgtgctcacacgcccacccaagtctccccaaccctgcacctggtctgctcccagctcccagctcccagctcacctcgtgtcgggtcgggtcggtccgagccggaccgggccggagcgcgccacccaacccgttttgcggctgctccggtccgcttttccccctcttcctctgctattctccagtccccccctcccccgtcccccacccactccctcgtccagagtccagacccagaaggagagggagacagaggagaggaggagcagcgtggcgacgcccaaatcgagcgacctgatcgaggcccctcgccccaactcgctgaatcccaatccgagcccgccaattgggcgccccgcccacgccaagatgaagcgagctcgaaggcgtatgtgcaagagatgactgatgagggatgctagtgacattgatgaacttgttacgggcgtgctggcgaccgtcatcgaaccggcatgcccgaacaggctcagatgttaccggtaggcaggatggacttctatggtacaaggacgccgggcagcatgtcaacggggagttttccatggctgttgttcaggccaataacttacttgaggaccagtgtcagattgagtcgggcccactgagttttctagattccggaccatatggcacttttgttggcgtttacgatggacatggtggtccagagacggcctgctatatcaatgatcatctcttccagaatctgaaaaggtttgcatctgagcagaatacaatgtctgctgatgtactgaagaaggcgtatgaagctacagaagatggattcttttctgttgttaccaaacaatggcctgtaaagcctcagatagcagctgtcggctcatgctgcctggtcggtgtaatttgtggtggcatgctttatgttgccaatgttggggattcccgtgttgttttaggaagacatgttaaggctactggagaagttttggctgtccaactgtcagcagagcataatgtaagtattgagtcagtgagaaaagaactgcagtcaatgcacccagaagataggcacattgttgttctcaagcacaatgtttggcgtgtaaaaggactaattcaggtttgtagatcaatcggtgatgcttatctcaagaagcaagagttcaatagggaacccctatatgtgaaatttcggcttcgtgaaccttttcacaagccgatactaagttcagaaccatcgatcaatgtgcaaccactacaaccacacgaccagtttctcatatttgcatctgatggactttgggagcacttaaccaaccaagaagctgttgatattgttcacagtagcccccgcagtgtaagttagtctttcccctgtttttgatgggtttccctattcatttgaattaatgtattcgtcttccaacaaatgaacaaatcgaaggatactcactgtca

SEQ ID NO: 130880 - DNA, 177 bp, Zea Mays
atgtctgtacacgaaaacgatccagtcaccggcggtgtcagacaagcgctgcggccagcagcaggtagaggcatcccagtcccagcgcggcggcggcgttgcgcgagccggcagacctcggcaggggcgccgcgccggggtacccgctgccgctgccgtcgttctgccgcggcgtga

SEQ ID NO: 130881 - DNA, 881 bp, Zea Mays
gcaggcccagctccaaccaccgctcgtctcgtctccttcctcctctgcttcctcccgtctcgtctccgacgacctcgtctttcccccccagccagcctcgcctcaccgactccccgatccggtccctcccttcgccagctatgcatccctcctccggcgcgggggactacgccccttactacccaccttatccctccccggccgcgccgcctcccgccgcctacccgtcggtgtccgccccggcttctgcgcccccgtactcgtcgtaccccgcggacttcgcccccgcgccttcgtaccccgcgtacccgcccgccgacctcccccactacgcgccgccgccggctgcgcccgcgcccccgcagccgtactacccctacgagccggcgccggcgccgccgctgccgccgtccccgcacaacccggtgccctctccgtacccgtcgctggatcgggcggggagctacggctacggatctggccctggctccgggtacggccaggagctgtacccgcccaagccggcgggcgggtggtccgacgacggagcgtacgcttacaacgggggcgacgcgccggagccgtacgggtccaggggcaccgcaccgaggccgggctcgggatccgcgctgtttgatgactacgggaggtccattggctcagctgccgataggggtggccgtgggggtagcgcggccagccccaaggtggtgagggccgtgcccaaggcagagacgtcagaggacgtcaggggtggggtgcagaagttcagggtcaagctgctgccggagggcgctgggagccccatggatgtgctctgtcagacctggcttcaatttacttggaagttttacagcataggaggtcaccgtgaccagtaa

SEQ ID NO: 130882 - DNA, 1817 bp, Zea Mays
aattgtaaactgtgatcttccaggctgcaccaactccatctccaggtggaatggagttagcttgcctgcacactcagtcacggtggcgtccctataaggcgtaggcctgacgtcacccacgccctcgcctcgcacggggcggcgcggcggccggcggagggaatggcgaggcgaagcagaggcagcggcagcgtcacggacgcggcgtcgaaggcggacgcggcggcgatgcggatggtgtcccgcaggggcgccgtgcggctggtgctcgtgtcggccaccgcctgggccatgctcgggctcgtcgcgctcgccttccacctccggccatgcagctcccgcgtcgcattcctctcagctctttgcaaaaaagacagtaaagttctctctgtgttggactcgatggggctctcatccaaaccactccaccgctgcccgatacctgttgcggatgatccaaatgttgttgtcataccaaagaggactcccaacacaattgtgaagaagttggcatatataactgttgacaaacaggataaagatccctcaccgctgtttggaggacgtcaaaactggaaacagagggaggagagctttaaactgaactctaccatgaaggttcactgcggatttatgaaaaatagtggtgcagatatggatatcattgatgtcaagtacatacagaaatgcaaattcgtggttgcctctggtattttcgatggttacgacatccctcaccagccatccaatatcagccgccggtctcagaagctgttctgcttcctgatggtggtggacgaagtatctcttgattttatccaaaagaacaccaccgtcaagatcgacagcgctggagggaaatgggttggcatatggcgacttctaacagtgcaccgcctcccattcgacgaacctagaaggaacgggaaaatacccaagatcttgacgcacagactattccctcaagcttggtatagcatttggattgacgggaaaatggagctcatagttgatccgctgcttattctcgagaggtacctctggcgtggaaaatacacattcgcggtggctgtccacaagcatcataggagcatctacgaggagggcgacgcgatcaagcgacggaagcgctacgcccgccctttggttgatcttcagatgaagatgtactattacgaggggatggagccttggagcccgaagaaaaagatgcctggcgctaaagctataacctgcagatgtgccggagggagccgtgctgatccgggaacacacagcgacgaccaacctgttcagctgcctctggttcaacgaggtgaacctcttcaccccacgcgaccagatcagcttcggctacgtggcgcgcaggctcggcgacgctctcgagctcttcatgttccccaactgcgagtacaactcgctgttcgtcctgcacaggcacacgagggagcactcgtctaaggtggagtgggccaaaacggtcgacgagatcgtggagaaggggctgagggagagtagaggagggttggggctgtggactccgtaccctgcggacctcagctccgtggaactccctgctgtaagaagaacttcgccggcaggataaggctaggctgtcaaagaccacaaagctcccagcctagcctgccgatcctgtgatctttgattcgttcatggttgtacagagtagaactccactgtttgtttgttttttttggcgtagattctgtaggctgacgcttggagtttgttgcttccagttctgtacaacactcatctacggaggtagcacagaaggatttctcacaaaagaaaaa

SEQ ID NO: 130883 - DNA, 1798 bp, Zea Mays
aattgtaaactgtgatcttccaggctgcaccaactccatctccaggtggaatggagttagcttgcctgcacactcagtcacggtggcgtccctataaggcgtaggcctgacgtcacccacgccctcgcctcgcacggggcggcgcggcggccggcggagggaatggcgaggcgaagcagaggcagcggcagcgtcacggacgcggcgtcgaaggcggacgcggcggcgatgcggatggtgtcccgcaggggcgccgtgcggctggtgctcgtgtcggccaccgcctgggccatgctcgggctcgtcgcgctcgccttccacctccggccatgcagctcccgcgtcgcattcctctcagctctttgcaaaaaagacagtaaagttctctctgtgttggactcgatggggctctcatccaaaccactccaccgctgcccgatacctgttgcggatgatccaaatgttgttgtcataccaaagaggactcccaacacaattgtgaagaagttggcatatataactgttgacaaacaggataaagatccctcaccgctgtttggaggacgtcaaaactggaaacagagggaggagagctttaaactgaactctaccatgaaggttcactgcggatttatgaaaaatagtggtgcagatatggatatcattgatgtcaagtacatacagaaatgcaaattcgtggttgcctctggtattttcgatggttacgacatccctcaccagccatccaatatcagccgccggtctcagaagctgttctgcttcctgatggtggtggacgaagtatctcttgattttatccaaaagaacaccaccgtcaagatcgacagcgctggagggaaatgggttggcatatggcgacttctaacagtgcaccgcctcccattcgacgaacctagaaggaacgggaaaatacccaagatcttgacgcacagactattccctcaagcttggtatagcatttggattgacgggaaaatggagctcatagttgatccgctgcttattctcgagaggtacctctggcgtggaaaatacacattcgcggtggctgtccacaagcatcataggagcatctacgaggagggcgacgcgatcaagcgacggaagcgctacgcccgccctttggttgatcttcagatgaagatgtactattacgaggggatggagccttggagcccgaagaaaaagatgcctggcgatgtgccggagggagccgtgctgatccgggaacacacagcgacgaccaacctgttcagctgcctctggttcaacgaggtgaacctcttcaccccacgcgaccagatcagcttcggctacgtggcgcgcaggctcggcgacgctctcgagctcttcatgttccccaactgcgagtacaactcgctgttcgtcctgcacaggcacacgagggagcactcgtctaaggtggagtgggccaaaacggtcgacgagatcgtggagaaggggctgagggagagtagaggagggttggggctgtggactccgtaccctgcggacctcagctccgtggaactccctgctgtaagaagaacttcgccggcaggataaggctaggctgtcaaagaccacaaagctcccagcctagcctgccgatcctgtgatctttgattcgttcatggttgtacagagtagaactccactgtttgtttgttttttttggcgtagattctgtaggctgacgcttggagtttgttgcttccagttctgtacaacactcatctacggaggtagcacagaaggatttctcacaaaagaaaaa

SEQ ID NO: 130884 - DNA, 393 bp, Zea Mays
atggctgcccctcgagaggaaggcgccaccgagctcaaccaggagagccgatggccggtgtggtcttctcttctcctgtaccggtagatcctcgatgagatcgaggccaacgactacgacaacttcacccggagggcctacgttccgaagacgaagaagctgatggcgctgcccaaggcgtacctgagatcactggtgcctgtgtgggagaagctctccaagttctctggccatgctgctggcggctcctccatagagtccttgatgaagatgttagagccggctgtgctttcgcacttcaagcccgcggactatgtcaacatactggctcagatacacaaggagctagagtgctgccctcctgacgacaaggcctccctgtacctcctatag

SEQ ID NO: 130885 - DNA, 1000 bp, Zea Mays
aggaagaaaaaaaatctcacgccatctgcacctccctcctatcggtcgccctctcgccgacgccacccatggaggccgccgcgatcgccaccacctcccggtctctcccgctccccttctcatctacccagctccagcgccggcgccgtgccaccttcatacccatcgccgcctccaagcgtcacgaagacgacaaggagaccgctaaaggttccggctcggaaccccggcgcgagcccactagcctggcgccgtatggcatctccatctcgccgctctccaaggacgcggctatggggctggtggtgagcgccgccacggggagcggctggaccacgggatcgggaatggagggcccgccgacggcgagcaaagctggtggggcgggcagaccggaggtgtcgacgctgccttggtccctcttcacgaaatcaccacggcggcgcatgcgggtggccttcacctgcaacgtgtgcgggcagcgtacgaccagggccatcaatcctcatgcctacactgatggaactgtgtttgttcagtgctgcggttgcaatgtgttccataagttggtcgacaacctgaacctgtttcatgagatgaagtgctacgtcggtccagacttccgctaccaaggggatgctccattcaactaccttgacccaaacgaggataacgacactaccttccctctctgaagcctaaagcctcctttatgttgccagtacaaaattggtcggtgtcgttctaatttgctcgtatagatgtacttaataagcaggtgtacgtaccttcatgaacctgtaagattgttcagatgtatataattctacttagtgcacacaggtagtggataataatggatagacgaggaagtttatgcattcggctttgtgctccaggagcctgtagtgtgtgaacatgatatgtatgaatgtattatatatctcaagtgtgtttatggagtatatttgtgtaaagtggatttctggagtagatttgt

SEQ ID NO: 130886 - DNA, 807 bp, Zea Mays
attggcggtctttttttttagcactcggatcgtattgggcgcgtctgggctgctctgcgcccgcagattcgcgcgatttcttgcttcgattcgctcccatgctgcccgcaaacggacgcggctatggggctggtggtgagcgccgccacggggagcggctggaccacgggatcgggaatggagggcccgccgacggcgagcaaagctggtggggcgggcagaccggaggtgtcgacgctgccttggtccctcttcacgaaatcaccacggcggcgcatgcgggtggccttcacctgcaacgtgtgcgggcagcgtacgaccagggccatcaatcctcatgcctacactgatggaactgtgtttgttcagtgctgcggttgcaatgtgttccataagttggtcgacaacctgaacctgtttcatgagatgaagtgctacgtcggtccagacttccgctaccaaggggatgctccattcaactaccttgacccaaacgaggataacgacactaccttccctctctgaagcctaaagcctcctttatgttgccagtacaaaattggtcggtgtcgttctaatttgctcgtatagatgtacttaataagcaggtgtacgtaccttcatgaacctgtaagattgttcagatgtatataattctacttagtgcacacaggtagtggataataatggatagacgaggaagtttatgcattcggctttgtgctccaggagcctgtagtgtgtgaacatgatatgtatgaatgtattatatatctcaagtgtgtttatggagtatatttgtgtaaa

SEQ ID NO: 130887 - DNA, 747 bp, Zea Mays
ttacgtatctggttctggtactcctacatagtatcatcatgaagctaagcgtaaggcttgtttctttgtgcagcagataacacacacatacgctgtgactgtgaaggaggaggaagtgagtcagtagcagcaagcaagggtccaaaaccatctttctgcacggcacagactttgaaaggctcaacccctcatgactcttgaggcacaggggattcagaggcaggtctgggtacgtaggacagaatagtctgcacacacagaaactcttgtccacaccccacccaccatcccaaactttggtgagtgagtgacatacatgaaccctcgcgcggaatgaggcccgtgattttgcttccccttctacagcccagggctaattctatatgttgtggtgctgtgttgggtcatgctgctgatgctagctgcagcaaggttctttttattgcccaaacacaaacagtacctgccggaaagatggaattcctgttgcatatataggggtggaggaaggatgaggaggatgatgaaaaccacgtgtccaagttccccccttctctgcctcctcattgtcatgccagctgaatgcaatgaaacggagtggattgatttctgtgacaaacattttctttagtcgctacgtactaggagcagtcgtgtatacactcttgcaactgctgctacatgttacgtgttcctgatcctacatatgtatatagcagaagcaataatgttctggttctaaactgc

SEQ ID NO: 130888 - DNA, 4560 bp, Zea Mays
ttggctgaagtatccccaagtagtatcaaatatgttctgtcccaagttgtagctgctttcattccatctctggaaaagtgcagaggatatccttccgcgaacctatgtaaaattgttgaaatcctagaagaacttgttgtaagaaacaatagcttgctaaagcaacatatacgtgaactaccactgttacctagtataccgtctttatcggaagtaaacaaggtaatacaggaagctagagggctaatgacactgcaagatcatctgaaggatgctgtcaatggtcttcatcatgaaagcttaaatgtgaggtacatggtagcttgtgagctgagtaagttattcaatgccagaagggaggatatgactgctcttatcattggtgaagatattgctgatttggatatgataagctctttagttatggctttactaaaaggatgtgcagagcaatcaaggactgttgttggccagagactgaaactagtttgtgcagattgtcttggcgcacttggtgctattgatcctgctaagttaaaggtaagttcttgtgagcgctttaagatagaatgttcagatgatgatctgatttttgagttgatccacaagcatcttgcaagggcattcagagctgctgttgacactacagtgcaagattctgctgccttggctatccaggagctattaaaattggcaggttgccagtcttcatctagtgaagaatcaaattgttgtgagatgagctacaggggccagaagttgtgggatcgtttctcaaactatgtcaaggaaattattgccccatgcttaacatcgaggtttcatcttcctaacacaactgattctgctaaagtcagcccaatataccgccccacaatgtcctttagaaggtggatatactactggattagaaagttgtcatcacatgcaactggatcccgttctagtatttttagtgcatgccgtggaattcttcggcatgacatgccaactgcaatctatctcttaccatacttggtcttaaatgttgtctgttatggtactccagaggctcgtcagagcattactgaggaaattctgtgtgttctcaatgctgctgcttgtgaagatagtggtggggctgctgttcatgaaattgtagtggggcagagtgaggtctgtattcaagccatcttcactttacttgataaccttggacaatgggttgatgacctcaaacaggaaattgctttattccagtctacttatgccatgtctggaaagcatggaggtaaattgaaagatggaacatattctgatcatgaacaggatcaaatgctggtgcagtgtagcaatgttgctgagttgctggctgctatacctaaagttactctagcaagggcctctcttagatgtcaagctcatgctcgtgctctaatgtactttgaatctcatgtccaggagaattccggttcctccaatccagctgctgagtatagtggcaccttttcagacaatgacatatcttttcttatggaaatatatggaggactggatgagcctgatggcctcctaggtttagcgaatctaaggaagtcatcaagcctacaggatcagcttatcattaatgagaaagctggaaactgggctgaagttttaaccttatgcgaacaggccttgcaaatggaacctacctctgttcatagacaatccgatgttcttaattgtttgctaaacatgtgccaccttcaaggcatgatcgcccatgtggatggtttggtttgcagtataccccaatacaagaaaacttggtgcatgcatggagtgcaagcggcgtggcgattagggagatgggatctcatggattcatatctgactgggacagacaagggtctggtgttcagcagttctgagaacaatgcttcttttgacatggatcttgctaagatattcaaggccatgatgatcaaagatcagtttctggtcgctgaaaaaattgcccagtccaagcaagcattgcttgtacctctggctgcggcaggcatggactcatatatgcgtgcatatccttatgttgttaagctgcatatgttgcgtgagttggaagacttcaattccctattgggagacacgtcgtttattgataagtcatttggttcagacgatccaaattttctgaagttaacaaaggattgggagaaccgtctgagatgcacacagccatcattgtggacgagggaacctttacttgctctgcgaagggtggtttttagtcagagtcatatgaatgttcaggttgggaactgctggcttcagtatgctaagctctgccgcttggctggtcacaatgagacagcccaccttgcaatactagaagcagatgcctcaggtgcccccaatgctcacatggagaaggcaaagtatctctggaacatacggaagtttgatagcgctatagctgaacttcagcaaacacttctcgacatgccagcagaagttttgggaaacaccgtcctttcatctctttgtagcctctctcttgctttgccaaatgcacctatctctgcaacacaaacatcgaaagagaatccagatgtatctaaaaccctgcttctttatactagatggatccacaatacagggcaaaaacagagtgcagatatcaaatctctatattctagagtaacagaattgcgaccgaagtgggaaaagggttttttctgcatggcaaagttttttgatgatttgcttgttgatgctagaaaaaggcaagaagataagttcgcttgtaaagtcggaccaatcccttctagctctgcaagcagggcaagtgacgaaaaagagaagccttggtgtgaatttcttccgagagtgctactatgttatggaaaagcacttcacaaaggacataagaatctttttcaagcactgcctcgtatgcttactctttggtttgaatttggaagcatatacgtccgagatggatcttcctccaatcaactcatgaaagagattaatgcaaatgttttaggcctcatacgtgggtgtttgaaggatctgccaacatatcagtggcttactgtgctgtctcagttgatctcccgcatctgtcaccaaaatgctgatgttgtcagaatggtcaaatgcatcatcacatctattttacgggaataccctcaacaagctctttggatgatggctgcagtgtctaattcaactgttctggcaagacgagatgctgctgcagaaatattgcagtcagcaaagaaaggatgccggcgtgggaatccaaacagtgcactctttagtcaatttacaaatcttataggccatcttattaagctctgctctcatccagggcaagcaagggcaaaaacaataaacatctcaactgaattcagttccttgaaaagaatgatgccactaggaattatcttacctgtccagcaagctttaactgtgactctgccatcatatgattcaaatatgtcggatcaatctggttttcaccccttctcagtctctgaacatcccactatagctggaatagctgatgaagcagaaattcttaactcccttcagaaaccaaagaaggttgttttcctcggaagtgatggggttgaacgtccatttctttgcaaacctaaggatgatcttaggaaagactcacgcatgatggagttcaatgcaatgatcaaccgtctcctctccaaggtccctgagagccgcaggagaaagctctatattagaacttttgcagtggtaccacttaccgaagattgtggaatggtagaatgggtgcccaatactcgtggtcttcggcatattcttcaggacatctacataactcttgggaagtttgatagggtgaaaacaaattcacagatcaagaagatatatgacacatgccatggcaaaatgcctgacgatgtgatgctgaagacgaaaatccttccaatgttccccccagttttccacaaatggttcttgatgagattctctgaaccagctgcatggtttcgtgctagagtggcatatgcacataccacagcagtgtggtcgatggttgggcacattgtggggcttggtgacaggcatggcgaaaatatcctttttgactcgacgaccggggattgtgtgcacgtggattttagctgcctttttgataggggcttgctgctggacaagcctgaggtggtgccgtttaggctgacacagaacatgatcgatggcttgggcatcacaggttatgaaggcgtatttctcaaggtctgtgaaatcactctatctgttctcaggacccacaaggagaccctcatgactgtccttgagaccttcatccatgatccactcgtggagtggaccaaagttaacaagtctagtggaggcgaagtccagaacccgcacgcacagagggccatcaccaacatcaacgcaaggctccagggagttgtggtgggtgttaaagccagcccttccctgcctctctccgtggaaggccaagcccggcggctgatcgctgaagcagtctccctcaacaacctcggcaaaatgtacatctggtggatgccatggttctaa

SEQ ID NO: 130889 - DNA, 4791 bp, Zea Mays
atggcgacctacatcaacgagctgcgcgccctcatcgcctccacctcgacctccactgcgtccgccgagggcgccgggccggcctccgcgcacctcgaggtcaaactccgcgaggtcctcccgaacctcctacgagactacgtcgtaccctcccccaaagccgccgggagggagctcagggaagtcagcgcaatcctgaagctgatcaccttcacggcgctcaagttccccggggtcttctacaacggtcgcgccgccgacgtcctcagcgtcatcgcccgcatcctcacgttcctcgccgagcccaatttcagaggatatccttccgcgaacctatgtaaaattgttgaaatcctagaagaacttgttgtaagaaacaatagcttgctaaagcaacatatacgtgaactaccactgttacctagtataccgtctttatcggaagtaaacaaggtaatacaggaagctagagggctaatgacactgcaagatcatctgaaggatgctgtcaatggtcttcatcatgaaagcttaaatgtgaggtacatggtagcttgtgagctgagtaagttattcaatgccagaagggaggatatgactgctcttatcattggtgaagatattgctgatttggatatgataagctctttagttatggctttactaaaaggatgtgcagagcaatcaaggactgttgttggccagagactgaaactagtttgtgcagattgtcttggcgcacttggtgctattgatcctgctaagttaaaggtaagttcttgtgagcgctttaagatagaatgttcagatgatgatctgatttttgagttgatccacaagcatcttgcaagggcattcagagctgctgttgacactacagtgcaagattctgctgccttggctatccaggagctattaaaattggcaggttgccagtcttcatctagtgaagaatcaaattgttgtgagatgagctacaggggccagaagttgtgggatcgtttctcaaactatgtcaaggaaattattgccccatgcttaacatcgaggtttcatcttcctaacacaactgattctgctaaagtcagcccaatataccgccccacaatgtcctttagaaggtggatatactactggattagaaagttgtcatcacatgcaactggatcccgttctagtatttttagtgcatgccgtggaattcttcggcatgacatgccaactgcaatctatctcttaccatacttggtcttaaatgttgtctgttatggtactccagaggctcgtcagagcattactgaggaaattctgtgtgttctcaatgctgctgcttgtgaagatagtggtggggctgctgttcatgaaattgtagtggggcagagtgaggtctgtattcaagccatcttcactttacttgataaccttggacaatgggttgatgacctcaaacaggaaattgctttattccagtctacttatgccatgtctggaaagcatggaggtaaattgaaagatggaacatattctgatcatgaacaggatcaaatgctggtgcagtgtagcaatgttgctgagttgctggctgctatacctaaagttactctagcaagggcctctcttagatgtcaagctcatgctcgtgctctaatgtactttgaatctcatgtccaggagaattccggttcctccaatccagctgctgagtatagtggcaccttttcagacaatgacatatcttttcttatggaaatatatggaggactggatgagcctgatggcctcctaggtttagcgaatctaaggaagtcatcaagcctacaggatcagcttatcattaatgagaaagctggaaactgggctgaagttttaaccttatgcgaacaggccttgcaaatggaacctacctctgttcatagacaatccgatgttcttaattgtttgctaaacatgtgccaccttcaaggcatgatcgcccatgtggatggtttggtttgcagtataccccaatacaagaaaacttggtgcatgcatggagtgcaagcggcgtggcgattagggagatgggatctcatggattcatatctgactgggacagacaagggtctggtgttcagcagttctgagaacaatgcttcttttgacatggatcttgctaagatattcaaggccatgatgatcaaagatcagtttctggtcgctgaaaaaattgcccagtccaagcaagcattgcttgtacctctggctgcggcaggcatggactcatatatgcgtgcatatccttatgttgttaagctgcatatgttgcgtgagttggaagacttcaattccctattgggagacacgtcgtttattgataagtcatttggttcagacgatccaaattttctgaagttaacaaaggattgggagaaccgtctgagatgcacacagccatcattgtggacgagggaacctttacttgctctgcgaagggtggtttttagtcagagtcatatgaatgttcaggttgggaactgctggcttcagtatgctaagctctgccgcttggctggtcacaatgagacagcccaccttgcaatactagaagcagatgcctcaggtgcccccaatgctcacatggagaaggcaaagtatctctggaacatacggaagtttgatagcgctatagctgaacttcagcaaacacttctcgacatgccagcagaagttttgggaaacaccgtcctttcatctctttgtagcctctctcttgctttgccaaatgcacctatctctgcaacacaaacatcgaaagagaatccagatgtatctaaaaccctgcttctttatactagatggatccacaatacagggcaaaaacagagtgcagatatcaaatctctatattctagagtaacagaattgcgaccgaagtgggaaaagggttttttctgcatggcaaagttttttgatgatttgcttgttgatgctagaaaaaggcaagaagataagttcgcttgtaaagtcggaccaatcccttctagctctgcaagcagggcaagtgacgaaaaagagaagccttggtgtgaatttcttccgagagtgctactatgttatggaaaagcacttcacaaaggacataagaatctttttcaagcactgcctcgtatgcttactctttggtttgaatttggaagcatatacgtccgagatggatcttcctccaatcaactcatgaaagagattaatgcaaatgttttaggcctcatacgtgggtgtttgaaggatctgccaacatatcagtggcttactgtgctgtctcagttgatctcccgcatctgtcaccaaaatgctgatgttgtcagaatggtcaaatgcatcatcacatctattttacgggaataccctcaacaagctctttggatgatggctgcagtgtctaattcaactgttctggcaagacgagatgctgctgcagaaatattgcagtcagcaaagaaaggatgccggcgtgggaatccaaacagtgcactctttagtcaatttacaaatcttataggccatcttattaagctctgctctcatccagggcaagcaagggcaaaaacaataaacatctcaactgaattcagttccttgaaaagaatgatgccactaggaattatcttacctgtccagcaagctttaactgtgactctgccatcatatgattcaaatatgtcggatcaatctggttttcaccccttctcagtctctgaacatcccactatagctggaatagctgatgaagcagaaattcttaactcccttcagaaaccaaagaaggttgttttcctcggaagtgatggggttgaacgtccatttctttgcaaacctaaggatgatcttaggaaagactcacgcatgatggagttcaatgcaatgatcaaccgtctcctctccaaggtccctgagagccgcaggagaaagctctatattagaacttttgcagtggtaccacttaccgaagattgtggaatggtagaatgggtgcccaatactcgtggtcttcggcatattcttcaggacatctacataactcttgggaagtttgatagggtgaaaacaaattcacagatcaagaagatatatgacacatgccatggcaaaatgcctgacgatgtgatgctgaagacgaaaatccttccaatgttccccccagttttccacaaatggttcttgatgagattctctgaaccagctgcatggtttcgtgctagagtggcatatgcacataccacagcagtgtggtcgatggttgggcacattgtggggcttggtgacaggcatggcgaaaatatcctttttgactcgacgaccggggattgtgtgcacgtggattttagctgcctttttgataggggcttgctgctggacaagcctgaggtggtgccgtttaggctgacacagaacatgatcgatggcttgggcatcacaggttatgaaggcgtatttctcaaggtctgtgaaatcactctatctgttctcaggacccacaaggagaccctcatgactgtccttgagaccttcatccatgatccactcgtggagtggaccaaagttaacaagtctagtggaggcgaagtccagaacccgcacgcacagagggccatcaccaacatcaacgcaaggctccagggagttgtggtgggtgttaaagccagcccttccctgcctctctccgtggaaggccaagcccggcggctgatcgctgaagcagtctccctcaacaacctcggcaaaatgtacatctggtggatgccatggttctaa

SEQ ID NO: 130890 - DNA, 1404 bp, Zea Mays
gttgttgttgcgttgccccgacccagacccccgagcagtttctcacccacaccacaccacaccacacacgtccacaccgcgcgcgcgttatccattatccgtctcgtcgtcgcccgtatctatccgatccgcctgctccgtcactgacagacatcctgctctagctagctttggtccccaaatgccgcaaggataggacatgacacagcaagctggaagatcaccagtcgcaacagtattagttaacaacgagggaaaggagaaactgatgtgattagcaagcacgggcacggtaaagcagagagcctcttgctgttagtgaactaaggcgacggagaccgcgagggcggcgaactaggctgggcagcgatgatggcgacctcggccagcggcgtctccctcctcctcctcctcgcccatccggcgccgccaccgcaccccgccaacggcgccagcagcctgtggcgcggcggtggcgccgcgctagctcctcatcctgctcgcttcgcggccaagaggaggacgctccggttggttaacgtcagcgtcagctgcagcgccgaggcgctgcgctccgacggcgctggcgcggagccggcggtgccgcggtctgtgccggtgcgcgtcgcctacgagctgcaacaggccggccaccgctacctcgacgtcagaacggagggcgagtttagcgccggccaccctgaaggagctgtgaacatcccatacatgaacaaaaccggctcaggaatgacgaaaaacgctcactttctcgagcaagtgtcgagggctttcgggaaggacgacgagatcatcgtgggctgccaaagcggcaagaggtctctcatggcggcgaccgagctctgctccgctggcttcaccgctgtcaccgacatcgccggcggattctcgacctggagggagaacgagctgcctaccgtccagtgacggtgatttcagcctgcctcgccggcgtcgtaagtgtggttggagcttgcccagcgttttctgtccaagcctgtacatatgtcttcctgccttctgctatagttctggaataaagagtgctggggaatggaatggagcatgttgtaaagtaaagcacaacgagtaggcttctttcttttttacgtcatgcttcatctcatgcataggacattcttatctgctcggtactccctgcatgcggatttgttcatagtatgggtttcctcgtcgaactctgaaactagacaccttacccctctgaactctcaagaccactcagacgagtcagatcaccttctgtcttggtttggaatgattttatccttttttatagccaaaatcattaaatacatgagcagtccccatttctattactatcataacagaaatacaaagcagtttggatagttcccacatata

SEQ ID NO: 130891 - DNA, 1369 bp, Zea Mays
gttgttgttgcgttgccccgacccagacccccgagcagtttctcacccacaccacaccacaccacacacgtccacaccgcgcgcgcgttatccattatccgtctcgtcgtcgcccgtatctatccgatccgcctgctccgtcactgacagacatcctgctctagctagctttggtccccaaatgccgcaaggataggacatgacacagcaagctggaagatcaccagtcgcaacagtattagttaacaacgagggaaaggagaaactgatgtgattagcaagcacgggcacggtaaagcagagagcctcttgctgttagtgaactaaggcgacggagaccgcgagggcggcgaactaggctgggcagcgatgatggcgacctcggccagcggcgtctccctcctcctcctcctcgcccatccgcctgtggcgcggcggtggcgccgcgctagctcctcatcctgctcgcttcgcggccaagaggaggacgctccggttggttaacgtcagcgtcagctgcagcgccgaggcgctgcgctccgacggcgctggcgcggagccggcggtgccgcggtctgtgccggtgcgcgtcgcctacgagctgcaacaggccggccaccgctacctcgacgtcagaacggagggcgagtttagcgccggccaccctgaaggagctgtgaacatcccatacatgaacaaaaccggctcaggaatgacgaaaaacgctcactttctcgagcaagtgtcgagggctttcgggaaggacgacgagatcatcgtgggctgccaaagcggcaagaggtctctcatggcggcgaccgagctctgctccgctggcttcaccgctgtcaccgacatcgccggcggattctcgacctggagggagaacgagctgcctaccgtccagtgacggtgatttcagcctgcctcgccggcgtcgtaagtgtggttggagcttgcccagcgttttctgtccaagcctgtacatatgtcttcctgccttctgctatagttctggaataaagagtgctggggaatggaatggagcatgttgtaaagtaaagcacaacgagtaggcttctttcttttttacgtcatgcttcatctcatgcataggacattcttatctgctcggtactccctgcatgcggatttgttcatagtatgggtttcctcgtcgaactctgaaactagacaccttacccctctgaactctcaagaccactcagacgagtcagatcaccttctgtcttggtttggaatgattttatccttttttatagccaaaatcattaaatacatgagcagtccccatttctattactatcataacagaaatacaaagcagtttggatagttcccacatata

SEQ ID NO: 130892 - DNA, 1193 bp, Zea Mays
gttgttgttgcgttgccccgacccagacccccgagcagtttctcacccacaccacaccacaccacacacgtccacaccgcgcgcgcgttatccattatccgtctcgtcgtcgcccgtatctatccgatccgcctgctccgtcactgacagacatcctgctctagctagctttggtccccaaatgccgcaaggataggacatgacacagcaagctggaagatcaccagtcgcaacagtattagttaacaacgagggaaaggagaaactgatgtgattagcaagcacgggcacggtaaagcagagagcctcttgctgttagtgaactaaggcgacggagaccgcgagggcggcgaactaggctgggcagcgatgatggcgacctcggccagcggcgtctccctcctcctcctcctcgcccatccggcgccgcgctagctcctcatcctgctcgcttcgcggccaagaggaggacgctccggttggttaacgtcagcgtcagctgcagcgccgaggcgctgcgctccgacggcgctggcgcggagccggcggtgccgcggtctgtgccggtgcgcgtcgcctacgagctgcaacaggccggccaccgctacctcgacgtcagaacggagggcgagtttagcgccggccaccctgaaggagctgtgaacatcccatacatgaacaaaaccggctcaggaatgacgaaaaacgctcactttctcgagcaagtgtcgagggctttcgggaaggacgacgagatcatcgtgggctgccaaagcggcaagaggtctctcatggcggcgaccgagctctgctccgctggcttcaccgctgtcaccgacatcgccggcggattctcgacctggagggagaacgagctgcctaccgtccagtgacggtgatttcagcctgcctcgccggcgtcgtaagtgtggttggagcttgcccagcgttttctgtccaagcctgtacatatgtcttcctgccttctgctatagttctggaataaagagtgctggggaatggaatggagcatgttgtaaagtaaagcacaacgagtaggcttctttcttttttacgtcatgcttcatctcatgcataggacattcttatctgctcggtactccctgcatgcggatttgttcatagtatgggtttcctcgtcgaactctgaaactagacaccttacccctctg

SEQ ID NO: 130893 - DNA, 1306 bp, Zea Mays
gttgttgttgcgttgccccgacccagacccccgagcagtttctcacccacaccacaccacaccacacacgtccacaccgcgcgcgcgttatccattatccgtctcgtcgtcgcccgtatctatccgatccgcctgctccgtcactgacagacatcctgctctagctagctttggtccccaaatgccgcaaggataggacatgacacagcaagctggaagatcaccagtcgcaacagtattagttaacaacgagggaaaggagaaactgatgtgattagcaagcacgggcacggtaaagcagagagcctcttgctgttagtgaactaaggcgacggagaccgcgagggcggcgaactaggctgggcagcgatgatggcgacctcggccagcggcgtctccctcctcctcctcctcgcccatccggcgccgccaccgcaccccgccaacggcgccagcagcctgtggcgcggcggtggcgccgcgctagctcctcatcctgctcgcttcgcggccaagaggaggacgctccggttggttaacgtcagcgtcagctgcagcgccgaggcgctgcgctccgacggcgctggcgcggagccggcggtgccgcggtctgtgccggtgcgcgtcgcctacgagctgcaacaggccggccaccgctacctcgacgtcagaacggagggcgagtttagcgccggccaccctgaaggagctgtgaacatcccatacatgaacaaaaccggctcaggaatgacgaaaaacgctcactttctcgagcaagtgtcgagggctttcgggaaggacgacgagatcatcgtgggctgccaaagcggcaagaggtctctcatggcggcgaccgagctctgctccgctgtaagctaggggatggccggcccgactccatcacctcctcctcacaaattcgctcttgccgttctgcgactcgatgccagtcaatccaatcactgctaccgtgttttcagggcttcaccgctgtcaccgacatcgccggcggattctcgacctggagggagaacgagctgcctaccgtccagtgacggtgatttcagcctgcctcgccggcgtcgtaagtgtggttggagcttgcccagcgttttctgtccaagcctgtacatatgtcttcctgccttctgctatagttctggaataaagagtgctggggaatggaatggagcatgttgtaaagtaaagcacaacgagtaggcttctttcttttttacgtcatgcttcatctcatgcataggacattcttatctgctcggtactccctgcatgcggatttgttcat

SEQ ID NO: 130894 - DNA, 1296 bp, Zea Mays
acgaccccaaaagcatcatctctcttcagcgagataccaaacatacgagtagtaacaatcatccgatgatggggtggtgcgaggtaggcatgatgaaggttctcgtcctcagcctcgtggccggcgccgtcgccgccgtgcggccgagcaagctgctgccggcggcggtgcctgcggtgtacgtgttcggggactcgacgctggacgtcggcaacaacaactatttgcccgggaaggatgtgcccagggctgacaagccctactacggcatcgacttgccgggctccggcaagcccaccggaaggttcagcaatggctacaacaccgccgacttcgtcgcccaagctctgggattcaagaagagcccccttgcttatctggagctgaaagcgcggaagatgctaatcccgagcgctgtcacgagaggagtaagctatgcatcggcaggagctgggattctggattccactaacgccggaaacaacatcccgctgtcgcagcaggtgcggctgttcgagtcgaccaaggccgagatggaggccgcagtgggccagcgcgcggtgcgcaagctgctctccgcttccttcttcctcgtcagcgccggcagcaacgacttcttcgcgttcgcgacggcaatggcggagcagaacaggacagcgacgcaggccgacgtcacggccttctacggcagcctcctctccaactactctgccaccatcaccgagctgtacaagctgggcgccaggaaggtgggcatcgtcaacgtgggcccggtcggctgcgtgcctcgcgtgcgcgtgctgaacgccaccggcgcgtgcgccgacggcctgaaccagctggccggcggcttcgacggcgcgctcaggtccgccgtggccgcgctcgccgcggaccagctgccggggctggcctactccgtggccgacagcttcgggttcacgcaggcgtcgctggccgacccgctggggctggggttcgcgagcgccgacagcgcgtgctgcgggagcgggcggctgggcgcgcagggcgactgcacgcccgcggccacgctctgcgccgaccgtgaccgctacgtcttctgggactccgtgcacccgtcgcagcgggccgccatgctgggcgcgcaggcctactatgatggcccggcccagtacacctcgcccgtcagcttcaagcagctggcccgcatgaggataggctgatttctcattttttgttgtattcttgtggcccatatagcggcaataacggtaataaagtcagtgtaacaagtgaaaaaggattatctgactg

SEQ ID NO: 130895 - DNA, 1312 bp, Zea Mays
agaatcatatcggtggacggctgtacgtactgtaccatggggtggtacgacgggctgcttctcatgaaggctcttgttgttcttaccggcagcatgctggtgctcagcgccgccgccgtagagcggcggcgggtgccggcgatgtacgtgttcggggactccaccctggacgtgggcaacaacaaccacttgcaagggaagcaggtcccccgggccaacaagccctactacggcatcgacctgcccggctccggcaagcccaccgggaggttcagcaatggctacaacgtcgccgacttcgttgcgaagcatctagggttcgagaagagccccctggcttatctggtgctgaaagcgcgcaattacctgatcccgagcgccatcaccagaggagtgagctacgcatcggcaggagctggcatcctcgactccactaacgccggaggcaacctcccgctgtcgcagcaggtgcggctcttcgccgccaccagggccgccatggaggccaaggtgggcgcgcgcgcggtggccgagctcctctccaggtccttcttcctcgtcggcgtcggcagcaacgacttcttcgccttcgccacggcgcaggccaaagggaacagcacggcggtgggcgtgggcacccagagcgacgtcgtcgccgccttctacggcagcctcgtatccaactacgcagccgccatcacggagctgtacaagctgggcgccaggaaattcggcatcatcaacgtggggcctgtcggctgcgtgccggccgtgcgcgtgctcaacgccaccggcgggtgcgccgacgccatgaaccagctggccgcggccttcgacggcttcctcgactccctcctggccgggctcgccgcgaggctgccggggctcgcctactccgtcgccgactccttcggcttcgccgcgcgcaccgacccgctggcgctggggttcgttagccaggacagcgcgtgctgcggcggcggcagcctcggcgcggagaaggactgcctgcccggcgcccagctctgcgccgaccgcgaccgcttcctcttctgggaccgcgtgcacccttcccagcgcgccgccatgctcagcgcccaggcgtactacgacggccccaaggagttcaccgcgcccatcagcttcaagcagctggctgacaagatagtaatcaaataatgtatttctgtttgttgtacatgctcacataataatcgtcgctatatttttttgttcgttgcaatttcccttcagaaaataattaaatgagtggattgaatcaaggccggaataatttattgacttaataagt

SEQ ID NO: 130896 - DNA, 270 bp, Zea Mays
atggcacaaatgctggtgcgatggcgtgatcgtcacggtgctggcgttgggttcggacgactgtacgacgtcgacaacacgacgaggctaagcagtagagtcgccgaacttcggcgagcatgggcaaggctccggcgagcagcgtcgatggcgaataacgcagacgagcgcggcagcacgacgcgagcgtgggcgtacaggatggcgcagcagcagtggctcggcagggggcgagttcgatgcatacatggaatcggcggcgagcactga

SEQ ID NO: 130897 - DNA, 1336 bp, Zea Mays
gggctacagcctacagacctacagcaagcgctggccatggcagagcattttgtgctgtgccccgtgatggcagtactattactatccatggacgtcctcggcgccgccgccggcgtcttcaagccgccgccggcgatgtacgtgttcggcgactcgacgctggacgtcggaaacaacaactacctgccgggagcgggcgtccccagggccaacaggccctactacggcgtcgacttccccggcggccttcccaccggaaggttcagcaacggctacaacaccgccgatttcattgcaaagtgcatagggttcgtgagcagccctccgccgtacctgtcgctgctgggagcagcaagctgcggcggcggccttctggttccgacggctctcactatcggcgtcagctatgcttccggaggagctggcatcctcgactccacgaacgccggcaacacgatcccgctatcgaagcaggtgcagtacttcaacgccacgaggtcggagatgatcgccgcggcgggctcctccgacgcggtggacgccctgatcaaccggtccttcgtcctcatcctcgtcggcggcaacgacctgtccgcattcgcgaacgcggagcgggcgcggaacaggtccggcgccgacctggagagccacgacgcggccgccttctacggcggcctcgtctccaactactcggccgccatcaggggcctgcacgcgctgggcgtgcggaggctggccgtcgtcaacgtggggctcgcagggtgcctgcccgtggcgcgggtgctggacgccacgggcgcgtgcgccgaggaccggaaccggctcgccgccggcttcaacgccgcgctgcgctccctgctcgccggcctcgcgtccccctcctctaggtccgggctgcccggcctctcctactccctggccgactcgctcggcctcatggcggacaccttcgcccacccgctggcgtcggggttcacggacgtcgccaacgcgtgctgcggcggcggccggctcggcgccgaggcgccctgcgcaccgaacgcgacgctctgcgccgaccgcggcctttactacttctgggacagcgtgcacccttctgagcgggccgcagcgctcagagcccaggctttctgcgatgggccagctcaatacactacgcccatcaacttcaagcagttggtccacatggcatgatcggttttagcccatttgcttattcagacccagcgaaacaattatacaaagatgatattatgtcaaaagtgaaccatggtacatcccttgttacatggacaattgaccggaaaaataaagaaataatattgaacaagctttc

SEQ ID NO: 130898 - DNA, 819 bp, Zea Mays
tgccatgccatgcctacatctaatctactctacctgagctcctcgctggcgccggctgtagcggcgccgcggcaggagcgggcgcaggagctcagggcgacgtcgcggacccggagccccgtgtcgtgcacctgcccaggtcgccagtcagccggcagcacgtccccgccggcccgcagccacttgccgccgacgccggccgtgacgacgaggcggagctgcagcggcccggccggcgcgcttgaggtgcgccacgtcacgatgccgcgcctgcgcaagggcgccatgggccgccacgacggcggctgcgcgtgcgcgtgcgagagctcgacggccgcgatgtccgtctgcccgccctggtacaggaaggtgatggccaggtgcgccgggtgccggctcccttcctcgtcgatgcgtacagacaggttcctgttcttgtactcgcaaggtactgcagaaacagcatcacctcctgaagtcgacctcaaccatattgccacccaagccgggcagcagttggtcatcggacgaaacgcgcggcctggccatcatcgcagcgaaagcctctcgggtgagcacgaaccccgtccggttggccaagccggctaccacgacgaccttgacggcgccggcgccgcacaccctccggtctctgcacctcaactgcaagcaggaaggtgtccatatataatccatttgatgaacacacattgcggatgagcaagtcgtccgcactgcagtgcacccactgacccacacggccacacccacctggtagcaggcgccgcagccggcaccggcgcggaaggagtcggcgcc

SEQ ID NO: 130899 - DNA, 174 bp, Zea Mays
atgagtggcactggtctggcagaaggccgagctctggttgcaattgtcggctgggccgcgcctctggactggacagctggagtggatggatgggtcatcgacattgcaatgcaatgcaagcaacttgcatctggatctcagacctcgcagctcactggcactgcggatcaataa

SEQ ID NO: 130900 - DNA, 728 bp, Zea Mays
atggcgcggggcgtcatgttgcacgcgcccctcgcgcccgagatctccaaccttgtgaagaaggcactcaagtcagctctaactcacttgaaagcagatcatgaaggagattttcttagccgttatggccagaggattcctcatgaggccttcggatttgatacttcatggcccataacagatgagggattcacgatggctaagtcaaaggaccacatggcacataaccagtcgtacaaggcgcacaagaacaacatcaagaaacccatgcgcggctgccagacctccaccaaggggaaccgcaggttcttaacaaagctcatgatgatgcttggagccgtgctcagaatagcggaatctgaaagcaacaaattgaaggctatgtcaagagcatcactgatgcgccttggctcatgtgttgtaggttctgtgcatgaggagcactggttcagccttatctatttcttccgcttctgtcaggctcttttgcatgcgtcggttgctttggacaggaaacttgtggtagactgggttccttcctgtgatcttgaagattctgcagcagaagagaatcttgatgcctacgaaaaagcatgggaattgttaaagggtgcagatggtgtgttggtgccaggggttttggagacagaggagttcaagggaaaattctggctacaaaatacgcgcgagaaaacaacattccatatcttggcatttgcttgggcatg

SEQ ID NO: 130901 - DNA, 308 bp, Zea Mays
gaatgtgtgatggagaagtaagcaagtacaccgcaccggccggccgcaaaatcgatcggtcgtttaccaacaggacaatggcggatctcaccgccctgcactgccgctgcggcagccacaccggcccggccggccagtcaggcaggcaaagaccatgcatgcgcgcacgcaacgtgagacagatagacaggtccgctcgcacgggcgcgtcctctgccggggaccgatccgatccggccgtcgttacgtccgccggcgtgtcgccgtccgccatgatccgttccgatgcaccacccaccaccccaacg

SEQ ID NO: 130902 - DNA, 108 bp, Zea Mays
atgcacattataggaaacaaccaatgatggctgctttgttgcaatgtagggtctccaactatgatgggtgttttgatgacttgtcttgatgaacaagatgaagagatg

SEQ ID NO: 130903 - DNA, 353 bp, Zea Mays
acggccatggggcagagagctccatccatcctactgcttcagggagcaagggcaccgagcaaggctcgtgcaggggagaaaaaagcaggggtagggctggtggattggggaggcaagcgtggaggagctcaactcaatgggaaggggagcaaggctgctggggagcacggctggaggtaggagatgaatgcctcggagagaagcacggtgtcggcgatgcgctggtactgggcgtagtagaggtgggcgatgcgggtgacgatctcgccgacctgccagcggcggaggcccgcgtcgagaaggcggtgacggtgctcctgctgcatccgccagagttggaggcgggtgtctga

SEQ ID NO: 130904 - DNA, 249 bp, Zea Mays
cagaaatggtagagatgctactttgcatgaaagattgggaactaggagaagctagaggccaacactctacacaggatgaagaccttgaagaagcatttgaaggactttatcttgatgacccttagggcctagggccctacactttgtaatctcctactattcttcctattcctactctattctagtgatctggacatctggtgatgtaaactgtactcttagacatgaacttattaaatcagagctggg

SEQ ID NO: 130905 - DNA, 3191 bp, Zea Mays
aacaacataaaataaaaaaaggcaaaccgggaagcgtgcaagcccaaaggccaatcggcccagaaccagctccacggttgttcgtgtccgcccacgtggcacgcccggccattccgggcccacagatccggctcagggtcatgtgccactgccatggccccctccttgtcgcagcggcagattgcgacggggaagaaaggtgaggagaccaagcgaaaaaaatcacgctttcattgcgaggggggaggatagggaggaagacgccaagccagctccagtccggcacccgatataaagcggcaggcacttggattgctgacgagatgggactcacacgccgtcacaatgctgtgcctcgtgtcgccctcttcctcgccgactccgcttccgccgccgcggcgctctcgctcgcatgctgatcgggcggcaccgccggggatcgcgggtggcggcaatgtgcgcctgagtgtgttgtctgtccagtgcaaggctcgccggtcaggggtgcggaaggtcaagagcaaattcgccactgcagctactgtgcaagaagataaaactatggcaactgccaaaggcgatgtcgaccatctccccatatacgacctggaccccaagctggagatattcaaggaccatttcaggtaccggatgaaaagattcctagagcagaaaggatcaattgaagaaaatgagggaagtcttgaatctttttctaaaggctatttgaaatttgggattaatacaaatgaggatggaactgtatatcgtgaatgggcacctgctgcgcaggaggcagagcttattggtgacttcaatgactggaatggtgcaaaccataagatggagaaggataaatttggtgtttggtcgatcaaaattgaccatgtcaaagggaaacctgccatccctcacaattccaaggttaaatttcgctttctacatggtggagtatgggttgatcgtattccagcattgattcgttatgcgactgttgatgcctctaaatttggagctccctatgatggtgttcattgggatcctcctgcttctgaaaggtacacatttaagcatcctcggccttcaaagcctgctgctccacgtatctatgaagcccatgtaggtatgagtggtgaaaagccagcagtaagcacatatagggaatttgcagacaatgtgttgccacgcatacgagcaaataactacaacacagttcagttgatggcagttatggagcattcgtactatgcttctttcgggtaccatgtgacaaatttctttgcggttagcagcagatcaggcacaccagaggacctcaaatatcttgttgataaggcacacagtttgggtttgcgagttctgatggatgttgtccatagccatgcaagtaataatgtcacagatggtttaaatggctatgatgttggacaaagcacccaagagtcctattttcatgcgggagatagaggttatcataaactttgggatagtcggctgttcaactatgctaactgggaggtattaaggtttcttctttctaacctgagatattggttggatgaattcatgtttgatggcttccgatttgatggagttacatcaatgctgtatcatcaccatggtatcaatgtggggtttactggaaactaccaggaatatttcagtttggacacagctgtggatgcagttgtttacatgatgcttgcaaaccatttaatgcacaaactcttgccagaagcaactgttgttgctgaagatgtttcaggcatgccggtcctttgccggccagttgatgaaggtggggttgggtttgactatcgcctggcaatggctatccctgatagatggattgactacctgaagaataaagatgactctgagtggtcgatgggtgaaatagcgcatactttgactaacaggagatatactgaaaaatgcatcgcatatgctgagagccatgatcagtctattgttggcgacaaaactattgcatttctcctgatggacaaggaaatgtacactggcatgtcagacttgcagcctgcttcacctacaattgatcgagggattgcactccaaaagatgattcacttcatcacaatggcccttggaggtgatggctacttgaattttatgggaaatgagtttggtcacccagaatggattgactttccaagagaagggaacaactggagctatgataaatgcagacgacagtggagccttgtggacactgatcacttgcggtacaagtacatgaatgcgtttgaccaagcgatgaatgcgctcgatgagagattttccttcctttcgtcgtcaaagcagatcgtcagcgacatgaacgatgaggaaaaggttattgtctttgaacgtggagatttagtttttgttttcaatttccatcccaagaaaacttacgagggctacaaagtgggatgcgatttgcctgggaaatacagagtagccctggactctgatgctctggtcttcggtggacatggaagagttggccacgacgtggatcacttcacgtcgcctgaaggggtgccaggggtgcccgaaacgaacttcaacaaccggccgaactcgttcaaagtcctttctccgccccgcacctgtgtggcttattaccgtgtagacgaagcaggggctggacgacgtcttcacgcgaaagcagagacaggaaagacgtctccagcagagagcatcgacgtcaaagcttccagagctagtagcaaagaagacaaggaggcaacggctggtggcaagaagggatggaagtttgcgcggcagccatccgatcaagataccaaatgaagccaggagtccttggtgaggactggactggctgccggcgccctgttagtagtcctgctctactggactagccgccgctggcgcccttggaacggtcctttcctgtagcttgcaggcgactggtgtctcatcaccgagcaggcaggcactgcttgtatagcttttctagaataataatcagggatggatggatggtgtgtattggctatctggctagacgtgcatgtgcccagtttgtatgtacaggagcagttcccgtccagaataaaaaaaaacttgttggggggtttttcttctactctgtagtctgttcttgctagaacaaagtagataattgtctaaatatttctagcaaagtaacaataaaaaaaaga

SEQ ID NO: 130906 - DNA, 3175 bp, Zea Mays
aacaacataaaataaaaaaaggcaaaccgggaagcgtgcaagcccaaaggccaatcggcccagaaccagctccacggttgttcgtgtccgcccacgtggcacgcccggccattccgggcccacagatccggctcagggtcatgtgccactgccatggccccctccttgtcgcagcggcagattgcgacggggaagaaaggtgaggagaccaagcgaaaaaaatcacgctttcattgcgaggggggaggatagggaggaagacgccaagccagctccagtccggcacccgatataaagcggcaggcacttggattgctgacgagatgggactcacacgccgtcacaatgctgtgcctcgtgtcgccctcttcctcgccgactccgcttccgccgccgcggcgctctcgctcgcatgctgatcgggcggcaccgccggggatcgcgtttcgcagggtggcggcaatgtgcgcctgagtgtgttgtctgtccagtgcaaggctcgccggtcaggggtgcggaaggtcaagagcaaattcgccactgcagctactgtgcaagaagataaaactatggcaactgccaaaggcgatgtcgaccatctccccatatacgacctggaccccaagctggagatattcaaggaccatttcaggtaccggatgaaaagattcctagagcagaaaggatcaattgaagaaaatgagggaagtcttgaatctttttctaaaggctatttgaaatttgggattaatacaaatgaggatggaactgtatatcgtgaatgggcacctgctgcgcaggaggcagagcttattggtgacttcaatgactggaatggtgcaaaccataagatggagaaggataaatttggtgtttggtcgatcaaaattgaccatgtcaaagggaaacctgccatccctcacaattccaaggttaaatttcgctttctacatggtggagtatgggttgatcgtattccagcattgattcgttatgcgactgttgatgcctctaaatttggagctccctatgatggtgttcattgggatcctcctgcttctgaaaggtacacatttaagcatcctcggccttcaaagcctgctgctccacgtatctatgaagcccatgtaggtatgagtggtgaaaagccagcagtaagcacatatagggaatttgcagacaatgtgttgccacgcatacgagcaaataactacaacacagttcagttgatggcagttatggagcattcgtactatgcttctttcgggtaccatgtgacaaatttctttgcggttagcagcagatcaggcacaccagaggacctcaaatatcttgttgataaggcacacagtttgggtttgcgagttctgatggatgttgtccatagccatgcaagtaataatgtcacagatggtttaaatggctatgatgttggacaaagcacccaagagtcctattttcatgcgggagatagaggttatcataaactttgggatagtcggctgttcaactatgctaactgggaggtattaaggtttcttctttctaacctgagatattggttggatgaattcatgtttgatggcttccgatttgatggagttacatcaatgctgtatcatcaccatggtatcaatgtggggtttactggaaactaccaggaatatttcagtttggacacagctgtggatgcagttgtttacatgatgcttgcaaaccatttaatgcacaaactcttgccagaagcaactgttgttgctgaagatgtttcaggcatgccggtcctttgccggccagttgatgaaggtggggttgggtttgactatcgcctggcaatggctatccctgatagatggattgactacctgaagaataaagatgactctgagtggtcgatgggtgaaatagcgcatactttgactaacaggagatatactgaaaaatgcatcgcatatgctgagagccatgatcagtctattgttggcgacaaaactattgcatttctcctgatggacaaggaaatgtacactggcatgtcagacttgcagcctgcttcacctacaattgatcgagggattgcactccaaaagatgattcacttcatcacaatggcccttggaggtgatggctacttgaattttatgggaaatgagtttggtcacccagaatggattgactttccaagagaagggaacaactggagctatgataaatgcagacgacagtggagccttgtggacactgatcacttgcggtacaagtacatgaatgcgtttgaccaagcgatgaatgcgctcgatgagagattttccttcctttcgtcgtcaaagcagatcgtcagcgacatgaacgatgaggaaaaggttattgtctttgaacgtggagatttagtttttgttttcaatttccatcccaagaaaacttacgagggctacaaagtgggatgcgatttgcctgggaaatacagagtagccctggactctgatgctctggtcttcggtggacatggaagagttggccacgacgtggatcacttcacgtcgcctgaaggggtgccaggggtgcccgaaacgaacttcaacaaccggccgaactcgttcaaagtcctttctccgccccgcacctgtgtggcttattaccgtgtagacgaagcaggggctggacgacgtcttcacgcgaaagcagagacaggaaagacgtctccagcagagagcatcgacgtcaaagcttccagagctagtagcaaagaagacaaggaggcaacggctggtggcaagaagggatggaagtttgcgcggcagccatccgatcaagataccaaatgaagccaggagtccttggtgaggactggactggctgccggcgccctgttagtagtcctgctctactggactagccgccgctggcgcccttggaacggtcctttcctgtagcttgcaggcgactggtgtctcatcaccgagcaggcaggcactgcttgtatagcttttctagaataataatcagggatggatggatggtgtgtattggctatctggctagacgtgcatgtgcccagtttgtatgtacaggagcagttcccgtccagaataaaaaaaaacttgttggggggtttttcttctactctgtagtctgttcttgctaggttgacgaagatgtttgatattagatgcca

SEQ ID NO: 130907 - DNA, 2343 bp, Zea Mays
gtagcccccttcaatatctgttcccagtatcccccttcaaatctttgatgggggttgtgaatcatgatcctctaataaccataccctggaaggctggaacaaatttcgttccaaaagggacataatcagagaaggccagttaagggggcagtgagaagggatggcgatggagttggccaagcaattgctcgtcgctgttctcagaagctatgcaccacctctctgggctacaatcattgccagtgtttttgttatcatctccgtctcactgtccctgtacttgctactcaatcatctgtcagcctacaaaaacccagaggaacagaagtttcttgtcggcgtcatcctcatggtgccatgctatgcagtcgagtcgtatatatcattggtatatccgtcaataagtgtggacatcgaaattatgcgagatggttatgaggcatttgctatgtactgttttgggcgctatctagttgcttgcttaggtggtgaagataggacaattgaatttttgaaaagggaaggtggttcaggttctgctgtaccactcttaggccaagcatctgaacaacgatatgtaaaccatccatttccaatgaactacatgcttaaaccatggccgctaggcgaatggttttacttggtcatcaaatttgggctagttcaatatatgataataaaatcaatatgtgctattcttgcggtgattcttgaatcctttggagtgtactgtgaaggagagtttaagttgaactgtgggtactcttacacggctgtggttctcaatttcagtcagtcatgggccttatactgtctcgttcagttctatgctgtgataaaggatgagttagctcatataaagcctcttgcaaagtttctgacattcaagtctattgtgttcttaacatggtggcaaggtatagcaattgcactgctcttcaactggggttcgttgagaggccctattgctcaagaattgcagttcaagtcaagtatccaagactttattatctgcatagagatgggtgttgctgccgttgcccacctgtatgtcttccctgcgaagccatacgagctaattggtgattgttttgttggagatgtttcagttcttggagattatgcttctgtcgactgccctctagaccccgatgaagtcaaggatagtgagcgcccaaccaagtttaggctcccccagccagatgatcatgttaggtgttccactgccataaaagaaagcgtccgtgatgtcgtacttgggggcggtgaatacattgtgaatgacttgaagtttaccgtgaaccatgctgtggaacccatcaatgaaaagctgcacatgatatccgagaacatcaaaaagcgtgagaagggaaagaggaaaacgaatgatgatagctgcatcagttcaccaacatccttgaccagggtcatcagtgggattgatgatccgctcctgaacggaagcttgagtgacaacagcggtccaaagaaagcacggaggcagcgcaggaaatcaggctatgcaagcgcagagagcggtggggagagcagcgaccatggcctaggcgggtttgagatccgagggaacagatggattactagggagtgacagctaggagcaatctgtggagatactatgtaaatgtcacaggagttggcctgtggtgatgtgcgataaccgggccagtgggttctgagcgtaagacgaggtctctagcaatgatatgttgtagcgtgactaaatcgagatgagcaatcaggttgttgtctgttgattctttcggctgaccatttcggctgctgaggccttgatcctgtatttgagatgtcaggcctacttagagcaaatgctggaaggaagcaatgtgcctgttctgaggtccctccagcatcacttgtaatttgtaaagtactcaagtacagactagaactagtcatgcataccagaagaatagatagatgtttcagaagttgaggcctgagatgccgtgccactctatttgctctgtttcatgctttgccgttattatatcactattttcactgttcattctaaggccgttgtcacacgggtaccagaagagcagaacacctttttacgttccttttgctgctatggatggacttcgagagttccttgagaaagcactctcatctatctttccaattccttgtttccttgtggatcctgatcactgaagatggccatttgatttttcacttttcagttatatataaagtgaagacggttgtctcacgcaatatgtgaagtgcaagatgagctctacactgcaaggaaccccaagaaaaaaccacaggtaagtttgtctgattgacaacggc

SEQ ID NO: 130908 - DNA, 214 bp, Zea Mays
atcttcgaaatatcgagaggggcggcgcgttggggatccttgtgcgccggtaccgccatggggtgattcatgaaaggtggcgtcgagtccccgatgggtggtcagggagagtcgctggtgctaaccacgcgccattggggtctttccagatgagaatattcaccgggggcacacaaattgctcgtcggagtggacgcttcgccttggatcagcg

SEQ ID NO: 130909 - DNA, 210 bp, Zea Mays
atgacctatggtgccaagattatggtcgcggaattgaaggagctcggagagatggatgcacccgttgttggcttctttaaaattagggaggaaggcaatgatatgcggtcgcttctggagcttgtgaaggagcttcgtcctcggtggatgaaattgtatgtgcgggacatgcatcatacagtttttactcgccatggagaccaaaagtag

SEQ ID NO: 130910 - DNA, 1318 bp, Zea Mays
cggatttcccttcagcaaccgctagagcctcctcaccccgcccttccctcgtcttctccacccgctgccgcctgccatggggaactgcgccagcgccatcgacgccttcgtccagcgcggcaacagggcgtcgccggccgctactgctggaatgtccgcgtcgaggaggactagtagctctgccaccacggggaagctgtcaacgcttagcagcgccagcaccttcatgccatccacggttagtggcggcgacgacgacgacgatgacccagtgggccagatcctcgagtccccaaacctcaagatatacaccttcgcggagctcaagagcgccaccaggaacttcaggccggagacggtgctcggggagggcgggttcggcaaggtgtacaagggctgggtcgatgagaagaccatgaacccatccaaggctagcactggcgtcatggtcgccgtcaagaagctcaatcctgagagtgtgcaggggatggaacaatggcagtctgaagtcaatttcctcgggaggatttcgcaccccaatctcgtcagactcctgggctactccatggacgacaacgagctactgctcgtgtacgagttcatggcgaaggggagcttggagaaccacctgttccgaagaggggcggtctacgagccgctgccctggagcctgaggctgaagatcctcatcggtgcagctcgtggcctcgcgttccttcattcgtcagagaggcagatcatctacagggacttcaaggcttccaacatcttactggattcgcacttcaacgcgaagctctcggatttcggattggccaagcatggtccagacggcggggagtctcatgtgacaacaagagtcatggggacctatggctatgcagctccagagtacgtttctaccggccacctgtacgtgaagagcgacgtgtacggcttcggcgtcgtgctgctggagatgatctccggcctgagggcgctggacccgagccgcgagcgcgagaaggtgaacctggtgaactgggcgaggccgttgctgtccgaccggaggaagcttagccagctgatggacggcgggctggaggggcagtacaaccccaaagccgccctcctggccgcccagctgaccctcaggtgcctcaacggcgaccccaagagacggccgtccatgaaggaggtggtggaggcgctggagaagatcgagtcgtcggcgaagggcaggatggcgagggagccccggaacagctcgcgccgtggcctggtgcagtcccctaggggtgacagcgctaggaacaactccagctccaggggcaggtag

SEQ ID NO: 130911 - DNA, 1486 bp, Zea Mays
cgctgatacgcccttgggccacgccttccttcgtatcccgtgcgcctgccctgccctcctgcagcgcccgtcgcctccctttccccttccctccctctccccgcgagccgccagaggcaatttctccctcgattcgaccccgattcgtccgcccgcgaccgggattccctccgccaagcgcggatctgaacgctgcgctccgtgtcgccgctcgaatccgccatgaaggggggcaaatccaatgcagcaggcaggagcttaggagaggagacgccgacggaagattgcggggcggacaccatgcagcggaagcttatggatttgccaggtcccagatggaagaagggcaaggactgcaagggctttgcagcactggcagcagccaatcccatgtccagcatagttgcggagctccaggcttcactgcgggactcggaagccgtggcgattctagccgcgcacgccagggacgcgatcctcgaggtcggcccacgccaagccgcgcttctgaacggcgctgccttcggcagggccgtggagggtgcaggtgcagagagccagtggttccagctgggccccgaggaagtgttcttcctttgccatgccctgaagtgcctcagggttgagtcgaataacaagacgcggattggtgcgcccgagctgtggggtctcttggcctccggctcagagcaattcccggagatgtacagggcgtatcaatacctcaggctgaagaactgggttgtaaggtcgggactgcagtacggggcagactttgttgcttaccgtcatcatccggcacttgtgcactcggagttcacggtggttgtggctccagaagggaaagcattcggcaccaggtgtgcccgcatggaggtctggtctgaagtactctgtgcgcttcgggcctctggaagtgtggccaagacgttacttgttcttaccatcagcaccaagagctgcgagctgggatccttggattgtttggagcagatgattgttcatgagaggacgatcacgagatggataccacagcagtgcagtgagcaacaagacaaaccatgtagagaagaaaccaacagggatggacaaagacaaaaatcttgcatagaagtatcaagcaacgaagaacaagagcatacaagtgggggtgtagtgtttagctattggcccgtagtgctaagctatacaattcttttcagtgtacttgtctacaagctgaaatcttaactgaagagcttcctatttctgtatgctcatgttgattagcgtgaataatgcaattctatggtacgaatttgttgtgattctcattgaagtttctacatatctttgataacatcatcacagaccccactggactgcagactgcacgataacatttgtatcactgtttcttggtaatccttttttcttttgtttattatcacttttcaagactgtttttggttggctattatgtagtctggaggattagggattaggg

SEQ ID NO: 130912 - DNA, 1299 bp, Zea Mays
gggtgcgggccctcgctgcgcgggcagaatcgctgatatgcccttgggccacgccttccttcttatcccctgcgcctgccctcccctcctgcagcgcccgtcgcctccctttccccttccctccctccctctccccgcgggccgccagaggcaatttcgccctcgattcgaccccgattcgtccgcccgcgaccgggattccctccgccaagcgcggatctgaacgctgcgctccgtgtcgccgctcgaatccgccatgaagggggccaaatccaagggcgccgccaaggccgatgccaagctggcggtgaagagcaagggggcggagaagcccgccaagggcaggaaagggaaggccggcaaggaccccaacaagcctaagagggctcccagcgctttcttcgtgttcatggaggaatttcgcaaggagttcaaggagaagaaccctaagaacaagtctgtcgctgcggtggggaaagctgctggcgacaggtggaaatccctgagcgagtcgattgtaggacaaggctccctatgtagccaaggctaacaagctcaagctcgagtacaacaaggccatcgctgcctacaacaagggcgagagcactgcagctaagaaggctcctgccaaggaggaagaggaggaagatgaagaggagtctgacaagtccaagtcggaggtcaatgacgaggatgatgaagagggtagtgaggaggatgaagatgatgacgagtgatggagctcctcgagacaatggaccgtgcttcatccaacaatggagcggctacacaaggccccgtggcgatcacaaaaaaggagcctatatccatgtactagaattattcagtttcactccacatcgtgatgttttatttttacttttgtcgtgctataacggatagcgctcctcgttggcgccactggcgggtggttctgcctctggtctggtgtgtttgtgtgtggtcacacttgccagccagcagaggcgcctgcttgtacctagattactgtttccattgtcgtcatcatcggctaacattgtcataatgtcagtttgggtaatgttagattaagtaattattgtgttctgtattcttgtttgttgcccttcttttgtgtgtttttgttattgttggtctgtttccattgttgttgctttggcattgtcagtgcccgccagccctgaaaattgccgtttgggtgggtttgcgtgtacttcgtattatgatgttgggctgcacattgtagctgggaatgtttgccaaaaaatggaatgggcatgcggtggttgttggtgg

SEQ ID NO: 130913 - DNA, 1292 bp, Zea Mays
gggtgcgggccctcgctgcgcgggcagaatcgctgatatgcccttgggccacgccttccttcttatcccctgcgcctgccctcccctcctgcagcgcccgtcgcctccctttccccttccctccctccctctccccgcgggccgccagaggcaatttcgccctcgattcgaccccgattcgtccgcccgcgaccgggattccctccgccaagcgcggatctgaacgctgcgctccgtgtcgccgctcgaatccgccatgaagggggccaaatccaagggcgccgccaaggccgatgccaagctggcggtgaagagcaagggggcggagaagcccgccaagggcaggaaagggaaggccggcaaggaccccaacaagcctaagagggctcccagcgctttcttcgtgttcatggaggaatttcgcaaggagttcaaggagaagaaccctaagaacaagtctgtcgctgcggtggggaaagctgctggcgacaggtggaaatccctgagcgagtcggacaaggctccctatgtagccaaggctaacaagctcaagctcgagtacaacaaggccatcgctgcctacaacaagggcgagagcactgcagctaagaaggctcctgccaaggaggaagaggaggaagatgaagaggagtctgacaagtccaagtcggaggtcaatgacgaggatgatgaagagggtagtgaggaggatgaagatgatgacgagtgatggagctcctcgagacaatggaccgtgcttcatccaacaatggagcggctacacaaggccccgtggcgatcacaaaaaaggagcctatatccatgtactagaattattcagtttcactccacatcgtgatgttttatttttacttttgtcgtgctataacggatagcgctcctcgttggcgccactggcgggtggttctgcctctggtctggtgtgtttgtgtgtggtcacacttgccagccagcagaggcgcctgcttgtacctagattactgtttccattgtcgtcatcatcggctaacattgtcataatgtcagtttgggtaatgttagattaagtaattattgtgttctgtattcttgtttgttgcccttcttttgtgtgtttttgttattgttggtctgtttccattgttgttgctttggcattgtcagtgcccgccagccctgaaaattgccgtttgggtgggtttgcgtgtacttcgtattatgatgttgggctgcacattgtagctgggaatgtttgccaaaaaatggaatgggcatgcggtggttgttggtgg

SEQ ID NO: 130914 - DNA, 1571 bp, Zea Mays
gggtgcgggccctcgctgcgcgggcagaatcgctgatatgcccttgggccacgccttccttcttatcccctgcgcctgccctcccctcctgcagcgcccgtcgcctccctttccccttccctccctccctctccccgcgggccgccagaggcaatttcgccctcgattcgaccccgattcgtccgcccgcgaccgggattccctccgccaagcgcggatctgaacgctgcgctccgtgtcgccgctcgaatccgccatgaagggggccaaatccaagggcgccgccaaggccgatgccaagctggcggtgaagagcaagggggcggagaagcccgccaagggcaggaaagggaaggccggcaaggaccccaacaagcctaagagggctcccagcgctttcttcgtgttcatggaggaatttcgcaaggagttcaaggagaagaaccctaagaacaagtctgtcgctgcggtggggaaagctgctggcgacaggtggaaatccctgagcgagtcggacaaggctccctatgtagccaaggctaacaagctcaagctcgagtacaacaaggccatcgctgcctacaacaagggcgagagcactgcagctaagaaggctcctgccaaggaggaagaggaggaagatgaagaggagtctgacaagtccaagtcggaggtcaatgacgaggatgatgaagagggtagtgaggaggtatacaaaatctattcctgtcttctccatattttttccttagacaaaataccaattaatccaggatacatagcatgttcatgcattaagcaagttgctaaatttatcttcgaccacaatgtagacctagtagtattgtattggattccatcaatgcaaaacatatgcagatttgcatatgcaaccctcttttgcaagtcctcaatatgagcatttgtttggaacacggtgcattggccttaggaagtctttaaaaatatgtcttccctctgcttgcaggatgaagatgatgacgagtgatggagctcctcgagacaatggaccgtgcttcatccaacaatggagcggctacacaaggccccgtggcgatcacaaaaaaggagcctatatccatgtactagaattattcagtttcactccacatcgtgatgttttatttttacttttgtcgtgctataacggatagcgctcctcgttggcgccactggcgggtggttctgcctctggtctggtgtgtttgtgtgtggtcacacttgccagccagcagaggcgcctgcttgtacctagattactgtttccattgtcgtcatcatcggctaacattgtcataatgtcagtttgggtaatgttagattaagtaattattgtgttctgtattcttgtttgttgcccttcttttgtgtgtttttgttattgttggtctgtttccattgttgttgctttggcattgtcagtgcccgccagccctgaaaattgccgtttgggtgggtttgcgtgtacttcgtattatgatgttgggctgcacattgtagctgggaatgtttgccaaaaaatggaatgggcatgcggtggttgttggtgg

SEQ ID NO: 130915 - DNA, 108 bp, Zea Mays
tttgcagtttagcattcgtttgatatattttgaatatgtaataatatgttctactagacttacaggggtggtggttttatatctttggagaatttactgtatttctcg

SEQ ID NO: 130916 - DNA, 216 bp, Zea Mays
atgggcaaggagagagagggagctccatgcgtgctgggagaatggcgcctgctctccctgctgggttccgaggggagcaatgaaccggccatggtgcagagggggaggaggggatgtcgacccccatggctggtggcgagaggaatggaagctagggtggctggcttgaggaaaggggaggagacgccatgggaggccctccactggtgtgcgtga

SEQ ID NO: 130917 - DNA, 2316 bp, Zea Mays
ccacggccgacgtggcccgcctcccctcccctcccttcgcccccagaaatctcgccgctcccacccctctccttcctctcgccatttccatttccttgcccttgccagccagagcgagactccaccgcttcctctccgccgcgtcctcctcccctccctccgttcctcacggctctccggactcgccccgcggctggccgtgctgagtttcgttctctggccggcaaagaagcgatttttttgtgctttctggacggatcccggccggagaagggaccgaatttccacgacctcgaccgccggctgctcctctgctgggctctccgtgcgcaagaagagcctaccaaggtgaatccggagatttgagctccgggcccgcctcatggagtccatggcgcaggaaagggacgcgttggattcacctgccttgtcgattgacaaaaggctgcggtcggatgctgtcgaatcacccctggtggatgatgcaacgcaacccaaggagggggcggacggttaccctgtcaaggttcggaagccttacacgatcacgaagcagcgagagaagtggacagaggaagagcatgggaagttcctggaggcactgaagctctatggtcggtcttggcgccagatacaagaacacattggcacaaagactgctgtccagattcggagccatgctcagaagtttttctccaaggtcgtgcgtgaacctggggccagtaattcaattgagatcccaccccctaggccaaagagaaaaccactgcacccataccctcgcaagtgtgccgactccaccgtgacaaatgctccaatgggcgaaccgaagaatgctcctgtttcatcaccatctggttctgaccaagagaatggttcgcctgtctcggtgttatctgcaatgcagtcggatgcttttggttcatcaatatcaaacccatcaactgggggcacgtctcctgcgtcatcagatgatgggaataatgtccctgagatagtgaatggggaggaaaatttgctcactcagcaaatagaagaccgatcccatcaggaatcaaagcaggacaacagtgatggtgagctgtctgaagaagattcatcacgagtccaagaaaccagtttgaagctttttgggaagacagttatcatcccagacccaaagaaagtctgttcctcggatgggggagctggagatgatacacaagaagtgatgcaaacatcctgggttggaggaggggtggcagcataccctgcccataacggatggtttcttccgttccattctttccctgctcatatgtatgagtcaggggatgctaggatttcccctcttcatatgtggtggccttactacggttttccggccggccatccaagagggtttggcacagggctgcttaacgaaggcgccattgagagtgatgccgacaatagcccatcggttgaaactaattctgatcgcacgggcaatgttcatgttcagacgacgacccctaccattcacaacaatgctgtcaaggagtcagttgggccagttgagatgccagagtcgggtccgagcattgagctgaaacccagcgcgaactcggcctttgtaagagtgaagccgagcagcagcgtcagcggagaccaatcactggtaagggggttcgtgccatacaaaagatgtaaggtcgaataacccaacccaacgacatacctgtctgctgctaatcttactggagattgattgatcctgaacagtgtagggactcgagtggcacacatcccttgttccagtgtgcctgccattttttgcctgcaaaattggctgctggtgtatgtgtaatattgtcgttttactgcctgcagcggaatgtaagatgccgcaggcttgttgctgtcacctaggcgtagactgaacagatgttgtgcagggatcgccgatctctgcacccttatgtttgttgtacgaggaaaaccggattctgttgaactctcgtgttcaaaaattcattgattcctgatggaaactgatttgtaaatgaacatggcaatgccgccggacaggttacagtgtatcctgtaagaccaattcttttggtccttgaacaatggaatgcagactaggttttggtcattcaaagcaagctttgggtgtgatgttattgtgttggatgcaaagcaagcgatctgctgctggtggtaacttcgtgagggcttgtgctgctgccgatgatgccgtgctatccctacctcctcttcctgttggtgttgctgccatcatgggttagtttgtaatgcctgttgaagtatacaagtggattgcttatcttt

SEQ ID NO: 130918 - DNA, 2118 bp, Zea Mays
ccacggccgacgtggcccgcctcccctcccctcccttcgcccccagaaatctcgccgctcccacccctctccttcctctcgccatttccatttccttgcccttgccagccagagcgagactccaccgcttcctctccgccgcgtcctcctcccctccctccgttcctcacggctctccggactcgccccgcggctggccgtgctgagtttcgttctctggccggcaaagaagcgatttttttgtgctttctggacggatcccggccggagaagggaccgaatttccacgacctcgaccgccggctgctcctctgctgggctctccgtgcgcaagaagagcctaccaaggtgaatccggagatttgagctccgggcccgcctcatggagtccatggcgcaggaaagggacgcgttggattcacctgccttgtcgattgacaaaaggctgcggtcggatgctgtcgaatcacccctggtggatgatgcaacgcaacccaaggagggggcggacggttaccctgtcaaggttcggaagccttacacgatcacgaagcagcgagagaagtggacagaggaagagcatgggaagttcctggaggcactgaagctctatggtcggtcttggcgccagatacaaggtgcgtgcaggctttacatgtgaccctacgttagagcacgctgatgattagttctctgatttgtcctccaaactgccgtttattagaacacattggcacaaagactgctgtccagattcggagccatgctcagaagtttttctccaaggtcgtgcgtgaacctggggccagtaattcaattgagatcccaccccctaggccaaagagaaaaccactgcacccataccctcgcaagtgtgccgactccaccgtgacaaatgctccaatgggcgaaccgaagaatgctcctgtttcatcaccatctggttctgaccaagagaatggttcgcctgtctcggtgttatctgcaatgcagtcggatgcttttggttcatcaatatcaaacccatcaactgggggcacgtctcctgcgtcatcagatgatgggaataatgtccctgagatagtgaatggggaggaaaatttgctcactcagcaaatagaagaccgatcccatcaggaatcaaagcaggacaacagtgatggtgagctgtctgaagaagattcatcacgagtccaagaaaccagtttgaagctttttgggaagacagttatcatcccagacccaaagaaagtctgttcctcggatgggggagctggagatgatacacaagaagtgatgcaaacatcctgggttggaggaggggtggcagcataccctgcccataacggatggtttcttccgttccattctttccctgctcatatgtatgagtcaggggatgctaggatttcccctcttcatatgtggtggccttactacggttttccggccggccatccaagagggtttggcacagggctgcttaacgaaggcgccattgagagtgatgccgacaatagcccatcggttgaaactaattctgatcgcacgggcaatgttcatgttcagacgacgacccctaccattcacaacaatgctgtcaaggagtcagttgggccagttgagatgccagagtcgggtccgagcattgagctgaaacccagcgcgaactcggcctttgtaagagtgaagccgagcagcagcgtcagcggagaccaatcactggtaagggggttcgtgccatacaaaagatgtaaggtcgaataacccaacccaacgacatacctgtctgctgctaatcttactggagattgattgatcctgaacagtgtagggactcgagtggcacacatcccttgttccagtgtgcctgccattttttgcctgcaaaattggctgctggtgtatgtgtaatattgtcgttttactgcctgcagcggaatgtaagatgccgcaggcttgttgctgtcacctaggcgtagactgaacagatgttgtgcagggatcgccgatctctgcacccttatgtttgttgtacgaggaaaaccggattctgttgaactctcgtgttcaaaaattcattgattcctgatggaaactgatttgtaaatgaacatg

SEQ ID NO: 130919 - DNA, 2438 bp, Zea Mays
atggagcttttggataggtatccatcacttagggtcgcctatattgatgaagttgaagcacccagcaaagatagaatcaagaagattgaaaaggtttactactcagtgttagtgaaggcttctgttacaaaacctaatgagcctggtcagagccttgatcaggtcatctacaagataaaactaccaggtaatgccattttaggtgaaggaaagccagaaaaccagaaccatgcaataatattcacccgaggcgaatgtctccaaactatagatatgaatcaggagcactatatggaggaggctttgaaaatgagaaatctgctgcaagagtttgagaagaaacatggagtgagacatccatcaatacttggagtcagagaacacatatttacgggcagtgtgtcatcccttgcttggttcatgtcaaatcaggaaactagttttgtgacaattggacaacgagtgcttgccaatccactgagggttcggtttcattatggccatcctgatgtcttcgatcgtcttttccacgttacgaggggcggtgtcagtaaagcatccaaaattatcaatcttagtgaggacatctttgcaggattcaattccacattgcgcgaaggcaatgttactcaccatgaatacatgcaagttggcaaaggaagggatgtaggtctcaatcaaatatctctgtttgaggcaaagatagcaaatggcaatggcgaacaaacgctgagccgtgacatctaccggctaggtcatcgctttgatttcttcaggatgctgtcttgttactacacaacaattggtttctacttcagtacaatgattacagtatggactgtatatgttttcctctacggccggctatatcttgtacttagtggactcgatgaagcactggctactggaaagaggtttgtgcacaatacacctctccaggttgctcttgcgtcagagtcttttgtgcaacttggatttttgatggcgctgcccatgatgatggaaatcggtttggagagaggattcagaactgcattgagtgattttatactgatgcagcttcagttggcctctgttttcttcacattctcgttgggaacaaaaactcactactacggaaggacgttactccatggaggagcggaatacagagccactggacgtgggtttgtggtgttccatgccaaatttgctgagaactatcgactttattcccgtagccattttgtcaagggccttgagctgatgattctactagttgtgtatgaaatatttggtcagtcatatagaggggctataacttacatcttcatcaccgtatccatgtggttcatggtgggcacttggctctttgcaccattcctgttcaatccttctggatttgagtggcagaagattgtggatgactggactgattggcacaagtggatcagcaatcgtggaggtattggtgtggcaccagagaaaagctgggagtcatggtgggaaaaagagcaggagccccttcgttactctgggaagcgtggtactattgttgaaatactgcttgcattgcgtttctttatctatcaatatggactcgtgtatcatctgaatataacgaagaagataaccaaggataaccagagtgtgctggtttattgcttctcatgggttgtaattttcgttgttttactcgttatgaagaccgtatcagtggggaggaggaggttcagtgcagagttccagctagtgttccggctgatcaagggtctcatatttataacttttacagccatcgtggtaatcctaatagcaatccctggcatgacggttctggacatctttgtttgcatccttgccttcatgcccactggatggggtttgctcctgattgcccaagctatcaggcctgtgattcaaaagatcgggctgtgggggtcgatcaaggctcttgcccggggctacgagatcctaatggggcttctcctgttcacgcccattgctttccttgcctggttcccgttcgtgtccgagttccagaccaggatgctgttcaaccaggccttcagcagaggtctgcagatctcccgtatcctgggaggacacaagaaagaccgagggacgcggagcaaggagtagtagggctgctgattgaaggtccgtctatcgggagttatgtcgtcctggagcggtctatcaggttcagagaatattagggtccgtatgtatgtatgtgtgtgtcgcacctagcaccagtagtatgtatgtatgtatgcgtatgtaggttcagagaatattagggtccctatgtatatgtatgtatcaggattgctatggtcttttggattggaagatctgagatttgctggtgcaatggccagtatctgacatccaaatgttgaaactataattaggctctgctaatagttagctaacttacagctaacaattagttt

SEQ ID NO: 130920 - DNA, 172 bp, Zea Mays
ctaagtgatattgtgcttcttgtgtgattgtgtgtttggggctgttatgtttgtctttgtttctctcctcctgttatcccctgtaattcttgtgtggcctcttggctataacttttgtgtttttgcttcttctattaatataaaaaatacgcaattctcttgcgtattcgag

SEQ ID NO: 130921 - DNA, 92 bp, Zea Mays
acatatgtgataaattctgtacttgtctcattagatcttatgaaaggctacagagcaatggaagtaatgtctgaggactcaccattaaagac

SEQ ID NO: 130922 - DNA, 1593 bp, Zea Mays
atggggcggatcggcaccgccgtccgaggaggaagggctcgaatcagaccatctctgggacctagaacgttccgcatgggaagttgggttgcaaggagcagcgggtcccgacgccagaggggtggaagacgacggggtggccgtcggtttcggggtggttgctggcgtgaggctggtggaggggttggcgccgggaagggaagggacaggggcggaagacggagggaagaccgaagggcaggagacggaagggcggccatcttatctagatgcatcgaatggggagagacaccccctgacttttttttcttaagttggtgccgtgactcgaacccgggctggctcagcagaccgcttctttggcgtgtccggctgaccagttgcaccatcaaacctctggtacagccaaccaaagatataatgagagaacctatcaggacattccagtggcacgagtttttccctcatggaactaacaatattggtgttgttatatcactctgggctccaataatcctggtatatttcatggacacccaaatttggtatgcactgttctctactctgattggtggcatctacggggcttatcgtcgtcttggtgagatacgtacattaggaatgttgagatctcgctttgaatctttgcctgaggccttcaatgaacgcttgattccttctgatgcaaataagagtaaaggtcttcgtgctgctttttcgagtagacccaaggcttctggtgacgaaagtgagagagagaaaagagctgcaaggtttgctcaaatgtggaacgccattattacaagtttccgcgaagaggatctcatagacaatagggagaaggatctgctactggttccagactgtaaagaccgtgaacttgatatattccaatggccgcctttcctacttgctagcaagatcccaatagcactggatatggcagcagacagtggtggaaaagaccgtgatctgacgaagaggataaagtcagatccatacttttcctttgctatcagagaatgctatgcttcattcaagaacatcatcaataccttagtatttggtcagcgggagaaagatgtcctagtacagattttcacagttgttgataagcatatagaagaggaaactctgataacgggtctcaatatgaagaaccttcctgcactgagcaagaagtttgttgaattacttgagttactgcaaaaaaacaaggaggaagacttgggtcaggtagttattttgttccaagatatgctcgaggtggtcacgagggatataatggaggaacaggacctgctcgagacgttggattctttacatggtgccaatagtagaaaacatgaaggaattacaccgctagatcagcaagaccagttgtttgctaaagctattaagtttcctgtggtggaatcaaatgcatggactgaaaagataaagaggcttcatcttctgttaactgtgaaagagtctgctatggatgttcctattaatcttgatgctaggcggcggatatcgttcttcgcaaattctctatttatggatatgcccaatgctccaaaagttcggaacatgttgcccttctcgtaa

SEQ ID NO: 130923 - DNA, 1824 bp, Zea Mays
atggcggctccggggcggaggacggcggacgtgtcctcgtcctcgccctctccgtcccctgccgccccctccaccggcaggcgcctcctgcgcacgcagaccgtcgccaacctcggcgagtccatcttcgacagcgaggtcgtgccgtcctcgctcgtcgagatcgcgcccatcctccgcgtcgccaacgaggtcgaggttgaaaacccgcgcgtcgcctacctctgtcgcttctacgctttcgagaaggctcaccgcctcgacccgacttccagtggccgtggtgttcgtcagtttaagaccgcacttctgcagaggcttgagagggaaaatgaccccacactgaagggaagggtccacaagagcgatgctagtgagatgcaacgcttctaccgcgaatactacaggaagtacatccaggcactgcaaactgtcgttaataaggatgaccgtgcgcgcctcactaaggcataccaaacggctgctatcttgtttgaggttttgagggctgttaatgattcccagtccgttgaagtcgatcaagcgattttggatacacacatcaaggtcgaagaaaagaaaaagctgtttctaccttataacattctcccgctcgatcctgaaagtactggcgaagccattatgcgatatccagagattcaagctgctgtttatgctcttcgcaatactagaggtctgccatggccaaaggaccaagacaagaagcctgaagagaagaatactggcaaagaccttcttgattggcttcaggctatgtttgggtttcagaaagacaatgtgtccaaccaaagggaacatttgatactgttgcttgcaaatgttcatataaggaaaatacccaaggctgaccaacaaccgaagttggatgacaaagctctggatgatgtaatgaagaagctatttaagaattataagaagtggtgcaagtacctcggccgcaaaagcagtttatggttgccaaccatccagcaggaagtgcagcagcgtaagcttctttatatgggtctctacctgctgatttggggtgaggcggccaacttgagattcatgccagagtgtatttgttacatctaccatcatatggcttttgaactctatggcatgctggctggaaatgtgagcccaatgactggtgaaaatgttagaccagcatatggtggtgacgaagaagcctttttgacgaaagtcgtgactccaatatacaaagttatagagaaggaagctgaaaggagcaagaccatgaaatcaaagcattcacattggagaaactatgatgatctgaatgagtacttttggtcagttgattgtttccggctaggatggcctatgagagccgacgctgactttttcaaaactccaaaagatccttatctgaatcatttgaatggagagaacagatctgcaggcaatgtccattggatgggaaaagttaattttgtggagatacgttcattttggcacatattccgtagttttgacagaatgtggatcttcttaatattgtccttacaggccatgataattattgcttggaatggtggaacaccaagtgatatctttgatgctggcgtatttaagaaggttttgagcatatttatttctgcagcaattttgaagttgggtcaaggtcttagacctcggatcctcccgccatgtgtgctcacgctgcgacgtgcccgccttgcgcgtgggagtgagttttctgcacagcatggcggtgaccacttcctggccgcacaacgaaggcagcgttgttctagccgttacaaccgctcgacacacatgcagctagatatttcttag

SEQ ID NO: 130924 - DNA, 456 bp, Zea Mays
atgcccattttgcattgtcaaatagcacacggactcgaagagaaagcacaaaagaccatatatctttgctcctctgcgatgagaatggctgggctacgggagctgagcgtccttagaagctcgccatgctcccagcagcaatgtcagcccgctccccctccgcttcagagcaacccctccccttcctctgttgctgccgccgcctccccttcccacgcaggatgcagcagcagccaaatccgctcgaggaactcgctatccgaacccaggactgtcgcgacaaacgcgcgccactgcgggcgtcatcgcccggagtcctcggctgagcacccgcaccacctcaaagctccaccctttcccgaagaagcgaagagaagcgccggagcgggcaagctgggttctgggcagccgacggagcaagcgtgcggggaagccgaggcgggacgccggaactga

SEQ ID NO: 130925 - DNA, 2551 bp, Zea Mays
actagaactcctcctttcaccgatccaatctcatccgatccatcaacccatcaccataacgcacatacacgccgcccccgccgtcgtctcgacgagggtctcgtcatgcaaggggccgtgttggtggccatcgcggctgccatcggcaacctcttgcaggggttggacaacgcggccatcgccgccgcggtgctctacatcaagcgcgagttccacctggagacagatccagcactcgagggcgtcgtggttgccacctccctcttcggggcaacgatcgtcaccatcttctccggccccgtctccgacgtcatcggtcgccgcccgatgctcatcgtgtcctcgctgctctacttcgccggcgggctcctcatgctatggtccccgagtgtgccggtgctcctcgtggcgcgccttgtggacggcttcggcgtcgggctcgccgtcacgctcgtccccgtctacatctccgagacggcgccccctgaaatccggggtttcctcaacacactgccgcagttaacgggatccttgggcatgttcctttcctattgcatgatcttctacatgacgctgggcgatagccccagttggcggttcatgctcggcgtcctctccgtgccctccctcgcctacctcgcgctcaccgtgctctacctccccgagtcgccgcgctggctcgtcagcaagggccggatgaaggaggccagggccattctccagatgttgcgcggcagggaggacgtgtctggcgagatggcgctcctcgtcgagggcctcggcagcagcgacgacaccgtcatcgaggagtacgtgttgggcccggcggcagccggggacgagtcggagcacgagaccagggaccaggtcacgctgtatgggcccgagcaggggctgtcgtgggtggcgcagcaggtgcagggcgcgcgcagcagcgtgctcggcagcgccgtcgggctcgcgtcgcgccaggggagcatgtacgagcagatgaaggaccccgtggtgacgctgctggggagcgtccacgacaagatgcccgactctggcgccagtgccagggccagcacgctcttccccaacctcggcagcatgctcagcgtgacggagcggcacggtggcgactgggacgaggagaacgtgccgcccaacgacgacctcgacgacgatgaggacgaggaggagtacctctccgacgatgaggacgctggcgccggagcagcagcacgaggagggggaggaggaggaggcgcgctgcacgcgccgctgctgtcgaggcagagcacggacgttgacgtcaccagcggcacgagcaagaaggacggcagccacccgcctgagagcagccccatgcagaggtacagcagcattaccagcggggaggccgcgagcaccatgggcatcggcggtggctggcagctggcgtggaagtggacagagatggtcggggccgacggcgtgagacgcggtggcgtcaagaggatgtacctacatgaggaaggcggcggcgatggggactcatcggacccggcagggggttacgtgcacgcggcggcgctggtgagcccgtccatcctctacaccaaggacgtgctcatcgggcagagcccgaccccggcgttcgacagcccgccgccggagacggtggccaacaaggcaggcggggggccctgttggagagagctcctggagccgggtgtcaggcgcgcgctcttctgtggcgtcatgattcagatcctgcagcagttgtctggcatcaatggtgtgatgtactacacgccccagatccttgaccaggccggtgtgagcgtcctgctctctagcctgggccttagcgccgactccgcgtccatcctcctcagcggcgtcaccatgctgatgatgctcccttgcatcgtcgtggccatgcgcctcatggacgtggccggccggcgctcgctgctgctgcggaccatcccggtgctgatcgtgtcgctggcggtgctggtgctggcgaacgtggtgcccatggcggccaaggtgcacgcgctgctttcaacggcctgcgtggtcgtgtacttctgctgcttcgtcatggggttcgggcccatccccaacatcctatgcgcggagatcttccccacgcgtgtcagggggatctgcatcgccgtgtgctccctcaccttctggatctgcgacatcatcgtcaccaactctctccctgtgatgctcagaaccatcggcctcgcgggtgtatttggctcctacgccttcgtctgctgcttgtcgctcgtcttcgtgtacctcagggtgcccgagaccaaggggttcccgctcgaggtcataatcgagttcttcaacgtgggtgccaaagctcagaagccggagcagcatgaagaggaggagaaccacgactaacccgtatatatttggattcattaataataactgttttttctttctttctttctttctttctttctttctggattatgagttgaatgaatgatgtcgatcagagagcttgatgaccatcatgttagcgatcccatgaaatatgtttgaggacgca

SEQ ID NO: 130926 - DNA, 1940 bp, Zea Mays
tcgggaattcttgcatgcccgtgctacgtcgtccatcgtctccccggccggctggagctagctagggcccggtgatcgtatcgtcgattggaagtgaagatcaagcgatcgatagaataaattaaaggcgcgggggcaacaacaagaatggggggcggtggcggtggcggcaactcgcgggagcttgaccagacgccgacatgggcggtggcgtcggtgtgcggcgtgatcgtgctcatctccatcctgctggagaaggggctccaccacgtgggcgagttcttctcccaccgcaagaagaaggccatggtggaggccctggagaaggtgaaggcggagctcatggtgctgggcttcatctcgctcctcctcgtgttcggccagaactacatcatcaaggtctgcatcagcaaccacgccgccaacaccatgctcccctgcaagctcgaggccgccgccgtcgagggcaaggacggccacggcaaggaggccgccgccgtggtcgctggcaagaagaaggtcgccgtcgccgtccctggaaagaagaagaagaaggccgccgccgccgccgaccatcttggcggtgtggtggactggccgccgccctactacgcgcacaacgccaggatgctggcggaggcgagcatggcgaccaagtgccccgaggggaaagtgccgctcatctccatcaacgccctgcaccagctgcacatcttcatcttcttcctcgccgtcttccacgtctcctacagcgcaatcaccatggcgctcggcagggccaagatacgtgcatggaaagagtgggagaaagaagctgcaggacaagactacgagttctcacatgacccgacgcggttcaggttcacccacgagacttccttcgtgaggcagcatatgaatgtgctgaacaagttcccagcatcattctacatcagcaacttcttccggcagttcttcaggtccgtgaggcaggcagactactgcgcgctgcgccacagctttgtcaacgtccatctggcccctggcagcaagtttgatttccagaagtacatcaagcggtctctggaggatgacttcaaggtgatcgtggggatcagtcctcctctgtgggcttctgctctcatcttcctcttcctcaacgtcaatggatggcacaccatgctctggatctccatcatgccggtggtgatcatcctgtcggtggggacgaagctgcagggcatcatctgccgcatggcgatcgacatcacggagcgccacgccgtcatccagggcatcccgatggtgcaagtcagcgactcctacttctggttcgcacgccccaccttcgtgctcttcctcatccacttcaccctcttccagaatggcttccagatcatctacttcctctggattctgtatgagtacggcatggactcgtgcttcaacgactccgaagagttcgtctttgcacgactctgccttggcgtggttgtccaggtgctgtgcagctacgtgacgctcccgctgtacgcgctcgtctcccaaatgggctccaccatgaagcagtccatcttcgacgagcagacctccaaggcgctcaagaactggcgcgccggcgccaagaagaaggctcccaccggcggctccaagcacggcggtggtggctcccccaccgccggcggcagccccaccaaggccgacggcgacgcgtagagaggaacacgctaactttaatttctgtgtgcttaattgcctaggctcgttaagtcagaacatgcatgcatgtaacaccactgctggttttcatatagtgtcgacagatggtcaacgtactttttgcgatcccacttgtattttttttttacaatgaagcacccgtccgcgtccgtggacactgcaagtgcattgccatgtcatgcgccaagtcatgaattacatatttactatgggtttatggg

SEQ ID NO: 130927 - DNA, 156 bp, Zea Mays
ttttttttattattttttttattttattttatttactttctgtgatcataattactgtattttaagtaggctaatcactgttcatgctatgggaaaataggaagtttaatttaaaattccgttatgttattgattcacgtagttaattgtttaccc

SEQ ID NO: 130928 - DNA, 3092 bp, Zea Mays
actctgccagtaggccaaagttttgtttcatcacgctcccttccttctataaattgttgcccatggacattcagacccagccagtcacagcattcttcttcctccgcacataaaccataacattcttctccaccttgtttctttccaagccaccatggcctccaagctgagtttcaagagggcagacagcatcgcggaaagcatgcccgatgcgctgaggcagagccggtaccagatgaagaaatgcttccataggtatgtttccaagggaaggaggctcttgaagaaccagcagctcatagaggagctggacaaatcactggatgacaaagtcgagagggaaaagcttgttgaaggcttcctgggttacattatttgttccacgcaggaagcagtggtgctaccgccctatgtcgcatttgctgtcaggatgaatcctggcatctgggagtatgtcaaagttcattctgatgacctgtcggtcgaaggaatcacaccctctgagtacctcaagttcaaggagacattatatgacgagaactgggccaaggatgacaactcactggaagtcgatttcggtgctcttgacctctcaacaccccatctgacactgccatcgtccataggaaacgggctccagtttgtgtccaaattcatgtcctccaagctgggcgacaagcctgaaattagcatgaagccgttgctggactacttgctttcgctaaactaccgtggcgagaagctgatggttaacgacaccatcgatactgtgaacaagcttcagacagcgctgctacttgcggaggtatttgttagcgggttgccaagatacaccccattcctgaagtttgagcaaaggtttcaagagtgggggttggagaaggggtggggtgacaatgctgaaaggtgcaaagagacgctgaattgcctctctgaagtgctacaggcgccagaccctatcaacatggagaagttcttcagcagagttccatccatattcaacatagttgtcttctccatccacggctactttggccaagagaaggttcttggcttgccagacaccggtggccaggtggtctacatcctggaccaagtcagggcccttgaagaggagttgctgcaaagaatcaagctgcagggtctgaacgtgacaccaaagattcttgtgctgactaggctgataccagatgccaagggtacaaaatgcaatgtggagctcgagccagttgaaaatacaaaacattcccacatacttcgtgtgccattcaagactgaaaacggcaaggagttgcgccagtgggtgtcccggtttgacatctacccttacctagagagatatgcccaggattcttgtgccaaaattcttgacattttggagggcaagccggacctgatcatcggcaactacactgatggcaacttagtggcgtccctcatgtcaagcaaactaggggtcactcaggggacaatcgcgcacgctctagagaagacaaagtatgaagattcagatgtgaagtggagagatctggatcagaagtaccatttctcctgccaattcactgcagatatgattgccatgaacactagtgactttatcatcactagcacataccaagaaatcgctggaagcaaggagaagcctgggcagtacgagcaccactacgcattcacaatgccggggctctgtcgctacgccacgggcatcaatgtcttcgatccaaagttcaacatcgccgcacccggtgcagaccagtccatctacttccccttcacgcagaagcagaagcggctgacagatttgcacccacagattgaggagctgctctacagcaagcaggacaccggtgaacacagagggtatctggcggacagaaacaagcctatcatcttctcgatggcaaggctggacaaggtgaagaatatcaccgggctagtggagtggtacggccagaacaagaagctgagggacctggtaaaccttgtcgtcgtcgcgggcctgctggaagcgtcgcagtccaaggaccgggaggagattgaagagatcaacaggatgcacagcctgatcgacaagtatcagctgaaaggacagattcgctggatcaaggcacagactgaccgtgtccgcaacggtgagctgtaccgttgcattgcagacaccaggggtgcatttgttcagcctgcactctatgaagcgttcgggctgacggtcattgaggcgatgaactgcgggctgacaacctttgcgacgaaccagggagggccagcggagatcatcgtggacggtgtctccggtttccacataaacccaacgaatggcagggaggcaagcaacaagatcgccgagttcttccagaagtgcaaggaagacccaagctactggaacaaggtgtccactgctgggctccagcgcatctacgagtgctacacatggaagatctatgcaactaaagtcctgaacatgggctcgacgtatggcttctggaagactctgaacaaggaggagagagtggccaagcagcgctacctgcagatgttctacaacctccagttcaggaacctggcaaagactgtcccaaggctgtttgaacatcctcctccgcaagccccagcaggcgcagggcctagtacgatgacggtaacgaggccgaaagaaaggcaagtgtgcccactcttaagaactttactgaagagagaccgcgggagcaactgactgaccaattcgttgtttcacaatcccaaatctggttgctgcagaaagacacagactaggatccagaggatcatgaccagcttgatggggcagaagcctgctacttctgaataataataatacattagagccagggagacgagatgggtgtgcatgcgtgatctcctcaagccaaggtcctggcggctgcacatatattcattcattccattgagaccggaccagatcagtgtttattgtgaaatttgttgtggtgttgcatgtgtggttttcatctgtgtactgttgattggagagctggatgatgtaaagagagtgaaagtgcacatggttacaattgataataataatttatgacaaggattgaggaatgttgtgt

SEQ ID NO: 130929 - DNA, 2993 bp, Zea Mays
actctgccagtaggccaaagttttgtttcatcacgctcccttccttctataaattgttgcccatggacattcagacccagccagtcacagcattcttcttcctccgcacataaaccataacattcttctccaccttgtttctttccaagccaccatggcctccaagctgagtttcaagagggcagacagcatcgcggaaagcatgcccgatgcgctgaggcagagccggtaccagatgaagaaatgcttccataggtatgtttccaagggaaggaggctcttgaagaaccagcagctcatagaggagctggacaaatcactggatgacaaagtcgagagggaaaagcttgttgaaggcttcctgggttacattatttgttccacgcaggaagcagtggtgctaccgccctatgtcgcatttgctgtcaggatgaatcctggcatctgggagtatgtcaaagttcattctgatgacctgtcggtcgaaggaatcacaccctctgagtacctcaagttcaaggagacattatatgacgagaactgggccaaggatgacaactcactggaagtcgatttcggtgctcttgacctctcaacaccccatctgacactgccatcgtccataggaaacgggctccagtttgtgtccaaattcatgtcctccaagctgggcgacaagcctgaaattagcatgaagccgttgctggactacttgctttcgctaaactaccgtggcgagaagctgatggttaacgacaccatcgatactgtgaacaagcttcagacagcgctgctacttgcggaggtatttgttagcgggttgccaagatacaccccattcctgaagtttgagcaaaggtttcaagagtgggggttggagaaggggtggggtgacaatgctgaaaggtgcaaagagacgctgaattgcctctctgaagtgctacaggcgccagaccctatcaacatggagaagttcttcagcagagttccatccatattcaacatagttgtcttctccatccacggctactttggccaagagaaggttcttggcttgccagacaccggtggccaggtggtctacatcctggaccaagtcagggcccttgaagaggagttgctgcaaagaatcaagctgcagggtctgaacgtgacaccaaagattcttgtgctgactaggctgataccagatgccaagggtacaaaatgcaatgtggagctcgagccagttgaaaatacaaaacattcccacatacttcgtgtgccattcaagactgaaaacggcaaggagttgcgccagtgggtgtcccggtttgacatctacccttacctagagagatatgcccaggattcttgtgccaaaattcttgacattttggagggcaagccggacctgatcatcggcaactacactgatggcaacttagtggcgtccctcatgtcaagcaaactaggggtcactcaggggacaatcgcgcacgctctagagaagacaaagtatgaagattcagatgtgaagtggagagatctggatcagaagtaccatttctcctgccaattcactgcagatatgattgccatgaacactagtgactttatcatcactagcacataccaagaaatcgctggaagcaaggagaagcctgggcagtacgagcaccactacgcattcacaatgccggggctctgtcgctacgccacgggcatcaatgtcttcgatccaaagttcaacatcgccgcacccggtgcagaccagtccatctacttccccttcacgcagaagcagaagcggctgacagatttgcacccacagattgaggagctgctctacagcaagcaggacaccggtgaacacagagggtatctggcggacagaaacaagcctatcatcttctcgatggcaaggctggacaaggtgaagaatatcaccgggctagtggagtggtacggccagaacaagaagctgagggacctggtaaaccttgtcgtcgtcgcgggcctgctggaagcgtcgcagtccaaggaccgggaggagattgaagagatcaacaggatgcacagcctgatcgacaagtatcagctgaaaggacagattcgctggatcaaggcacagactgaccgtgtccgcaacggtgagctgtaccgttgcattgcagacaccaggggtgcatttgttcagcctgcactctatgaagcgttcgggctgacggtcattgaggcgatgaactgcgggctgacaacctttgcgacgaaccagggagggccagcggagatcatcgtggacggtgtctccggtttccacataaacccaacgaatggcagggaggcaagcaacaagatcgccgagttcttccagaagtgcaaggaagacccaagctactggaacaaggtgtccactgctgggctccagcgcatctacgagtgctacacatggaagatctatgcaactaaagtcctgaacatgggctcgacgtatggcttctggaagactctgaacaaggaggagagagtggccaagcagcgctacctgcagatgttctacaacctccagttcaggaacctggcaaagactgtcccaaggctgtttgaacatcctcctccgcaagccccagcaggcgcagggcctagtacgatgacggtaacgaggccgaaagaaagaaagacacagactaggatccagaggatcatgaccagcttgatggggcagaagcctgctacttctgaataataataatacattagagccagggagacgagatgggtgtgcatgcgtgatctcctcaagccaaggtcctggcggctgcacatatattcattcattccattgagaccggaccagatcagtgtttattgtgaaatttgttgtggtgttgcatgtgtggttttcatctgtgtactgttgattggagagctggatgatgtaaagagagtgaaagtgcacatggttacaattgataataataatttatgacaaggattgaggaatgttgtgt

SEQ ID NO: 130930 - DNA, 4213 bp, Zea Mays
tcactgtcttcctcgccggccgtcgctctccgatcctcccgggctcttctctaaaattgggtgctgctctcctccgccttccatggcgtccgccggttgagccacctgacgcgcggtgcccttatcgaagccaatctcagccgtttatccacttcttcctcagttcctctccttgccaaaaataacgcatcctccgtcccgttccagctccaccaaccgggcggcttctgttttttgtctggactggaatcatcgttggtctcatcgcatggtgtcaaaggaagctgagccgttccctgacagcgacagatccaaaggctaggctttcgcagcttcgtcctccctcccttccttttcccccttgtatttggaagggaagggaaaggaagggaagggaggtcgggtcctctccccctttcgacagcgtcagaaacaggggagggggaggaaggggaggaggaaggaaggtggtagccggcgacgtggtggcattcgccacctttagcctgggctcaatcgcctccctcttcctctcttcctccgtcctgcttgccccaaccttcgttctacagtacaggggccttatacctcagggcaagcaggggcacctccatggccgcggtgctcgactccttcgtcaaacggtgcacagcatcactggaagattttgcagaccaggaggcctgcgccgccctcggcatcgtggacgatgtcaggggcctcctggccacgctgttgcgcatcgacgccatcatctcccacgaggagcggaggagggtccttagcgccaaaactgatgcgtgggtggtgcaggtgaaagatgccatgtacgagatcgacgacgtcctcgatgtctgcatgattgagggcgcaaagatcctcgctgctggcggcccacccacgcccaaggtccgatgcttcttctgcttcaagctttcagggccccggaagttccgacatgagatcggcttcaccattagggacattgatctcaggctcagggaagtagaggaggaaatgcctaggcttcctgctggatcagctcactctgatgatgcaaaaagggattggttcagtcgtgacgtctgtaagaactgctcagacgcgatgaagccccaggcagttgggtcgcaggtccaaaaggctgtgggtggccttgtgccaaggatgcttagagagggcaagaagaaggtggatgtcttcgccatcgttggtgcggtggggattggcaagactacacttgctagggagatctacaatgatgacaggatgactgaaaatttccccatttgtgtgtgggttgacatgtccaagaatttatcggagctagatttccttaaaacgatcatcaggggtgctggtgccaatgttggggttacagaaaacaaggaggaactcctcatcctcctcgcttctgccctttccaaaaggttcctccttgtcctggatgacttggagagcccgagcatatgggacaatctgctcaaagattcattgggagatggtgttgtcagaggaagaatactgatcacaactcggaacgaggaagtggcaacaagcatgaaggcaactatccaccatgttgacaaaatggaccctgagagtgcctgggcattattgtgcaatcaagttgatgcagaatgcaattcggaagagcttgcaacattaaaggatgttgggattaagattgcagagaaatgtgatggccatcctctagcaatcaaggtcattgcaggtatcctaaggtcaagaggcaacagcaaggctgaatgggagatggttctgaacaatgattcttggtccatgtgcccaatccttccagaagtaccacaagccgtgtatgttagttatgtcgatctttcttctcaactgaaggagtgtttccttcattgctctctgtatccagaagaattccctattcagcgctttgctcttgtgcggcgttggattgctgaaggaattgtaaatgccagagacaaaaaactgcttgaagaatcagctcaagagtattatgtagaattgataagcagaaacttactacagcctgatcctgaaagtgttgagcgatgctggataacacaccatcttctccgctctctagcccgcgctttgatagcagatgagagtatcttaatttatggccagcagaaactgaacacctcattgtcaaagccccggcatctcacattgtgtagcatggaaaacagcttggatggtccaatttcgctgaagcagcagatgggtttaaggtcgctgatgctcttcaaaagcccaaatgtcagagcaatagatcttctcatggagtcagcttcatgcttgcgtgtattagatttgagcaagacagcagtggaggccatcccgaaatccattggtaacttggtacatttaaggtacctcaatcttgatggggctcaggtcagagacataccttcttccattggatttctcataaacttgcagaccttgagccttcaaggttgccaaagcttgcagagacttcctcggtccatcagggcattgctagagcttagatgcctttgtctctatggaacttccctaagctatgtaccaaagggtgttggtaaattgaagcatctcaatcatctagatggtctaatcattggtcatgacaacaatgcgcctgagggttgtgacttagatgaccttaaagcattgtcagaactaaggcaccttcatatagagagtttggatagggctacttccggtgcgtctgcactcgcaaacaagccattcctagaggatctgtacctctctgagcaagcaccagcaatagaaaatcaggaggatctggaggacaaagatgaaacagaaaaagaagagaaggaaggacaggaaagaagcaatggccaatgcagaggagatgagtcaaccaaagctagtgaaaagatatggaatgagctcaccccaccccagagcatcaagaagctggtaatcaagaactacaaaggcgtaaagtttccaaaatggataaaaggtcccaagctaggagactccttccccagccttgtgtttttggatcttgaaaactgcatgtcatgtactaaactgccttcacttggcctcctgagtcaactccagtccctgcaaatctcaaatgcagactcagtcatcaccatcggttcagaattccttgggaccactgtactttcatcagccactccattccccaagcttgaggttttaaagctcagaaacatgaagaaacttgaagagtggtctttaactgtggaggagagccaggtagtattaccttgtttgaagtcactgcagatacagtggtgtcctaaactgaaagctctaccagaaggcctgaagcatgtagcgctgtgtgaacttcatgtggagggtgcacatagcctaactgaaatcaaggacctgccaaaactatctgacgagctccatctcaaagataataaggtgctacagaggatctccaacctgcccatgcttcgttccctcattatcgatgactgctcaaagttgaagcatgtggcaggtcttgatgcgctgcagcacctcagacttgtctttcctccgtccaccgagacattttatttcgaagagctagtaattttctggagcgttgccttcccacggtggctggagctactgattcagaagtgcaaaggcctgcgacggtttgagttgcagtgtggtctgtcattgctcaggagctgcctcgacggtggcaagaactggcatctcgtgcagcagatccccgaggtgcgcatcataagctgcgatggcaagagatactttcggtataacaagagccgccgcatctacgaaactaatgcacagtcagaagaatgaagccatttctgaaaaccttggcacgacactggtttgttttgggtcagccacacgtttcagttgtcgctgtccctactttgttccgggagtattgagagcttgtgttctgttcacgattgattcaggtgttttcctttgttttgcgtgttttttttcttcttctttttatcgctgagccgatatatatgcactggttctcctctgaatatgggtgtccttcaccaggactcaatatgtgtaattcttttctgtttcctggtcatgattgtctgtaaattgtaaacattgggtttgatggatatcgacactggagtgtaaagtgttggcggttaaatacacggccctctttcctggctcagcaatgaaacttctgttctac

SEQ ID NO: 130931 - DNA, 1854 bp, Zea Mays
ctcgcgggagctgtacgccgccgctccactcccaggctcccagctgcccttggcgaccgtcgccgccggccgccctactccgagctgttcaggacgctttgctggcgagcacccaccacaccagttgctaggactacatgaatggatcatatactagctcgttaagcctccatgatgtcagtgtcgacgatggacaatcagctcttgataacagcagtagaacctctagtccttttgatatcctgactcctcaagatgttatccctatcgaaacggcaaggtctagattcttggacctcgttgttgaaagctttatctgtgagcatgttactgagttggtggaatgctctagctctgactgcagccaggtggatggcaaatcaagcaagagaaagcagcaggaggttcgatacgagggtgacccaagggttgctttgccattgatgtatatagcaaacctgtacgaaaccttgataagtgatgtcaatgtgcgtcttgcggcactgattgggttccgtgagaaaactataggtctagctcttgaagcttcaggtggcttgtacaggaaactgatccagaggttcccaaagagaggccactgcagcttcaagaggagggagttagcgacttctcatgcaaccaggacaaagtttcctgaacttgtggtacaagaagaaaaacgagttcgttttgttgttattaacggattggcgattgtagagaggccagaaaatatgagaatggaagatgcggaatggttcaaaaggttgactggtcgaagtgaagttgctatttgttcaagagattacaaattctattcaccccggcataagatcaggcgttccccacaggcagcatttgacatccctgatacaagtgctttggcagaggatgagaactcttcattggtttgttcttcaggatttcgctcaccaaacgagatacaaaatcagcatcagtcaacatcaaagagacctatcgaacatctagaaaatcaaccctttttacaccttttccatcaagcagaagatgatagcatgcagcaagttcaacattgtgctcagttcccacccattcatcaatgtacgagcactccacatctatcagataacccccaacaccagcaacaggcttatttatctcaacatatatcttgcttgcaagttgggcaaggtcatcttggaggacgcatgcatattattccaaccagccctgcgaagttctgtgatgagtgtggctccccatatttgagggcgacatcgaagttctgctcagagtgtggtaccaagaggctaggaatgtgaggtgacttgatcaatgtgtatatgaatctgatgatgtagcaattgtagtcttatgtttgtaaaagggtctctagcgtaatggttaaggcagcccggcgaagttctgtgatgagtgtggctccccatatttgagggcaacatcaaagttctgctcagagtgaggtaccaagaggctaggaatgcgcggtgacttgatcaatgtgtatatgaatctgatgatgtagcaattgtagtcttatttgtaaaagggttatttgtaaaagggtctctagcgtaatggttaagttttcttttaagttttctgagtagcaactctggttgggccgttttagagtgggcggtgatatcttactagtgatgggggccagggtttggaaattttctcgagaccatgttttggtctcctttttaatataatactggaatgacggtcttttggaatgacggtctttctcttcccgaggagttttttttatgcctttaaagttgtgtgagaagtgtattcttgagatgatgactcagcagagagtatgcagccacctttactaga

SEQ ID NO: 130932 - DNA, 809 bp, Zea Mays
tttaggtcttacgacgcgcccaaagctcacgccggacctgctcctctccgacggcggcatcggcttcgtgctccgctactttccctgcaaagatgcttgttgggtggtaaaagcggtgctggtgctgcaattgatctgtcatccctaattgttgttgatggaaaggtctgctgggatctgtacattgatgggcttgtggtcagttctgatggtaatttgctagatgcgctagctgttgcgataaaggttgctttgagtgatacaggtataccaaaagttaatgtttctgttagtgctgcatctgatgaggaacctgaagttgatgtaagtgatgaggaatttctgcagttcgacacatccggtgtgcctgttattattacattaaccaaggtgggtcggcactacatcgttgatgccacctcagaggaagaatcccagatgagttctgcagtgtcggtgtcagtcaacaggcatggccagatatgcgggcttaccaagaggggaggggcagggctggatccaagcgtcatcttcgacatgatatctgtcgccaagcatgtgagccagcagttcatctccctcttggattcagagattgccgccgccgaagctgaagaagaggctcagtgattgatgaaaaggaaaaaggactggttgcgtaaatgctcgtgtgttccaacttcaaccaaatgctgtagaaatcttcaggaacactctatatttacaaagtcattttgctctctatatttacaaagtcattttgctctctatatttacaaagcatgaatgaagatacccaagaacactcc

SEQ ID NO: 130933 - DNA, 1302 bp, Zea Mays
gaaaccaagcatttaggtcttacgacgcgcccaaagctcacgccggacctgctcctctccgacggcggcatcggcttcgtgctccgctactttcccaaggcgttcaagccccgcccccgcccaggccacgaggtggacgacctcgccaacctcatcaagctctacgcggactggcactcccgcctgatcccctactactccttcgaacagttcgtgcgcaaactcgagaaattgggtgccggcaaccgcgtcagggacgatggtgggcctctctgaaggggagaaacacttcatccgcggcggcattgcacaagacgttcgcactgatggacgtaggcggctgcagttccggtccctctccgtccaaaccggagtcattccacaggcgaatggctcagcgcgtgttaggttgggggccactgaaataatcgctagtgtcaaggctgaactaggaaaaccaagcattcttcaccctgacaaaggaaaagttgctatttttgtcgactgtagtccaaccgctgagcctctgtttgagggtagaggctctgaagaattgtctgctgagctctctgtttccctgcaaagatgcttgttgggtggtaaaagcggtgctggtgctgcaattgatctgtcatccctaattgttgttgatggaaaggtctgctgggatctgtacattgatgggcttgtggtcagttctgatggtaatttgctagatgcgctagctgttgcgataaaggttgctttgagtgatacaggtataccaaaagttaatgtttctgttagtgctgcatctgatgaggaacctgaagttgatgtaagtgatgaggaatttctgcagttcgacacatccggtgtgcctgttattattacattaaccaaggtgggtcggcactacatcgttgatgccacctcagaggaagaatcccagatgagttctgcagtgtcggtgtcagtcaacaggcatggccagatatgcgggcttaccaagaggggaggggcagggctggatccaagcgtcatcttcgacatgatatctgtcgccaagcatgtgagccagcagttcatctccctcttggattcagagattgccgccgccgaagctgaagaagaggctcagtgattgatgaaaaggaaaaaggactggttgcgtaaatgctcgtgtgttccaacttcaaccaaatgctgtagaaatcttcaggaacactctatatttacaaagtcattttgctctctatatttacaaagtcattttgctctctatatttacaaagcatgaatgaagatacccaagaacactcc

SEQ ID NO: 130934 - DNA, 735 bp, Zea Mays
atgtcgcagccgttgatctcaattctcatccacgtccttgatgcagccgttgaccaggataccagcccacccgttgttctgcgcatgctggacggggttgccgccaaggatggcgcagcgcatgctgccgccaccgtcaaccacgaggaccctaccgtggcctttctcctcgaggaactcgcggaccaggacgttgtcctcctagaccttgagcgtgacgatggggccggcgaagacctggcaccgtccgtagatctggaagatgggctggagcgcgcggagctcgccgttcatgatcaggtgagggttagcgtcgcatacttcggcggtggccagtggcagggcagccatatcttctttttttattatttttttacttctcactcctgctgctgtcatgagaagacagggaaatcagagactggacaccaggagattgattccccgtcactcagtcagcgccgcctgccgcctggagtgaggacgccacccgatgctgggaagattggccgtctgggactctgggagtacgccgccggccgcctgggaagacttgaagcgcgtgggagtgggaggctgggagctagggttgcgagttgcgacatcaggccatcagggatatcaactgggcgtggcccgtgggctgtgccgctgttggactggcggttcgtgcagaagcgtaggatcactgcctctggcgaccaagaacgcaccagaacggaaacacatctctaa

SEQ ID NO: 130935 - DNA, 3256 bp, Zea Mays
cctctaccaatctcaatcaattcatttcaaactttaaggatttacaaacatacgtttatggagatctttcatcatgggatatgaaactatttattgacggagaatttttcgttgccttccttcctgtaatgagaagtgaaaaaataaaaaatagacgaacgaaaaacaactggctcgagagcgagagggactgtacgctggaccgccggcatcaggatgagagcaaccgaagcgcactgcccagtcccagctgcctaggtctgccgcctgtcttgaccccacccactggccacttcccctcctgtccgttcccaaatcccgtcccctccacccgcactccattggcgccgctcccctcccctcgccgccgccggagatctgatccgatccgatccgatccgtttgtgcttgtgctgcagcaggagtgagaagtaaaaaaatatggctgccctgccactggccaccgccgaagtatgcgacgctaaccctcacctgatcatgaacggcgagctccgcgcgctccagccaatcttccagatctacggacggcgccaggtcttcgccggccccatcgtcacgctcaaggtctacgaggacaacgtcctggtccgcgagttcctcgaggagaaaggccacggtagggtcctcgtggtcgacggcggcggcagcatgcgctgcgccatccttggcggcaaccccgtccagcaggcgcagaacaacgggtgggctggtatcctggtcaacggctgcatcagggacgtggatgagatcaacggctgcgacatcggtgtccgggctctcagctcgcaccctatgaaggccaacaagaaggggatgggcgagaagcacgtccccgtcaacatcgctggaaccaggatttgcgacggcgagtggctctacgccgatcccgatggcattcttgtctccaggacggaactcaccgtgtagacagacacctggttgtatgtgtgtgtgtataaggaatcgggcgctcttgctgttaagcccgagcttgcaataatggattcttgctggatcacacatttatacttagaataatcgaatgcttgcttccttggttacaagatgttcttggacaattcttttttttgttccttgtcaattttctattccggcgacgaagttgattaaactatagatccccttgttggtgtagttctgaagctgagtgttctgtgtcttggccctgtgcctttgttcaagtctgtatttcatcttttgaaaagaagcttagacgcatactattaattaatctgattaatcttatgtccctttgatatttggatgttgatattggaggacatagaattttataaagctgattctaatttccaatttcatgctccaatatctgcatctctgaacggagtattagcgaattcagctcaacatatgccaataatgccattgccctcaaggttcaagagcaaaagcaggttgatttggcacttatttaaagtatacacatagtggcaaatttagaagaaatttagggcaccggtttgcaattctgtgaagttatttattagttttagcaggatggccattgtgccatgactgtttctgttgggtaggtggcagactataaaatttcccaacgctgcgttcacccctgccgctctcttctcccgctctctcgcctcctgtagctaggccaggtctcagtgctcattctcactcccttcaaattaccggtgacgagtatccactaagtacgcacaccccttccctcgagttcccgctatttggctttcgtactgggctgtgatccagttacgagacataactgagtagcactctaggtgttcgacggaatgcctctggcaccggttgtgttcatttctgtcccgcagtgtccaggacgatggtgggcctctctgaaggggagaaacacttcatccgcgcggcattgcacaggactttcgcactgatggacgtaggcggctgcagttccggtccctttccgtcgaaaccggagtcattccacagcgaatggctcagcgcgtgttaggttgggggccactgaaataatcgctagtgtcaaggctgaactaggaaaaccaagcattcttcaccctgacaaaggaaaagttgacatttttgtcgactgtagtccaaccgctgagcctctgtttgagggtagaggctctgaagaattgtctgctgagctctctgtttccctgcaaagatgcttgttgggtggtaaaagtggtgctggtgctgcaattgatctgtcatccctaattgttgttgatggaaaggtctgctgggatctgtacattgatgggcttgtggtcagttctgatggtaatttgctagatgcgctagctgttgcgataaaggttgctttgagtgatacaggtataccaaaagttaatgtttctgttagtgctgcatctgatgaggaacctgaagttgatgtaagtgatgaggaatttctgcagtttgacacatccggtgtgcctattattattacattaaccaaggtgggtcggcactacatcgttgatgccacctcagaggaagaatcccagatgagttctgcagtgtcggtgtcagtcaacaggcatggccagatatgcgggcttaccaagaggggaggggcagggctggatccaagcgtcatcttcgacatgatatctgtcgccaagcatgtgagccagcagttcatctccctcttggattcagagattgccgccgccgaagctgaagaagaggctcagtgattgatgaaaaggaaaaaggactggttgcgtaaatgctcgtgtgttccaacttcaaccaaatgctgtagaaatcttcaggaatttggttccatttttatgttattattagtagtagtaaacaccgaggatttggatcctgggaacgaacgacgtcgtgttggctttggctgggctcagaggaacgaatactgaatcttgggtctgatgatctgatcctcttgtgcccccaatccgatgataaatttggcccctctcacaccaaaccaaacactatggatttcctccatccgttttcaaacaatttcgcacgcaattttgaatctgatttccacatactagtgcattgtgtgtggcatgaataggtgaatagcaataatcttccatcggcatgtgaaatgcttatgacttcatcgatgggtcgagctgagtacaacatagcatgaatgaagaaacccactctttgaattatgatttacaaagtcattttgctctctatatttacaaagcat

SEQ ID NO: 130936 - DNA, 1607 bp, Zea Mays
ccaacttgtatgtgacgatatttccatgtaatgctagtgataaaaataaataattatcttttcaaaagatcactaattatataagtatgtttattttaatatacacatagtaatttattacatccaataatatgtataaatgacaatgttttagatttataataaagaacacacattttaattataatttaagtgaggataaaaattctcgttaggatttgttcggtttggaatggattaagggagcacctctaccaatctcaatcaattcatttcaaactttaaggatttacaaacatacgtttatggagatctttcatcatgggatatgaaactatttattgacggagaatttttcgttgccttccttcctgtaatgagaagtgaaaaaataaaaaatagacgaacgaaaaacaactggctcgagagcgagagggactgtacgctggaccgccggcatcaggatgagagcaaccgaagcgcactgcccagtcccagctgcctaggtctgccgcctgtcttgaccccacccactggccacttcccctcctgtccgttcccaaatcccgtcccctccacccgcactccattggcgccgctcccctcccctcgccgccgccggagatctgatccgatccgatccgatccgtttgtgcttgtgctgcaggagtgagaagtaaaaaaatatggctgccctgccactggccaccgccgaagtatgcgacgctaaccctcacctgatcatgaacggcgagctccgcgcgctccagccaatcttccagatctacggacggcgccaggtcttcgccggccccatcgtcacgctcaaggtctacgaggacaacgtcctggtccgcgagttcctcgaggagaaaggccacggtagggtcctcgtggtcgacggcggcggcagcatgcgctgcgccatccttggcggcaaccccgtccagcaggcgcagaacaacgggtgggctggtatcctggtcaacggctgcatcagggacgtggatgagatcaacggctgcgacatcggtgtccgggctctcagctcgcaccctatgaaggccaacaagaaggggatgggcgagaagcacgtccccgtcaacatcgctggaaccaggatttgcgacggcgagtggctctacgccgatcccgatggcattcttgtctccaggacggaactcaccgtgtagacagacacctggttgtatgtgtgtgtgtataaggaatcgggcgctcttgctgttaagcccgagcttgcaataatggattcttgctggatcacacatttatacttagaataatcgaatgcttgcttccttggttacaagatgttcttggacaattcttttttttgttccttgtcaattttctattccggcgacgaagttgattaaactatagatccccttgttggtgtagttctgaagctgagtgttctgtgtcttggccctgtgcctttgttcaagtctgtatttcatcttttgaaaagaagcttagacgcatactattaattaatctgattaatcttatgtccctttgatatttggatgttgatattggaggacatagaattttataaagctgattctaatttccaatttcat

SEQ ID NO: 130937 - DNA, 1450 bp, Zea Mays
ctcctttttgtcctttcgatctgtatttggcgctatctcgcctcccaactcccgccaaaaaccctccatttccctttttttccccttgcccaggaccaggagcaagatccatccatccatccccgattccccaaccctaagcagccatggccgcgccgccgcccacgggctgcttcaagtgtggccgccccggccactggtcccgcgactgcccctcctccgcctccaccaaccctcctgccgccgccgacgcgcccaccaaccctagccacctctccggcgccgcctcccgcttcaacgccaagcccaggccccccgcggcggcggtggatggcgaggacggcaaggggaagaagaagaaggagagggccacgcgccccaagctcacgccggacctgctcctctccgacggcggcatcggcttcgtgctccgctacttccccaaggcgttcaagccccgcgcccgcccaggccacgaggtggacgacctcgctaacctcatcaagctctacgcggactggcactcccgcctgatcccctactactccttcgaacagttcgtgcgcaaactcgagaaattgggtgccggcaaccgcgtcaggagatgtgtttccgaactcagggatagggtcgccagaggcggtgatcctacgcttctgcacgaaccgccagtccacgaagacatgccattgccaggcggaggtgaacatggtactgaagacccagttctcggcaccgatgctccgctgtcggacaaccatggcactggccccgtggtgcaggaagacgcagatccaccgatggagagcaacgacgtggtggatcccatggaagaggatctgcttaacgaaatctacgaaaacacagctgatatcccggctggtgagggagccagcaaggagtctccggagcagtcggctccaaaagaagccaactcgctggcgcaggaaccccaggacggcgacgtccccaagccggcgaaggttgagctcactgaggcgcagaaggcacgcatggaggccaacaggctcaaggccttggagagagcggcggcacgggctcgtgcctcgcagcagcccacctagatacgcaagatgctgctgtcttcacttcacttcaatagttggttggttggttgagatgatgcatcattctgtggtgtgtcattgacaaggacacgtagttcgctggtgtctgattgaatctgggtctgctctagtcgatttggtccctagtagtatgtaacaggagaagataagagtttgttggatgtgcttgaaagcttcgtcctgttctcgcttccccaaccattctagagtcagaattccatgtcattcaagctgatcttctcattcatcgttttgctgcatagtgcgtcttggtccaattgtcttcatttaggttctagtttgagaaccctatttttttaatggatttttatttttacaag

SEQ ID NO: 130938 - DNA, 819 bp, Zea Mays
tagcaagtcccgaatcaatctgagagattccattagagaatataaaaaaaacacaacgctggacatcaacgacaatgactgactgactgaccgaccgaccacgagctttaagagttctaattaaaatgacttgagacagacacacactacatccatcaagttctaattaaaatgggctaagcaaaacgaccacgagcttttaggcctcctcgtccgcgtaggccggctccagtatggccgcctccgcctcctgcacctccttctccgtcttgcgccccttcttggacttgtagtacacgctcatgaacgtgcccaccgccccgtacttttggcggcagtgctcgtagtgcgacgcgtcgaacatgcgccagaagtccttctcgttcagctccgacaccgcgtactgcggctggtagctgtggttctcgatcagccactgctccagcctgtgcacagcctccgcgccgttgaactcctcccccctcagcaccgccccgggggcgtagtacacgcccacgtccgtgaacatctgtgcgtagctcgtgtcgccctgcctgtgctggatcacatggttgtcgtggtagtagttcctgatagcctcgccctgggtcgccttcagcagggacaccttcggtggcatcagccagcccagcaggaacctgaaccagaactggtcgccgaagggcaggatcagcttcccctcccagtacaggcaccgggtgtgccggtggtagtactccctcgtcgggatgtactccacaaactcgcccctcttcagcgccgtctgagcgtgctggtagaaccagggcttaaaccacc

SEQ ID NO: 130939 - DNA, 384 bp, Zea Mays
atggatagttctggatgtgctggttcttataatgacgcaggagggagattaagctccagttgtgctccttatttgaatgatgaatcaaatacgcctgattcttcggaatttgatggatccactttcactgagcatggcttgggagaagaaagcaatagctaccagaagttaacatgtgactgtgtttataactccagttatgcaaccacagatcttgtctttactatgaggatcaacgacaacagtgggaactatagcgtcgatgttgaagctgggttaaccatcaaagacaaaaaaatagacatgaccattcaaaaccagggactttcacagtgggttctaataggcacaagaacaatggaaaaagatagttcagcagtgtga

SEQ ID NO: 130940 - DNA, 3718 bp, Zea Mays
tccccgcgcggaagcggagcacccaacccaacacgcctccctcccctcccctccagatccagcctccctttcggcctcctcttcctctgctgagttcctcttcctccgtggaatccgcacccgccgcccgcccccaattcggccgggatccttcgattcgcttcttcctccctcgtctatagttgggaaatctcaacgctggggagtcggtcatcactgttgaaggccatgatatcactctgccagggcaccacaggaagttttggcaaactgaatccatgagttttggtcagcttgggacccaaggaaggacaataaggtttggtccgagagtgaagtagcagagtggtgccaaaaaaatttttgcccaacacaccatgcttgaggatttcttcactcttactgagatgaaggaagggatatcaacggttgcaaggatcacagagctcatatctgagatgcgcaagctggaaaactccgtggacatcaacacatttgacgtgataaggcagtgctccacggctgccaacacactagcatccaccaaaaacgaagagtgtcttcagcattttgttcagctaaatggtgtttccattctcaaccattggcttcaggatgctcaaaattgtggtggggacgtcagcaatccagctgctgaggatctcatagttgcgatattgactgcattggactgtcttccgatcagcaatgagcaatcagtctcctgtggggttatgcctactgttggtcacctgctggctcacagaattgccgtgatcaaccaaaaggcaagagcactctgtcacaagtggggcggtgtaccaaaacatggtacaaatggagagcattttcatacagaggagtcaagccacactgaccagcttaagtctccagatgccggccacaagacagaaactaagagaaagtgtgtagtggacgaaggagagcctgatgaagaatcaaaacctgaggtgacaactcactcagatgcacctttgtccgacccttctctgactaatgataatgcagatgcaacagagcaaccagcagggctaacttcaccaaatccatcaaacggaaatgcaacattaggggatgtgaacaacttggtcaggtctcctacatctgcaggtcatgtgggtttagaagatgggcagtccacccccaatgaaatttcttccaatgatgctgaactgcccattaatggcatactccggtcaaactctactaatgcaaaaagtggtactggacaagatgctccagtggaatcaactccagtggccatgtctgtagaccataataaacctggaaagttgtttcctggtagtaaaatgggtctggaggatagtattatttcagttagctcaagtatcaaggagtctcagccatttgcagctggtagatcacatttggagaaggatacaactgaaactttgaaccatcttgcagttgtaacccgtgatttgcaagatttgtccgaggaaagtacaagcaaagaagatgaacctacatcatcatctagtacagatgatatggacatgagcggtgattatatattgcaaagatgcatgtcgagctttgggggctcctccaaggcagcagacacaaaatccactgcattggaaggggagaaatcaacacgaatggcagactttgatgatacagatgcactagaagttgcacgtctggtagctattgaggtggagcgggaagtcattgactacagagaacccttttgtagttctcctgatactaattccaggaatgctgacagtcctgacctggaaggaccacggcagcctgtagccattgccagtgaactgaatgataataaatcttccagtacagaggctaagtcaggaagctcctcatctcataaggaggatggatcaggcatcacagatggcagcggtccgttgagtagaaaacatacacacagtgtcgatctggggaacttagaccttaatgaaaatcagtgtgccgaggaaactgactttaatccgaagtcgatccttagtaattctgtcaatttgtcaatgcctatagctgtggctgcatcaagaggctcatctgtgtttccagctcggctccactttgaaggtggacttgggtggaaaggctctgctgcaaccagcgcctttcgaccagctccacctcggaggactcctgatgcagagaagtcactttcagcttcttcacataaaacaagcaacatattatttgatttaaatgtagctgacaacggcagtgctacttctggtgaaccactttcgacagcaatcctgccagcttcttctgaactaccttccgaggttgcttccaaagcagttgatgtgagcggaggactgaaacttgaccttaatttctcatgtggtgatgaggaagatgctatcactgcaagcaatgtgccgtcattgtggaatcaccaacaatttaatggcaactggagtcagccttctttctcatcttcaaagcaacctgcagccagaaactttgacttgaatgacaacatgtcgatcgctgatgtttctgtgcgaggaatggacgggtcttctgtcaagactccttcaaggccaagggatatgtcggaccattctgccgtcacaattatgggtaagaggatagttgtaggacagagagatgatggacagcaataccagcataactttctgggaccaagtgctgaatcaagagtttttgcaagacccactcaatcttttgcacatactcctgattatagtgttctcagttatccatctcaacctgccatgccttttaccccagcgttctttgccccagggggcagtccatacttggtggatgcaaaaggtgcaccagtcataccaccgctgtcaggtctaagcctcggcatttctcatccatctttcaacaccagagcaacacagccctcatctaatgaactgagttacttccatcctagcgtggatttcagttatggagtgtcatctgaaggcgcacgtagggaagcagggagctactggcccatgtcctaccagggtcagacaatgtttgtggatgaacgcatgaggaatgtatcacaggatggtacttctgggttggtgctgaagcgaaaagagccagagtcaggttgggatttgtacccacgtcgttgagcgtgagcctgaaggtttgttgcagtcgcaatcgattttgtcccactctcttaaaaaggatatgttcaatgctccgtttatggcggcaccttggacattgtattttagggtatttctttggcacgggcccagttctactaggtctgaagacatacacggagaactgaataagagatcagctacaggtagatttgacagatgttgacatggcaaggacattgttagctgctggaaaccacctcgtgtagatctggttctttgtgaatgtattagctttgttttagttgacataatatagccaaattgctctctagggagctaaattatgtaaatcatcatcgtataactcatagatgaaatgcatccctttttatctatctttatttttccagtgttggtgcaagttgtactgtgatcaactatattgtatatatgtcattgtttgaagctgcgcatccaggttttgtactttgttcttttttatttgtcgtggtttagtttaactagcgaatcatgttgcatgcagattgcaggtttagagagtcgactgttagcatgtcggaaccagatgctttatttggata

SEQ ID NO: 130941 - DNA, 604 bp, Zea Mays
ctgttgaacaaaaatgctaattgtgtgttcacctatgggcgttggttgtatacagtttggccacatgaaatgcatatagagatggtgcaataagaagggcaacattacatgtgaaatctgtaaccaagtatactccccaaattatgccatccctccacctaagtgttgctcagatgaaacgggcatggatcttaggcaaaactgggttggatgaatcgaccctcacgactcccatttcctagccatcgccatcgcagagtagcagctgctgcaggctgagttcgacgactgtgtatccgcaaactctagcggtgccacgtgctgtcgaaccattgctttaactttgatgctccttctgcttgtgcgacatgtgatcgtcgtcgtgagggacgttagcatgctgcaagatgcaaccgtgctgttcagctccttacttcaaatagtacagagttcgaagaaatgttattacaataccggggtacaagctcgagagagccagaatacaaagcacagtagaagatacactagcccaagccacaggcagaactgggtgcagacacagccccctcaatcaagcatagcaaaaaagaagtcttcggctgct

SEQ ID NO: 130942 - DNA, 5813 bp, Zea Mays
ccgcacacaagtcctcacgatatttagattcttatgcagctagttatacacgaattcaaattctatatttaaaaggagtaccaaacaggtccaatgtgtgtaataaaaagaaaaaaaaagattccagtagcagcagtaaagcccattcgtatgtggccctgctccggaccgaaagataaagcccatttgaaatccagctcggcctgctgtcagttcaggagcaggacgagtcggggtcggcgcggcggcaggccgcaggccggcagcaggctctcgcttcgctctctcgttgtctgtcgagaggaagaagacgaggcgagggacggcagcagtagcagctccagcatcttctagcttcttcattcatgggattcggtctctactaggattaggggtgcttcatttcatccgatccccaacgacttgacctgattctgatctcgacgacgatgcggaagcgggatctgggcatcctgctgctcgccgccttcgccatcttcttctccctccaccacgaaggcgacttctccttccgggagtcctggtaccacctcaccgacgaggacttccccatcaagtacgaggccgaccgcctgcccccgccgctcgtcgccgatctcaacggcgacggcaagcccgaggtcctcctccccacccacgacgccaagatccaggttctccagccgccccacgcccgccacctcaacgatgactccgccttccaggaggcccgtgtcatggccgacatctctctcctccccgacaacgtccgcctcgcctcggggaggcgccccatcgccatggccgtcggcaacgtcgaccgctcctacagacctggcgaggtcaggaagcaggtgctcgtcgtcgtcacctccggatggtcagtcatgtgcttcgaccataacctcaagaagctgtgggagcacaacctccaggacgatttccctcatgccgcccaccaccgcgaggtcgcaatctccataaccaattatactctcaagcatggagatgcaggcctcgtcatcgttggaggaaggatggagatgcagcatcattcagcagatctcttcgatgaatttatgataccagaacacaacatggatgatcgccgtcgaagcgccagtgagaaacagggctctgaggctggcaatgcagacctgcgccattttgccctttatgccttcgctggacgtagtggcgaccgtagatggagccggaagaatgagaacatccagtcacagccatcagatgcttctgtgatgttaccacagcataattacaaactcgacgttcatgccctcaatagtcatcaacctggtcagttcgaatgtcgtgaattcagagaatcaatccttggcatcatgcctcatcattgggataggagagaggatactaccctacaacttgcacattttaggaagcataaaaggaaacaagttaagagaacgcctggaaaggctgttattaatagcgtgaacaagcccattgaacacaatccacctgggaaggatgcttccaatagaatagctagagctcttgggaaggctgcagatatggctaactcaaataaagccaggaaggcacagaggatgcagtatgttccgacaatcactaatcatactcaagtttggtgggttcctaatgttgttgttgtacatgaaaaggaagggatagaggttgtccatctagcttctggacgtacaatatgcaagcttcatttaaatgaaggaggccttcatgcagatattaatggagatggagttctggatcatgtccaggttgttggtggaaatggtattaaagagcagactgtcaagttttgggaggacattgatacagctggtttagaggtcgcgactcctatcctggtccagacagacgatgggcataaacacaggagaggaagccatggtgatatcatctttttgacaagccggggagaggtgacatcgtactctcctgggctgctcggccatgatgcggtgtggagatggcaagtatcatcaggggcgacatggtccaaccttccatctccatcgggaatgatggagaacatagtggtgcctaccttgaaggccttctccctacgtgcctatgacccgaaagaggtgatcatcgccggtggtgaccaggaagcggtggtgctctctccttctggtggcatactggccatgatcgagctcccagcgccccccactcacgctcacctcctggaggatttctccggggacggtctcaccgacatgattgtggtaacttccggtggaatatatggattcgtgcagacaaggcagcctggggctcttttcttcagcacgctggtggggtgcctgatagttgtgatcggcgtggtattcgtgtctctgcacctcagttcgtccaatgccgccaaacccagggcttcctcgtctgaatacagatgatgttttgatatgcaaggtcaagagacttttggtactcctatgttctagtagtctatatatttaaccaaatgagaattcgtgttattgtatgataagaattgttcctactagtatatctcatgatatactgatagtgcaatctcgttttttgttgtctaccttggtgttcctagcccccacaaccatttgtacgttggttttttttttaagtttgtttggtcagcaggtcaggcaacaatccagtccatctaatttgagtacatgatggtcaagattgtttcctggtcgacaagttgcctgcccggctataaacaaaatatgatgtcctagcatgcaaagctcgtcttgtctacagtagaatgtgtaaaatagaagatgcagacaagtttgaaatagaaaatgagatataaaatagaagacgtagacaagtttgaaatatagaatgagataggagatctgttgaagatagtttgaagttgaagatagtttgaagatagtcttattgtgttgtcacaattctaccaaagagagggaaagaaaaaaaaatgacaccacacgtcaggctcagctcacagaggccaccgccgccgtgttcctctgtcccgcgggcccccaccccacccgcgtcttcaacttcctgcctgccgctcttctccttgtttgttcccttccgtctaatttggctgcgggtgcaggtggaggccgaggccgaggccaacgccgcctgcgcctggcctgccgtgaggtggaggcggaggcggaggccgaagccaacgccgcccgcgcctggcctgccgttccgcgtcatcttcttccttcgcgtaacgacgccggccaggccaataaataaacaatttccaattccgttcctggaggacgtctgcacggggaccttcccagcgggcgacggccggctgcatccatggcggtggccttcctgctgctgggattgggtttcctccttggcctcctctccctggcgatcgcggaggggctgacgctcctttgggccatccgaagcctcacgcgccgcacatcggcctcacgcagcacgccgccgccatcactccccatccacccgacgccggcgcggtctgtgtctcgccacagcctcaaccgacagggcttcttatggatgctggagcaacccaaggatagcagcatcaatggcgctagcccagggatcagagacaggaagctcctcgtcgaggttttccctgtaaaaatgtctgctacgcttcaaggacattccctcaccttgtctggacccgatgatgcctcgcagctaaccattgacctgctcggttgcacagttgctgctgtttctgcatccaatctgccctcacgtaaatgggccaagaggtatccgataaaactggaaagcaaggaatctggtatttgcagggggagcaaggtatgctatgtttatgcagacacctcttgggagaaggaatcatggtgtaaagcactccgtcttgcttctactacggacaaggacaaactcaaatcccatgaaatgctgacccaagagttccgcagttacatgtcctctctgaaagctggatacccttcctttctgggaccctcgacactctccagtcaggaacatgtgcttgtggacaacactgtgaagaatgatggaccttcaaaactccgaggttttctcaaacgattggtgggaaagaaggcatctgccaaggcttctcaggagagcaaaacaggtccggcgccatctaaacaagatacaagccaacccagtactcctagctccactatgagtttcaacagccagctaccagcttcccccagtgcaaaggtggatgaaaagcttgccgatgacggtacactttgttggaacctcctaatctcccggttgttttttgatgctaaaatgaatgatgagatgaacaaagccatcagagcacgtattcagcgaacattgtcgaacaccagaactccagcctacattggtgagatcacgcttactgacctcaaccttggcaagctcccaccatctctgcacagaatgagagtcctcccactggatttggacgaatcgtgggctttcgaagttgacttcgagtgttctagtggaatactgctgcatatcgaaacaagacttgaggttcaggcgccagagctggaaaaggacattatgaagactgatattagaggcaatcctaatggggacgcgagttcagatttccttgatagtattgagcaatatggtaaccaattcgggccttcagaagtttcggattttgcagcagaggtcaacgatgaagcagataccttaaggaaatcaaagagcgctgggtgggcatcaacatatatgtcaaggtggagaagtatcttgaattcaatagcggaccaggtttcacaggtgccgctatcattggcgattaaaatttcttcagttcgtggaacgatgcggatacatctaaagcctcctccgggtgatcgagtttggtatgggtttacgtccatgccggagatagagtgggagttggaatcatcggttggggataggaagataagcagcagttacatcgcctcgcttatcggcaacaggatcaaggcttcggttcgtcagatcttggtgatgcccaactgtgaaagctttcctatttcctggatgatagcagatacggatgactgggtgccccgcagaattgcaccttttatatggctgaaccgtgagcccgctgataggcgtgctgcagacacaactagagagatgatgccaggggaagcttccacatccaaggccattgcaaagaacaagtcgagtccgctgccgtctacaaaaagaatcaccaacggttcctggaacaagacaaagatacgtgttgatgggcaagagcaagagcaggcagaagcatcaacgagctcgcagtcttggctggtttcagcaaatggtgatgcaacaagggaacagctgaggatgccactgctgagcagcagcggagacgagagagcaggccctgtggaggagcagcaagcatcaccttctgctgctgaggaggagggagatgcgaagaagaggaagaggcgtgcacgggtgatggatctaggaaggaggatgggcgacaagctggaagagaagggcaagcgtttcgtcgggaagatgcgggagaacgcgaggaacaaccgcttgctattgccggacttggagcaggccaccacccctcctgctcctgctcctagttaggcattttaaggatgttactcgacaaaatgaaaattaatcagttgcagcgcctagcaacagctcctaattaggagcacttgtattatgtaaaagaaagaaagaaaaagcttatgagatatgattgtaccacacagatggatgtatgcatctctcatctcacccactgaattaacacaaca

SEQ ID NO: 130943 - DNA, 1714 bp, Zea Mays
ccatttttagctctctctctcgcttatttcttcaccctcgcccgctgctctcaacccggggataatacacatgctgctgtatcttatcttcaggtggatctcggcaaggccggctttgcctctgccacgcaagagaataacgcgatccgcagccgcaatcgcattcgctggggccccgacaggaacggcgcccactccttgccgcgcgggattgtccaccgccactccgacatgtccctccgcccgctctgggaggacgacactgcttccacccacaagaataaaaacagtgactacagtgctctcctcgccatggcagtcggcatctcccaaataaaaaacattgacactatggcccgtaagtttctgaaggaaaactatgcagtcatgctcttccattatgatggaaatgtagatggatggcgtcatcttgagtggagtgataaggccatacacatccttgctcacaaccaaacaaaatggtggtttgctaagcgttttctgcatcctgatgtcatggctatctatgatttcatttttctatgggatgaagaccttggagtggagaacttcaaccctagaagatatcttgatataatggtgtccgaaggcttggaaataacacaacctgctctggaccctgatctatcaactgatatccaccatcgaatcacaatccgtaataagatggcaaaagttcacaggagaatatacgacaatcggcctagtatgaattgttctgacgagagcaaaggacctccatgtacagggtgggtagagggcatggcaccagttttttctcgcactgcttggaaatgtgtatggcatctaattcagaatgatcttattcatggatggggtcttgacatgaagcttggatattgcgctcagggtgatcgaacagagaaagttggtgttattgacagtgagtatgtagttcatcaagggataccatcattaggagggccatcacttagcagcaagacacctcgaagatcattggatttgaggacccacatacgaagacaatcatcggctgagctggagaagttcaaggagaggtggaacagggctgtaagggaagatgaaggatggagggatccttttgattcttgattacttggaaagcagagtgtgacacttctgataacaaaactggccagtggccacagtcacagcagtagagtttggaagcggagagcatcttctgcttcatgtcaaaaacacttgtttggttataggatgacgagacggttggttggttataggatgatgacttacatacacacacacacatcataactttatccacatgagttaaaagcgggaacattatcgtcaatacaaggagctgatggagaagttgaaactaacaaagtaacagggggtttccgaaagtgctgtaattttccgttggaaatatctgttcgggagagttgtatagtgtcatgatatacacacttgtgcagttatttgatgaggaaacttacatagcctagagcagatgtgtttcctatattattattgccttgtacaatgtaagatgaattccatgagtcagaaatagcatcaggtctctatgcttatacttggacaagttaagaggatggcacggcatattttttgtgtcaccgcaccgaggttgtcgctctctttatgtgtatcaaaaatataaaagctcttgtttatgtacatgaacgatgttttgggtgtc

SEQ ID NO: 130944 - DNA, 1981 bp, Zea Mays
acggaccgaccggcgaccgcacccaatgcaagcaatttttgcggacagggggaccttcctcttcttcttcctcgtccccggcccctgcccctctcccctgcggagacggagcgccaccttcctcaccttctagaaagaactagaaccctccctccagaaccttgaagaccagcccagaccagaccagccccgaagctctccgccggccccgcccttgacgacatgaagcaccagccgccgcgccgctggggcgtcgtggcggcggtcgtcgcactcgtcctcctcgcctgcctccagatccagtaccaccacctcaaggtggatctcggcaaggccggctttgcctctgccacgcaagagaataacgcgatccgcagccgcaatcgcattcgctggggccccgacaggaacggcgcccactccttgccgcgcgggattgtccaccgccactccgacatgtccctccgcccgctctgggaggacgacactgcttccacccacaagatggatggcgtcatcttgagtggagtgataaggccatacacatccttgctcacaaccaaacaaaatggtggtttgctaagcgttttctgcatcctgatgtcatggctatctatgatttcatttttctatgggatgaagaccttggagtggagaacttcaaccctagaagatatcttgatataatggtgtccgaaggcttggaaataacacaacctgctctggaccctgatctatcaactgatatccaccatcgaatcacaatccgtaataagatggcaaaagttcacaggagaatatacgacaatcggcctagtatgaattgttctgacgagagcaaaggacctccatgtacaggaatgatcttattcatggatggggtcttgacatgaagcttggatattgcgctcagggtgatcgaacagagaaagttggtgttattgacagtgagtatgtagttcatcaagggataccatcattaggagggccatcacttagcagcaaggtgcttgacatctcagcaacaaactatttttttagaaacttggagtccggtaggaccaaggatgaagtgtactgattcatccaaactttgtttgaaaaaaaaactaccagagcatcgattttccttgtgtgcttttcttttaccctagttggcatatacctgcatgatagtaatgttaggtgtcatgaattcatgatcgttcaataaaatttgcatgtgccgctactgacatcttgttgacgcagacacctcgaagatcattggatttgaggacccacatacgaagacaatcatcggctgagctggagaagttcaaggagaggtggaacagggctgtaagggaagatgaaggatggagggatccttttgattcttgattacttggaaagcagagtgtgacacttctgataacaaaactggccagtggccacagtcacagcagtagagtttggaagcggagagcatcttctgcttcatgtcaaaaacacttgtttggttataggatgacgagacggttggttggttataggatgatgacttacatacacacacacacatcataactttatccacatgagttaaaagcgggaacattatcgtcaatacaaggagctgatggagaagttgaaactaacaaagtaacagggggtttccgaaagtgctgtaattttccgttggaaatatctgttcgggagagttgtatagtgtcatgatatacacacttgtgcagttatttgatgaggaaacttacatagcctagagcagatgtgtttcctatattattattgccttgtacaatgtaagatgaattccatgagtcagaaatagcatcaggtctctatgcttatacttggacaagttaagaggatggcacggcatattttttgtgtcaccgcaccgaggttgtcgctctctttatgtgtatcaaaaatataaaagctcttgtttatgtacatgaacgatgttttgggtgtc

SEQ ID NO: 130945 - DNA, 1803 bp, Zea Mays
acggaccgaccggcgaccgcacccaatgcaagcaatttttgcggacagggggaccttcctcttcttcttcctcgtccccggcccctgcccctctcccctgcggagacggagcgccaccttcctcaccttctagaaagaactagaaccctccctccagaaccttgaagaccagcccagaccagaccagccccgaagctctccgccggccccgcccttgacgacatgaagcaccagccgccgcgccgctggggcgtcgtggcggcggtcgtcgcactcgtcctcctcgcctgcctccagatccagtaccaccacctcaaggtggatctcggcaaggccggctttgcctctgccacgcaagagaataacgcgatccgcagccgcaatcgcattcgctggggccccgacaggaacggcgcccactccttgccgcgcgggattgtccaccgccactccgacatgtccctccgcccgctctgggaggacgacactgcttccacccacaagatggatggcgtcatcttgagtggagtgataaggccatacacatccttgctcacaaccaaacaaaatggtggtttgctaagcgttttctgcatcctgatgtcatggctatctatgatttcatttttctatgggatgaagaccttggagtggagaacttcaaccctagaagatatcttgatataatggtgtccgaaggcttggaaataacacaacctgctctggaccctgatctatcaactgatatccaccatcgaatcacaatccgtaataagatggcaaaagttcacaggagaatatacgacaatcggcctagtatgaattgttctgacgagagcaaaggacctccatgtacagggtgggtagagggcatggcaccagttttttctcgcactgcttggaaatgtgtatggcatctaattcagaatgatcttattcatggatggggtcttgacatgaagcttggatattgcgctcagggtgatcgaacagagaaagttggtgttattgacagtgagtatgtagttcatcaagggataccatcattaggagggccatcacttagcagcaagacacctcgaagatcattggatttgaggacccacatacgaagacaatcatcggctgagctggagaagttcaaggagaggtggaacagggctgtaagggaagatgaaggatggagggatccttttgattcttgattacttggaaagcagagtgtgacacttctgataacaaaactggccagtggccacagtcacagcagtagagtttggaagcggagagcatcttctgcttcatgtcaaaaacacttgtttggttataggatgacgagacggttggttggttataggatgatgacttacatacacacacacacatcataactttatccacatgagttaaaagcgggaacattatcgtcaatacaaggagctgatggagaagttgaaactaacaaagtaacagggggtttccgaaagtgctgtaattttccgttggaaatatctgttcgggagagttgtatagtgtcatgatatacacacttgtgcagttatttgatgaggaaacttacatagcctagagcagatgtgtttcctatattattattgccttgtacaatgtaagatgaattccatgagtcagaaatagcatcaggtctctatgcttatacttggacaagttaagaggatggcacggcatattttttgtgtcaccgcaccgaggttgtcgctctctttatgtgtatcaaaaatataaaagctcttgtttatgtacatgaacgatgttttgggtgtc

SEQ ID NO: 130946 - DNA, 1939 bp, Zea Mays
acggaccgaccggcgaccgcacccaatgcaagcaatttttgcggacagggggaccttcctcttcttcttcctcgtccccggcccctgcccctctcccctgcggagacggagcgccaccttcctcaccttctagaaagaactagaaccctccctccagaaccttgaagaccagcccagaccagaccagccccgaagctctccgccggccccgcccttgacgacatgaagcaccagccgccgcgccgctggggcgtcgtggcggcggtcgtcgcactcgtcctcctcgcctgcctccagatccagtaccaccacctcaaggtggatctcggcaaggccggctttgcctctgccacgcaagagaataacgcgatccgcagccgcaatcgcattcgctggggccccgacaggaacggcgcccactccttgccgcgcgggattgtccaccgccactccgacatgtccctccgcccgctctgggaggacgacactgcttccacccacaagaataaaaacagtgactacagtgctctcctcgccatggcagtcggcatctcccaaataaaaaacattgacactatggcccgtaagtttctgaaggaaaactatgcagtcatgctcttccattatgatggaaatgtagatggatggcgtcatcttgagtggagtgataaggccatacacatccttgctcacaaccaaacaaaatggtggtttgctaagcgttttctgcatcctgatgtcatggctatctatgatttcatttttctatgggatgaagaccttggagtggagaacttcaaccctagaagatatcttgatataatggtgtccgaaggcttggaaataacacaacctgctctggaccctgatctatcaactgatatccaccatcgaatcacaatccgtaataagatggcaaaagttcacaggagaatatacgacaatcggcctagtatgaattgttctgacgagagcaaaggacctccatgtacagggtgggtagagggcatggcaccagttttttctcgcactgcttggaaatgtgtatggcatctaattcagaatgatcttattcatggatggggtcttgacatgaagcttggatattgcgctcagggtgatcgaacagagaaagttggtgttattgacagtgagtatgtagttcatcaagggataccatcattaggagggccatcacttagcagcaagacacctcgaagatcattggatttgaggacccacatacgaagacaatcatcggctgagctggagaagttcaaggagaggtggaacagggctgtaagggaagatgaaggatggagggatccttttgattcttgattacttggaaagcagagtgtgacacttctgataacaaaactggccagtggccacagtcacagcagtagagtttggaagcggagagcatcttctgcttcatgtcaaaaacacttgtttggttataggatgacgagacggttggttggttataggatgatgacttacatacacacacacacatcataactttatccacatgagttaaaagcgggaacattatcgtcaatacaaggagctgatggagaagttgaaactaacaaagtaacagggggtttccgaaagtgctgtaattttccgttggaaatatctgttcgggagagttgtatagtgtcatgatatacacacttgtgcagttatttgatgaggaaacttacatagcctagagcagatgtgtttcctatattattattgccttgtacaatgtaagatgaattccatgagtcagaaatagcatcaggtctctatgcttatacttggacaagttaagaggatggcacggcatattttttgtgtcaccgcaccgaggttgtcgctctctttatgtgtatcaaaaatataaaagctcttgtttatgtacatgaacgatgttttgggtgtc

SEQ ID NO: 130947 - DNA, 2001 bp, Zea Mays
acggaccgaccggcgaccgcacccaatgcaagcaatttttgcggacagggggaccttcctcttcttcttcctcgtccccggcccctgcccctctcccctgcggagacggagcgccaccttcctcaccttctagaaagaactagaaccctccctccagaaccttgaagaccagcccagaccagaccagccccgaagctctccgccggccccgcccttgacgacatgaagcaccagccgccgcgccgctggggcgtcgtggcggcggtcgtcgcactcgtcctcctcgcctgcctccagatccagtaccaccacctcaaggtggatctcggcaaggccggctttgcctctgccacgcaagagaataacgcgatccgcagccgcaatcgcattcgctggggccccgacaggaacggcgcccactccttgccgcgcgggattgtccaccgccactccgacatgtccctccgcccgctctgggaggacgacactgcttccacccacaagaataaaaacagtgactacagtgctctcctcgccatggcagtcggcatctcccaaataaaaaacattgacactatggcccgtaagtttctgaaggaaaactatgcagtcatgctcttccattatgatggaaatgtagatggatggcgtcatcttgagtggagtgataaggccatacacatccttgctcacaaccaaacaaaatggtggtttgctaagcgttttctgcatcctgatgtcatggctatctatgatttcatttttctatgggatgaagaccttggagtggagaacttcaaccctagaagatatcttgatataatggtgtccgaaggcttggaaataacacaacctgctctggaccctgatctatcaactgatatccaccatcgaatcacaatccgtaataagatggcaaaagttcacaggagaatatacgacaatcggcctagtatgaattgttctgacgagagcaaaggacctccatgtacagggtgggtagagggcatggcaccagttttttctcgcactgcttggaaatgtgtatggcatctaattcagaatgatcttattcatggatggggtcttgacatgaagcttggatattgcgctcaggttctcaatatatgttaacagtcttaaaagatattttgataggatgtctgttgactattgagggtgatcgaacagagaaagttggtgttattgacagtgagtatgtagttcatcaagggataccatcattaggagggccatcacttagcagcaagacacctcgaagatcattggatttgaggacccacatacgaagacaatcatcggctgagctggagaagttcaaggagaggtggaacagggctgtaagggaagatgaaggatggagggatccttttgattcttgattacttggaaagcagagtgtgacacttctgataacaaaactggccagtggccacagtcacagcagtagagtttggaagcggagagcatcttctgcttcatgtcaaaaacacttgtttggttataggatgacgagacggttggttggttataggatgatgacttacatacacacacacacatcataactttatccacatgagttaaaagcgggaacattatcgtcaatacaaggagctgatggagaagttgaaactaacaaagtaacagggggtttccgaaagtgctgtaattttccgttggaaatatctgttcgggagagttgtatagtgtcatgatatacacacttgtgcagttatttgatgaggaaacttacatagcctagagcagatgtgtttcctatattattattgccttgtacaatgtaagatgaattccatgagtcagaaatagcatcaggtctctatgcttatacttggacaagttaagaggatggcacggcatattttttgtgtcaccgcaccgaggttgtcgctctctttatgtgtatcaaaaatataaaagctcttgtttatgtacatgaacgatgttttgggtgtc

SEQ ID NO: 130948 - DNA, 2327 bp, Zea Mays
aattgaaaacagggccttggtcgagttaaaaaaaacgcgagtgaaacacactgacaccgcacacacgccaaccggcctaccgccttcttctcttgtctcgtcctcctcgcgactatggccgccgccgccgaggtagaccccagccccaacccgccgccaactacagcctccggcctctccaagaccaagacgcgggaggccgaccgccgccgacgccgccgcagcaaggccaagaagaacaagtccgtcactgaggctgatgcccaggacgctgacgggggagcttccagctccgacgccaaggagaacgccgatcccaaccccgagccacaggttgaggtggagatagagtacgtgccggagaaggccgagcttgacgaccctctcctggatgatttcaaggccatcttcgagaagttcaccttcaaggacgctgctgcagcggcggccgaggatgataagaaagacgagggtgccgctgatgccacaaagaaggggtcactggatgatgatgacgacgacgaagatgatgagcaggaggcaaacaagaagaaggacggaggcctatccaataagaagaagaagctggaacgcaggatgaagattgcagacctcaaacagatatgcaacagacctgacgtcgtggaggtctgggatgcaactgctgcagatccaaaattgcttgtatatctcaaggcgtaccgaaatacagtacctgtccctaggcactggtctcagaagcgcaagttcttgcaggggaagagaggtattgagaaacagcctttccagcttcctgacttcattgctgcaactggaatagaaaagataagacaggcttatattgagaaagaggatagcaagaagttgaaacagaaacagcgtgagcgtatgcagcccaagatgggcaaaatggatatagattatcaggttttgcatgacgcgttcttcaaatatcagacaaaacccaagctgtctagtcatggtgatctgtattatgaaggcaaagaatttgaggttaaactgagggaaatgaagccaggcatgctgtctcgtgagcttaaagatgctcttggtatgcctgatggcgcccctcccccatggcttataaacatgcagcgctatggtccacctccatcttatccccaactgaagatcccaggtctaaatgccccaatcccccctggtgccagttttggttatagaccaggggagtggggaaagccaccagttgatgagcatggacgtccactctatggagacgtttttggtgttctgcagcaggacgaacctaactacgatgatgaacctgttgatcgcagcaaacactggggagatttggaggaagaggaggaggaagaagaggaagaggaggaagaggaagaaccaatggaagacgaggaaatggaagacggaattcagtctgtcgataccatctcaagtactccaactggtgttgaaacacctgatgttatcgaccttcggaagctgcagaggaaggagactgacaagcaggcagaacggccgctgtaccaggttcttgaacaaaaggaagaaaggatcgcccctgggactctatatgggtcaagccatacgtatgtgttgggaacacaagataaatcatcagctccgaaaagggtggatctgcttaagaatcaaaagtcagacaaggtggacgtcaccatccaacccgaggaactggaagccatggatgatgttctggcagccaagtatgaagaagctcgagaggaagagaagcttcggaaccaaaaggaggacttcagtgacatggtggcagagaatgctcacaagaggaagaggaagcaagagaaggaaggcaagtcgaagaagaaggaattcaagttttaagggcaggcgggcgatgtaggtcatgaggcaccgttgtagctgttccaaatatgactggctgtatggtttagttgctgcgatcagacagttccgttccgtgttccaagttccaaccgagaggtcgggctcattcgcttggttaacacaaatgtcgctttggattttcactggaatatgcttaattactctgtaagaaatcgttgcgctgttgaaatatcacgtgctggaaaggcggtctttgctatggggggggggggggggtgctttgacctgccgaaggggttatgcggcgcgatgatctatttcggtggagccaacaagacaattgattatggctagtgtgggaacattttcccgtgtttttcttagaaaaaatgaactaatttcttttgagcaaatgaaaaccccttaaaaaaaatagggttttcaaaatagctctggtcagaagagaaaaaaataca

SEQ ID NO: 130949 - DNA, 2112 bp, Zea Mays
ccggcctaccgccttcttctcttgtctcgtcctcctcgcgactatggccgccgccgccgaggtagaccccagccccaacccgccgccaactacagcctccggcctctccaagaccaagacgcgggaggccgaccgccgccgacgccgccgcagcaaggccaagaagaacaagtccgtcactgaggctgatgcccaggacgctgacgggggagcttccagctccgacgccaaggagaacgccgatcccaaccccgagccacaggttgaggtggagatagagtacgtgccggagaaggccgagcttgacgaccctctcctggatgatttcaaggccatcttcgagaagttcaccttcaaggacgctgctgcagcggcggccgaggatgataagaaagacgagggtgccgctgatgccacaaagaaggggtcactggatgatgatgacgacgacgaagatgatgagcaggaggcaaacaagaagaaggacggaggcctatccaataagaagaagaagctggaacgcaggatgaagattgcagacctcaaacagatatgcaacagacctgacgtcgtggaggtctgggatgcaactgctgcagatccaaaattgcttgtatatctcaaggcgtaccgaaatacagtacctgtccctaggcactggtctcagaagcgcaagttcttgcaggggaagagaggtattgagaaacagcctttccagcttcctgacttcattgctgcaactggaatagaaaagataagacaggcttatattgagaaagaggatagcaagaagttgaaacagaaacagcgtgagcgtatgcagcccaagatgggcaaaatggatatagattatcaggttttgcatgacgcgttcttcaaatatcagacaaaacccaagctgtctagtcatggtgatctgtattatgaaggcaaagaatttgaggttaaactgagggaaatgaagccaggcatgctgtctcgtgagcttaaagatgctcttggtatgcctgatggcgcccctcccccatggcttataaacatgcagcgctatggtccacctccatcttatccccaactgaagatcccaggtctaaatgccccaatcccccctggtgccagttttggttatagaccaggggagtggggaaagccaccagttgatgagcatggacgtccactctatggagacgtttttggtgttctgcagcaggacgaacctaactacgatgatgaacctgttgatcgcagcaaacactggggagatttggaggaagaggaggaggaagaagaggaagaggaggaagaggaagaaccaatggaagacgaggaaatggaagacggaattcagtctgtcgataccatctcaagtactccaactggtgttgaaacacctgatgttatcgaccttcggaagctgcagaggaaggagactgacaagcaggcagaacggccgctgtaccaggttcttgaacaaaaggaagaaaggatcgcccctgggactctatatgggtcaagccatacgtatgtgttgggaacacaagataaatcatcagctccgaaaagggtggatctgcttaagaatcaaaagtcagacaaggtggacgtcaccatccaacccgaggaactggaagccatggatgatgttctggcagccaagtaacgactgatgtctttgttcagttgagatataagtgtttttttttgttcttccgaagtcagacctgttctcttccgataatgcaacaggtatgaagaagctcgagaggaagagaagcttcggaaccaaaaggaggacttcagtgacatggtggcagagaatgctcacaagaggaagaggaagcaagagaaggaaggcaagtcgaagaagaaggaattcaagttttaagggcaggcgggcgatgtaggtcatgaggcaccgttgtagctgttccaaatatgactggctgtatggtttagttgctgcgatcagacagttccgttccgtgttccaagttccaaccgagaggtcgggctcattcgcttggttaacacaaatgtcgctttggattttcactggaatatgcttaattactctgtaagaaatcgttgcgctgttgaaatatcacgtgctgg

SEQ ID NO: 130950 - DNA, 861 bp, Zea Mays
caatctgctttcatcaagaaaagatttattcaaggtaactttatgctggttcaacatactgctcgttttctgtagcagcaaaaacagccccgtatcatgctcaaattggacatttctaagctgtttgatagcgcttcctggactttttttattgaagttctccataggctgggttttggacagatttggtgcaacgttgtttgtggttcgttgtcctcgtcttcaactcagatcatgcttagtggatgtccgggagaagtcatatatcatcggaggggtctgcggcaagggggcccgttgtcacctatgctctttgtcttggttatggatgtccttaacactatggtgcagcgtgcctcggatgaagggattctccagcctctctcctctagattcctccatcaccggatctctttatacgctgatgatgcggtagtcttccttcgaccgaatgtggttgacatcggggcatttaaggggattctgcatctttttggtgaagcctctggtctgaagaccaacattcagaaaagtaacgtcttcccaattcggtgtggtgaggaagatctggctattgtgcaggcttctttaccttgccagctatctaatttcccatgcaaatatcttgggcttccgttatccctgaagcgtctttctaggccgcaattacaatctatcattgatcgtattgcggtcatgttttcgggatggaaggcggagcttatgtccaaggcagggcgagcagtttatatccagtcggttatgacatctagatttgtgtatttggctatggccttggacctccctgcttgggcaatcaaggctattgacagaagagctttcctctggaaaggtaagaga

SEQ ID NO: 130951 - DNA, 1476 bp, Zea Mays
tctcctccgaaacataaggttcctggagatgttcttttagttcaaaggggaaagtgcaaattcacaaagaaagcaaagtttgctgaagctgctggtgcttctgctatagtaatcataaaccatgtccacgaattgtacaagatggtctgcgaaaagaatgaaaccgaccttgacataaatatacctgcagttctcctaccaaaagatgcaggttctgctttacatacacttcttacaaatggtaacacagtttctgtgcagctttactctccagatcgacctgtagttgacactgcagaggtgtttctatggcttatggctgttggcacagtacttggtgcttcctactggtcagcatggagtgctagagaagcagttattgaacaagagaagctcctcaagggtctacaaacatgcttggtggctctgttatcaagatggtttaaacctgctgcagaatcttttgtgaaagtaccgttccttggagccgtttcgcatcttactctggcagtttgcccattttgcgttgcatttgctgttgtgtgggctgtttttcgccagctcccctttgcttggattgggcaagacattctgggtattgcattgatagttacagtcatccaaattgtgagagtacctaacctcaaggtgggttcggttcttctcggctgtgccttcctgtatgatatcttctgggtgtttatctccaagagatggtttcatgagagcgtgatgattgtggttgcgcgtggcgacaagaccgacgaggatggtgtgcccatgctgctaaaaatcccgcgaatgtttgatccatggggtggatacagcatcattggctttggtgatatccttcttcctggtcttttagttgctttctcgctaagatacgatttttctgcaaagaagggcttacggtctggttactttttgtgggcaatggtggcctatggctctggacttctaatcacatatgttgcgctgaacctgatggatgggcatggacaacctgcccttttgtacatcgtgcccttcactcttggcaccttgatcgcgcttggatggaagagaggggagctgcagaacctgtgggcgaggggagagccagagagagtgtgcacgcatatgcatatgccgctgctgccgacgaccccaaactaaccacagggtcagtagaaaatcagcaagggttcctagcttctgcaaaatattgtatttgcctgctggtaatatgcaaaccaaatcatgccagtttaaaaggaggcactgcttcttggagacagcaaagtctgattgtgagctaactgctgcccaatgtgcagccatgcatgtatgtaacagcacaacaataaattgagcctgtcgaacagaaatgtatgagccgtgcatagcagcagcataaaaatactctccattcttttttaatttttttatttgtcgttttttgaaacaataggcgacaaatattcaagaacggag

SEQ ID NO: 130952 - DNA, 1659 bp, Zea Mays
tctcctccgaaacataaggttcctggagatgttcttttagttcaaaggggaaagtgcaaattcacaaagaaagcaaagtttgctgaagctgctggtgcttctgctatagtaatcataaaccatgtccacgaattgtacaagatggtctgcgaaaagaatgaaaccgaccttgacataaatatacctgcagttctcctaccaaaagatgcaggttctgctttacatacacttcttacaaatggtaacacagtttctgtgcagctttactctccagatcgacctgtagttgacactgcagaggtgtttctatggcttatggctgttggcacagtacttggtgcttcctactggtcagcatggagtgctagagaagcagttattgaacaagagaagctcctcaaggatggccatgaagacctactgaatgttgaggccagaggttctagtggcatggtagatatcaatgtggcatcagcgataatgtttgtggtggttgcgtcatgcttcttaataatgctttacaaactgatgtcttactggtttgtggagctactggtggtaatcttctgcattggcggtgtagagggtctacaaacatgcttggtggctctgttatcaagatggtttaaacctgctgcagaatcttttgtgaaagtaccgttccttggagccgtttcgcatcttactctggcagtttgcccattttgcgttgcatttgctgttgtgtgggctgtttttcgccagctcccctttgcttggattgggcaagacattctgggtattgcattgatagttacagtcatccaaattgtgagagtacctaacctcaaggtgggttcggttcttctcggctgtgccttcctgtatgatatcttctgggtgtttatctccaagagatggtttcatgagagcgtgatgattgtggttgcgcgtggcgacaagaccgacgaggatggtgtgcccatgctgctaaaaatcccgcgaatgtttgatccatggggtggatacagcatcattggctttggtgatatccttcttcctggtcttttagttgctttctcgctaagatacgatttttctgcaaagaagggcttacggtctggttactttttgtgggcaatggtggcctatggctctggacttctaatcacatatgttgcgctgaacctgatggatgggcatggacaacctgcccttttgtacatcgtgcccttcactcttggcaccttgatcgcgcttggatggaagagaggggagctgcagaacctgtgggcgaggggagagccagagagagtgtgcacgcatatgcatatgccgctgctgccgacgaccccaaactaaccacagggtcagtagaaaatcagcaagggttcctagcttctgcaaaatattgtatttgcctgctggtaatatgcaaaccaaatcatgccagtttaaaaggaggcactgcttcttggagacagcaaagtctgattgtgagctaactgctgcccaatgtgcagccatgcatgtatgtaacagcacaacaataaattgagcctgtcgaacagaaatgtatgagccgtgcatagcagcagcataaaaatactctccattcttttttaatttttttatttgtcgttttttgaaacaataggcgacaaatattcaagaacggag

SEQ ID NO: 130953 - DNA, 1482 bp, Zea Mays
tctcctccgaaacataaggttcctggagatgttcttttagttcaaaggggaaagtgcaaattcacaaagaaagcaaagtttgctgaagctgctggtgcttctgctatagtaatcataaaccatgtccacgaattgtacaagatggtctgcgaaaagaatgaaaccgaccttgacataaatatacctgcagttctcctaccaaaagatgcaggttctgctttacatacacttcttacaaatggtaacacagtttctgtgcagctttactctccagatcgacctgtagttgacactgcagaggtgtttctatggcttatggctgttggcacagtacttggtgcttcctactggtcagcatggagtgctagagaagcagttattgaacaagagaagctcctcaagggtctacaaacatgcttggtggctctgttatcaagatggtttaaacctgctgcagaatcttttgtgaaagtaccgttccttggagccgtttcgcatcttactctggcagtttgcccattttgcgttgcatttgctgttgtgtgggctgtttttcgccagctcccctttgcttggattgggcaagacattctgggtattgcattgatagttacagtcatccaaattgtgagagtacctaacctcaaggtgggttcggttcttctcggctgtgccttcctgtatgatatcttctgggtgtttatctccaagagatggtttcatgagagcgtgatgattgtggttgcgcgtggcgacaagaccgacgaggatggtgtgcccatgctgctaaaaatcccgcgaatgtttgatccatggggtggatacagcatcattggctttggtgatatccttcttcctggtcttttagttgctttctcgctaagatacgatttttctgcaaagaagggcttacggtctggttactttttgtgggcaatggtggcctatggctctggacttctaatcacatatgttgcgctgaacctgatggatgggcatggacaacctgcccttttgtacatcgtgcccttcactcttggtaatgatgtgtgttttgagactcgtctcgtccgtacactgcctgatgtgtgctttgttttgttggtacaggcaccttgatcgcgcttggatggaagagaggggagctgcagaacctgtgggcgaggggagagccagagagagtgtgcacgcatatgcatatgccgctgctgccgacgaccccaaactaaccacagggtcagtagaaaatcagcaagggttcctagcttctgcaaaatattgtatttgcctgctggtaatatgcaaaccaaatcatgccagtttaaaaggaggcactgcttcttggagacagcaaagtctgattgtgagctaactgctgcccaatgtgcagccatgcatgtatgtaacagcacaacaataaattgagcctgtcgaacagaaatgtatgagccgtgcatagcagcagcataaaaatactctcca

SEQ ID NO: 130954 - DNA, 451 bp, Zea Mays
tctcctccgaaacataaggttcctggagatgttcttttagttcaaaggggaaagtgcaaattcacaaagaaagcaaagtttgctgaagctgctggtgcttctgctatagtaatcataaaccatgtccacgaattgtacaagatggtctgcgaaaagaatgaaaccgaccttgacataaatatacctgcagttctcctaccaaaagatgcaggttctgctttacatacacttcttacaaatggtaacacaggtaaaatgttaacttaccgttgtcaccagcattttaatttccatttgaaacataaaggtgttaacacttaactgacccttcacctttatgtggacttgtcctttgttctatctgaaatagcttaccatgtactgacttatccttgtctcttccttagtttctgtgcagctttactctccagatcgacctgtagttgacact

SEQ ID NO: 130955 - DNA, 754 bp, Zea Mays
atggcaagccagcgatgcagggactgtgattctgccgtgcacacagaatattggagatgtgccttcaacactctactctcgattgtctccagatcaacaactcactgcagaaacaagatccacctcttgatatctgaaagaaacggagcgctcctgcaccacgactgcacagatctgagaagggagtactacgactggcttcattcgcgaatcgagtcgtcgtcctggtcgaggcgttcccaggaagtcagcggcgagatccgccatgagcatgtgcaccttggtgcggctcagatccaccgcgtgccgacgtttgagagggagataggactccacaacggcacggtgatggcgatggtgtttaagaaggagaagggagatatgactcctgcccgcgatagggggcggcagcagtggatccgcggggtagggggtataaaatgtatcgttctaggaccgacggagtagtcggtaaaaacaagagtcgagaaagactgagatgggagtgaacaagaggaatttgatatttcgccactttactttagcatccatttacattgtgttactgacaccacagtcatgacatagtaaaaatttgccaccacttctaaggttatgtttggggcagttctaactccagtaaatttggtggagttggtgaaacagattattaggtgctccagaaaataatgaaactggagctctaagcttttagaagacatttagacaagtcattttatttgttatttaaatt

SEQ ID NO: 130956 - DNA, 2189 bp, Zea Mays
attccaattcttgattccatcgccccaccatccaccactccccgaatccttccaacctcctcgtcgtccagtccaccacctccacgcgcaatggccagcggctaggcggcaccaaccagaaatcacaaggattcgtttcatccggcagcgcagctctagagcctccatgggcagctacgcgtacaagtactgcatgtgcttcacgcgcaagttccgatccccggacgcccagccgccgccggacgtccgcgccgcccacctctccttcgcctctgacgcccatgccctccgccgcttcgtcgccggcgtccagggcgagtcccccgccgacgtcgaccgcatcctcgccatgctctccgggggccacagccatggaatcgcccgcctcgtcacaaggtcgccggcggcatccacgcccacgctcgaagacttcttggccttcctcttctcccccgacctcaacccacccatcgcgcaccaggttcaccaggacatgtcagcgccgttctctcactatttcgtgttcaccgggcataattcctacctcactgggaaccagctcaatagtgactccagtgacgtcccaattgtaaaggcgttgcagggaggtgttagagtcattgaactcgatatgtggcccaatccttcaaaggacaatgtcgatattcttcatggagggacattgactgccccagtggaaatgatcaaatgtttgaagtccatcaaagaatacgccttctgtgcctcaaattatcctcttgttattactcttgaggatcacctcacaccagatctccaagctaaagttgctacgatgctcactgaaacatttggagatcttcttttcgtccctaatccagacccgatgaaagagtttccttctccagcatctctaatgaagagaataatcatatcaaccaaacctccacaagaatataaggagtttctcaaagctgagaataatcgcagtggcagcggaaacatagctgagttgccagaccaaggaagcctgagaagaatagattcaaatgccgatgaatctgatggaaaggatgaactggatgagcaagacgaggaagactccgactccgacgatcccaaatttcagcaggatacagcctgtgagtataggaaactcatcaccatccaagctggcaaaccaaaaggccatttgcgggatgcgctaaaagtggatccagataaagtcaggcggctttctttgagcgagacacagttagctaaagcgacaatctctcatggtgctgaagtcataaggttcacacagaagaatatactccgtgtgtatccaaagggcacgagggttaattcttcaaactacgatccaatgaacgcctggacccatggtgcgcagatggttgcattcaacatgcagggccatgataaagcgctccggttgatgcaagggtttttcagagccaatgggggctgtggttatgttaaaaagcctgacttcttgctaagaacaggcccaaatggggaagtatttgaccccaaggctagtttgccagtgaagaaaaccctcaaggtgaaagtatatatgggagacgggtggcgcatggacttcagtaaaactcatttcgatgccttttcgcctccagatttctatactagggtagggatcgcaggtgtgaaggcagacagtgtgatgaagaagacaagggtgattgaggaccagtgggtgccgatgtgggatgaggagttcacgttccttctgacggttccggagctggccctcctgagggtagaggtccaggagtacgacatgtcggagaagcacgacttcggggggcagacagtgttgccggtatgggagctgaagcagggcatccgtgctgtgcccctgcacgatcgcaagggtgtcaggtacaagtccgtcaggctcctcatgcgatttgattttgtgtagccgagccgagccgccattcagattcagcttcttctttttttcccttcttgtgtgaattgaatgtattactcccttccttccatcttcaacgtatatgtgtatgtatgtacttatttttgtcggaataaaagttgtatggaatggaatggaaggaaggagtagaactgtcttcaaactccagcttctagatctgtacgggtgattcagttttacttgctggcacattgtttgtctgtttactttactggagatagatttgtac

SEQ ID NO: 130957 - DNA, 251 bp, Zea Mays
atggtggatgtttatttttttatatctaatgtcatgtaagaggctgcaacattatgttttcattataaaaaaaataccagtgtcatgtttatatgtatttaatctctgcgcacggtaaccactcttctccactgcaatattttcttcttttgtttgtagcatggctcaattaatctttttgtcatctgttcatatggcataacatgtaaattaagttggacgattatttccacatggttttattttaatgt

SEQ ID NO: 130958 - DNA, 253 bp, Zea Mays
agaagagaaggattactgaggattcaaacatgtgccatcagtgccagatgaatgatagcggaagagttgtacggtgccaaggttgtgtcgtccaaaaaagaaaatatagatattgtgtgaagtgcattaaacgctggtatccacatttatcagaggatgattttgcgaacaattgcctagtttgtcaaaataattgcaattgtaaggcttgtctgcggggagacataacctgagccaactcgaggaacaaaaa

SEQ ID NO: 130959 - DNA, 223 bp, Zea Mays
catcaatccaatatctggtagctcctgttctataatggaccccccttgttttctctctaatgcaaagatacgcagccctcttgcgtatttaaaaaaactaagaaatgtgaccttgttcaaaggagttcgccaaaagaaatgtatgaaagaattcttgataaaacaccagacttagaaataaaaactgcaaggcgacaataagaagtggttgagcttgagcacg

SEQ ID NO: 130960 - DNA, 3301 bp, Zea Mays
caaacctcaaccgacactccccgtggggggcggtgccgtcgccggcgactcgccaattttgatttgaagaaaagaaaccaccagccaccacgcccgcggccgtcagccggaggtgaagcacgcaattcattacaaaagggtcccctgccaagatccaacactcatgaattgcaacaatacggatcggagacagcgagcagatctcgcggacttgcaattgtaactcatctaatcccttattactttcgtcgttgtcgtcgtcgtcgtcgtcgtcgtcgtcatcatcattttgtgcagcctgttttatcttcttgccgcagcccctgctgagctgtgagctgtatgcatggcatggccacccctgtggcgcctcttctccatgatgagcctcaagctgctggtatcttactcccagggacaacccagcattcagatcaaacaaactctgactctagagttggagagcttatactgcctaatggggatacttatcgtggcgcgttatcgggcaacacgccacatggcccaggttgttatatctggtccgatggttgtgtttatgagggtgattggaggagaggcctcaggcatggccgaggcaagacgctgtggccaacaggggccacctacacaggtgactactccggtggctacatttatggtcagggaacgtataccgccgggcttaacagttacaggggaggctggaagctgaatcttaagcatggccaccttggcctacagacatatcccaacggagacacttttcaaggttcttgggtgcatgggcaaatgcaggggcatggcacctatacctgggcaaatgggaacacttatgttggcgccatgaaagatggggtcatgtcaggcaaaggaattctcacatggaacaatggagattcatttgaagggaactggttagatggtgccatgcatggctatggaatctacacatggaaggactctggctactatgtaggaacctggacaaggggggtcaaggacggaaaaggcacgttctatccaaaatgccgtgggattccggttaccgacatcgacgatttaagaaacagaggtgtactgcctggtgctgaaagccagactcatggttcccgtatccttcactctgcctcatcggacatggcagacatggtggctagcagaaatcaggactctgtaggtatttcatctgttagaagcttgaattttgagaaaactcgctccactaatgtgctactggaaagaaggtggagccttggagtggctattgaaaaattcctcggtcgcgaaaccaatgaaagttctgcaattgaaagatgtgaaaacaaggctgattccaaccttcctatactggaacgggaatatatgcaaggtgttctcatcagcgaggtcgtggtggatgcaagcttctcgaatccattaaaaagggtatcacgccgccagaagaaaatagtgaaggacataaagaaacctgggcagacaataattaaaggacataggagttatgatctgatgctcagtctgcagcttggaatcaggtatacagttggaaagattacacctattcagagacgtgaagtgcgagcttctgattatggttccagagcaagtttctggatgaacttccccaaaaatggttcacgacttactccttcacatcatgctgataattttaaatggaaagactactgcccaatggtgttcagaaatttgagggagatgttcaagattgatgcagcggattatatggtttccatttgtggaagtgacgcacttagggagctatcttctcctggaaagagtggaagtgtcttctttctatctcaggatgatcgatttatgatcaagactctacggaagtctgaagtgcaggttcttctacgaatgcttccagagtattatcaccatgtccgtacctatgagaacacactcataactaagttttttggcctccacagggttaaaccgtccagcagtcaaaagttccggtttgtagtgatgggaaacatgttttgcactgaacttagaattcaccggaggtttgacttgaaaggttcatccttaggccgctcaacagacaaagtaaaaatcgacgagaacacaacactgaaagacttggatctaaactattcattttatctcgagccttcttggcggcagactttgcttgcgcaaattgagaccgatagcaaatttctaaagcagcacgcaataatggattatagtttgcttcttggcgttcatttccgggctcctcaaagcctacggacacaggcatcctttcatcaagcaatcctaccagataggctggctgttctttcagaagaaggtgctctggaggaggatgttttgaacagtcctgaaggactggttttggttcagcgagctagtgatcaaaatgatgttgtcattggttcccatataaggggggcccgtcttcgatcatcaagtgcaagttttgaggaagtagatctcttgcttccaggcaccgcaaggctccagatccaacttggggttaacatgccggccagggcaaaacagacggttgaggatgatgacagtgaagataatggtcaggtgtatgatgtggtgctgtacctgggaataattgatatcttgcaggagtacagcataaggaagaagattgagcatgcttacaagtgcatccaatataactcattgtcaatatctgtcgtggaacccagtctctactcggagcgcttcctgaaattcattcaaactatctttcctgaaaattcataaaataaaatccagtaattcttcacctacaggagcaaagtgaaagaaacattgttcagtgtgcattgtggccctttgcaagtatgcttttgctacgtccttgattgattctctttctttacacatgttgatcatggtaaggatttccggattacgtatcccagtggtgctatccactagtagtggataactgtaccttgccctattaatctgagttgatgacgattctaccgtctacttcaaattcacactgtctaaacaatgttttgcacattcacttattcataccagtaaattcagccttagggctggtttggttttgtgacaaagggagattgaaggagaaataaactaatttctccctcagtgtcatccaatccacctgtgatttctagtcaccaaaccagaccttagtgtaccttgaattccacgtccattgtagtattgtatgtgtaaaaatgtccattgtagtattgtatgtgtaaaaatgttttgcacaaaatgtattctctgtgggtaaatttagcttttagatttttgg

SEQ ID NO: 130961 - DNA, 1881 bp, Zea Mays
caaacctcaaccgacactccccgtggggggcggtgccgtcgccggcgactcgccaattttgatttgaagaaaagaaaccaccagccaccacgcccgcggccgtcagccggaggtgaaggtatacagttggaaagattacacctattcagagacgtgaagtgcgagcttctgattatggttccagagcaagtttctggatgaacttccccaaaaatggttcacgacttactccttcacatcatgctgataattttaaatggaaagactactgcccaatggtgttcagaaatttgagggagatgttcaagattgatgcagcggattatatggtttccatttgtggaagtgacgcacttagggagctatcttctcctggaaagagtggaagtgtcttctttctatctcaggatgatcgatttatgatcaagactctacggaagtctgaagtgcaggttcttctacgaatgcttccagagtattatcaccatgtccgtacctatgagaacacactcataactaagttttttggcctccacagggttaaaccgtccagcagtcaaaagttccggtttgtagtgatgggaaacatgttttgcactgaacttagaattcaccggaggtttgacttgaaaggttcatccttaggccgctcaacagacaaagtaaaaatcgacgagaacacaacactgaaagacttggatctaaactattcattttatctcgagccttcttggcggcagactttgcttgcgcaaattgagaccgatagcaaatttctaaagcagcacgcaataatggattatagtttgcttcttggcgttcatttccgggctcctcaaagcctacggacacaggcatcctttcatcaagcaatcctaccagataggctggctgttctttcagaagaaggtgctctggaggaggatgttttgaacagtcctgaaggactggttttggttcagcgagctagtgatcaaaatgatgttgtcattggttcccatataaggggggcccgtcttcgatcatcaagtgcaagttttgaggaagtagatctcttgcttccaggcaccgcaaggctccagatccaacttggggttaacatgccggccagggcaaaacagacggttgaggatgatgacagtgaagataatggtcaggtgtatgatgtggtgctgtacctgggaataattgatatcttgcaggagtacagcataaggaagaagattgagcatgcttacaagtgcatccaatataactcattgtcaatatctgtcgtggaacccagtctctactcggagcgcttcctgaaattcattcaaactatctttcctgaaaattcataaaataaaatccagtaattcttcacctacaggagcaaagtgaaagaaacattgttcagtgtgcattgtggccctttgcaagtatgcttttgctacgtccttgattgattctctttctttacacatgttgatcatggtaaggatttccggattacgtatcccagtggtgctatccactagtagtggataactgtaccttgccctattaatctgagttgatgacgattctaccgtctacttcaaattcacactgtctaaacaatgttttgcacattcacttattcataccagtaaattcagccttagggctggtttggttttgtgacaaagggagattgaaggagaaataaactaatttctccctcagtgtcatccaatccacctgtgatttctagtcaccaaaccagaccttagtgtaccttgaattccacgtccattgtagtattgtatgtgtaaaaatgtccattgtagtattgtatgtgtaaaaatgttttgcacaaaatgtattctctgtgggtaaatttagcttttagatttttgg

SEQ ID NO: 130962 - DNA, 704 bp, Zea Mays
tctgctcctcttaatgtgtcttttccgtaggtctttagtgggccaaaacttgattgtgtggtataaccttgtttagcgtcttgtgtatgttcaattaagtactgataaggattgtttcgggtggaacctaacttcatctagacagtttaccgttcactcgatgtataggactctaattaacaacagttatgttttccagcacaaagttctttggaatctaaaattacccttaaagataaagatttttgtgtggtacttaatgttgtgctcactaaaaataacttagcaagacggaattggcagtgaaataaaatatgtgtgttttgtgatagagatgaaaagatacaacatttattgttgttttggcttgagactcgtctattgttgttttggcttgagaccaccacgttcattgcgtcatgtatttgggaattggctaatgggggtggattcaaaaactaaatagcttattattataggtgtttcggttttgtgttgggctatctggataagtaggaatgatttagtttttttatcacgctccaatgctaactcgtttacaggtacttattggcttaggttatgggccaagctgcggaaaagtgaagaggaagaagaccaaataaagaacgcttgtcgacaattagagacgatggcaatgaagatttttttatctccgtggatggaggtttacaaataggatt

SEQ ID NO: 130963 - DNA, 1800 bp, Zea Mays
tgcacacctcccgccgcgccgaccacgcgcctttccccttttcctctcccccagatccacccgccgcgccacccctctcggctcctcccaggcggcgtcggccctttcctcgccctcctccgtttctctccggcgtatatatgggttcgaaatcggtagatgaggtgctcgatgccgccgccggagtccattgctctgctctccgtctggacggtcccaacgtccagttttccgcctcctccgaggaagaaccaacgacgtctggcctggagaatggccatcaggagccctttgttattggcgttgctgggggtgcatcgtcaggcaaaagtaccgtgtgcaagatgatcattgatcagctccgtgaccagcgcgttgtggctgttacacaggagtccttttattatggattgacggatgaagaattagtccatgttcatgattataattttgatcatccagatgcatttcatacagagctacttctctcttgtatgcaaaacttgaaacatggcaaagctgtcgacatccctaattacaacttcaagacatacaagagtgtaccaaatgcaaggaagattttttttgtgaaaaactacaatttatggttaatccttcagatgttattattttggaaggaattctagtttttcatgattcacgcctcagggatttgatgaacatgaagatcttcgttgatacagatgccgacgtacggttaacaaggaggatccgtcgtgataccattgacaagggtagagatatcaaagctgtgttagatcagtactcaaaatttgttaagcctgcttttgaagacttcatcctcccaacgaagaagtatgctgatattatcatcccacgaggtggagacaatgatgtggcaattgatctaattgttcaacatattcggactaaacttggacagcatgatctttgcaaaatacaccccaatttgtatgtaattcagactacttatcagatacgaggcatgcacacaataataagggatgctgccacagcaacacatgatttcatattttatgctgatcggttgattcgactggttgtggaacatggtcttggtcatcttccttttcaggaaaagcaggtcatcactccgactggatctgtttacactggtgtggagttctccaaaaggttgtgtggtgtctcagtgatcaggagtggcgaaagcatggagaatgcgttacgagcatgctgtaaaggtataaagattgggaagattcttattcatcgggaaggagacaatggacaacagctcatctatcaaaatttaccaaaagatattgcaaataggcatgttcttctgttggaccccatattgggaacaggaaattcagcagttcaggccatctcccttctattgaagaagggtgtacaagaagcaaatattatattccttaatcttatttcagcgccccaaggagtgcatgtggtgagcaagagattccctagagtgaagatcgttacttcggagattgagtttggtctaaatgatgatttccgtgttgtgcctgggatgggcgaatttggagacagatactttggaacagatgattatcagtcatcgacgccattcttttgtgacgataaaaatcgtgtcaggctcttgtgacatgaagccatggctgcggcgtattctccaatttttgagaaacttatatcagcattccaaactctagaatgccatcataatgttttcattaccagacactgtaccatggaacatccagacagaaatcacctcttaatataattggatttgttccatttttattt

SEQ ID NO: 130964 - DNA, 1765 bp, Zea Mays
tgcacacctcccgccgcgccgaccacgcgcctttccccttttcctctcccccagatccacccgccgcgccacccctctcggctcctcccaggcggcgtcggccctttcctcgccctcctccgtttctctccggcgtatatatgggttcgaaatcggtagatgaggtgctcgatgccgccgccggagtccattgctctgctctccgtctggacggtcccaacgtccagttttccgcctcctccgaggaagaaccaacgacgtctggcctggagaatggccatcaggagccctttgttattggcgttgctgggggtgcatcgtcaggcaaaagtaccgtgtgcaagatgatcattgatcagctccgtgaccagcgcgttgtggctgttacacaggagtccttttattatggattgacggatgaagaattagtccatgttcatgattataattttgatcatccagatgcatttcatacagagctacttctctcttgtatgcaaaacttgaaacatggcaaagctgtcgacatccctaattacaacttcaagacatacaagagtgtaccaaatgcaaggaagattttttttgtgaaaaactacaatttatggttaatccttcagatgttattattttggaaggaattctagtttttcatgattcacgcctcagggatttgatgaacatgaagatcttcgttgatacagatgccgacgtacggttaacaaggaggatccgtcgtgataccattgacaagggtagagatatcaaagctgtgttagatcagtactcaaaatttgttaagcctgcttttgaagacttcatcctcccaacgaagaagtatgctgatattatcatcccacgaggtggagacaatgatgtggcaattgatctaattgttcaacatattcggactaaacttggacagcatgatctttgcaaaatacaccccaatttgtatgtaattcagactacttatcagatacgaggcatgcacacaataataagggatgctgccacagcaacacatgatttcatattttatgctgatcggttgattcgactggttgtggaacatggtcttggtcatcttccttttcaggaaaagcaggtcatcactccgactggatctgtttacactggtgtggagttctccaaaaggttgtgtggtgtctcagtgatcaggagtggcgaaagcatggagaatgcgttacgagcatgctgtaaaggtataaagattgggaagattcttattcatcgggaaggagacaatggacaacagctcatctatcaaaatttaccaaaagatattgcaaataggaaattcagcagttcaggccatctcccttctattgaagaagggtgtacaagaagcaaatattatattccttaatcttatttcagcgccccaaggagtgcatgtggtgagcaagagattccctagagtgaagatcgttacttcggagattgagtttggtctaaatgatgatttccgtgttgtgcctgggatgggcgaatttggagacagatactttggaacagatgattatcagtcatcgacgccattcttttgtgacgataaaaatcgtgtcaggctcttgtgacatgaagccatggctgcggcgtattctccaatttttgagaaacttatatcagcattccaaactctagaatgccatcataatgttttcattaccagacactgtaccatggaacatccagacagaaatcacctcttaatataattggatttgttccatttttattt

SEQ ID NO: 130965 - DNA, 1806 bp, Zea Mays
acatacatgtattcttgtaggctccctctcatctctgcacacctcccgccgcgccgaccacgcgcctttccccttttcctctcccccagatccacccgccgcgccacccctctcggctcctcccaggcggcgtcggccctttcctcgccctcctccgtttctctccggcgtatatatgggttcgaaatcggtagatgaggtgctcgatgccgccgccggagtccattgctctgctctccgtctggacggtcccaacgtccagttttccgcctcctccgaggaagaaccaacgacgtctggcctggagaatggccatcaggagccctttgttattggcgttgctgggggtgcatcgtcaggcaaaagtaccgtgtgcaagatgatcattgatcagctccgtgaccagcgcgttgtggctgttacacaggagtccttttattatggattgacggatgaagaattagtccatgttcatgattataattttgatcatccagatgcatttcatacagagctacttctctcttgtatgcaaaacttgaaacatggcaaagctgtcgacatccctaattacaacttcaagacatacaagagtgtaccaaatgcaaggaaggttaatccttcagatgttattattttggaaggaattctagtttttcatgattcacgcctcagggatttgatgaacatgaagatcttcgttgatacagatgccgacgtacggttaacaaggaggatccgtcgtgataccattgacaagggtagagatatcaaagctgtgttagatcagtactcaaaatttgttaagcctgcttttgaagacttcatcctcccaacgaagaagtatgctgatattatcatcccacgaggtggagacaatgatgtggcaattgatctaattgttcaacatattcggactaaacttggacagcatgatctttgcaaaatacaccccaatttgtatgtaattcagactacttatcagatacgaggcatgcacacaataataagggatgctgccacagcaacacatgatttcatattttatgctgatcggttgattcgactggttgtggaacatggtcttggtcatcttccttttcaggaaaagcaggtcatcactccgactggatctgtttacactggtgtggagttctccaaaaggttgtgtggtgtctcagtgatcaggagtggcgaaagcatggagaatgcgttacgagcatgctgtaaaggtataaagattgggaagattcttattcatcgggaaggagacaatggacaacagctcatctatcaaaatttaccaaaagatattgcaaataggcatgttcttctgttggaccccatattgggaacaggaaattcagcagttcaggccatctcccttctattgaagaagggtgtacaagaagcaaatattatattccttaatcttatttcagcgccccaaggagtgcatgtggtgagcaagagattccctagagtgaagatcgttacttcggagattgagtttggtctaaatgatgatttccgtgttgtgcctgggatgggcgaatttggagacagatactttggaacagatgattatcagtcatcgacgccattcttttgtgacgataaaaatcgtgtcaggctcttgtgacatgaagccatggctgcggcgtattctccaatttttgagaaacttatatcagcattccaaactctagaatgccatcataatgttttcattaccagacactgtaccatggaacatccagacagaaatcacctcttaatataattggatttgttccatttttattt

SEQ ID NO: 130966 - DNA, 1623 bp, Zea Mays
gggtgagaggaaatgggatcaacaagaacgtctcatccatctttcccggtcctcctgctcttcctcctcgctaccgccgcgcatctcgccgtccaccacaaccagaccgatctcgctcttgccaaggccgacgccaccgaggaaaccgacctagcccagaggtacgacgtccagggcttccccactatcatcctcttcatcgacggcgtccccaaggactacaacggcgcgaggaccaaggacgccatcgtcgactggatcaacaagaagctcggcccggccgtgcaagatgtcaccagcgtccacgaggccgagaggatactcaccggggatgacaaagccgtcattgccttcctcgacactctaaccggtgctcacagtgacgagcttgctgctgcttcaaggctggaagatagcatcaacttttatcaaacttcgattcctgatgttgctaagcttttccatatcgacccagcagcaaagcgtccatccatagtattactgaagaaagaggaggagaagttgaccttctatgatggaaagtttaaagcatcagccattgctgattttgtgtctgctaacaagcttcctttggttaccacactaactcaagaaacttccccttctatttttggcaatgcaatcaagaagcagattttactatttgctgttgcaagtgaatcctcaaaatttctgtccatctttaaggaagcagcaaagccatttaagggaaagctattatttgtctttgtggagcgagacaatgatgaagttggtgaaccagttgccaactactttggtcttactggacaagagaccacagttcttgcttacactggtaatgaagatgctaggaaatttttccttgatggcgaggtgtcacttgaagccattaaggacttcgctgaaggtttcttggaagacaaacttacaccattctacaagtctgaaccagtacctgaatctaatgatggggatgtcaaaattgttgttggaaagagtctggatgtaatagttttggatgaatcaaaagatgtacttctggagatatatgcaccgtggtgtgggcattgtcaatcactggagcctacttacaacaaactagccaagcatctaagtggagttgactcccttgtgatagccaaaatggatggtactaccaatgagcatccacgtgcaaagtctgacggatacccaacaattctcttctatccagctgggaagaaaagctttgagcctgtcacgtttgagggggagcggacagtggtagatatgtacaggttcatcaagaaacatgctagcatccctttcaagttgaagcgccaggagtcaagaagggagagcatccagacggatggtgtcaaggacgaactgtagggcaggtcatgcattgatagatagctgagttttgaattttggttttataaaattaggtccgccaccgaatttcgcgttttcagcttaaacatcacctaaatctgtttctttatattatactatattaaagcaccagtttcaaccgtagtccagcgtcaatatttttcaaaagacctcctacatttttttagaatcaactctcactcctataatttcttttctactactataataggagagttatgt

SEQ ID NO: 130967 - DNA, 1566 bp, Zea Mays
gggtgagaggaaatgggatcaacaagaacgtctcatccatctttcccggtcctcctgctcttcctcctcgctaccgccgcgcatctcgccgtccaccacaaccagaccgatctcgctcttgccaaggccgacgccaccgaggaaaccgacctagcccagaggtacgacgtccagggcttccccactatcatcctcttcatcgacggcgtccccaaggactacaacggcgcgaggaccaaggacgccatcgtcgactggatcaacaagaagctcggcccggccgtgcaagatgtcaccagcgtccacgaggccgagaggatactcaccggggatgacaaagccgtcattgccttcctcgacactctaaccggtgctcacagtgacgagcttgctgctgcttcaaggctggaagatagcatcaacttttatcaaacttcgattcctgatgttgctaagcttttccatatcgacccagcagcaaagcgtccatccatagtattactgaagaaagaggaggagaagttgaccttctatgatggaaagtttaaagcatcagccattgctgattttgtgtctgctaacaagcttcctttggttaccacactaactcaagaaacttccccttctatttttggcaatgcaatcaagaagcagattttactatttgctgttgcaagtgaatcctcaaaatttctgtccatctttaaggaagcagcaaagccatttaagggaaagctattatttgtctttgtggagcgagacaatgatgaagttggtgaaccagttgccaactactttggtcttactggacaagagaccacagttcttgcttacactggtaatgaagatgctaggaaatttttccttgatggcgaggtgtcacttgaagccattaaggacttcgctgaaggtttcttggaagacaaacttacaccattctacaagtctgaaccagtacctgaatctaatgatggggatgtcaaaattgttgttggaaagagtctggatgtaatagttttggatgaatcaaaagatgtacttctggagatatatgcaccgtggtgtgggcattgtcaatcactggagcctacttacaacaaactagccaagcatctaagtggagttgactcccttgtgatagccaaaatggatggtactaccaatgagcatccacgtgcaaaggtcacgtttgagggggagcggacagtggtagatatgtacaggttcatcaagaaacatgctagcatccctttcaagttgaagcgccaggagtcaagaagggagagcatccagacggatggtgtcaaggacgaactgtagggcaggtcatgcattgatagatagctgagttttgaattttggttttataaaattaggtccgccaccgaatttcgcgttttcagcttaaacatcacctaaatctgtttctttatattatactatattaaagcaccagtttcaaccgtagtccagcgtcaatatttttcaaaagacctcctacatttttttagaatcaactctcactcctataatttcttttctactactataataggagagttatgt

SEQ ID NO: 130968 - DNA, 2263 bp, Zea Mays
ttggccatctctagtcgccgttggctgtggctatgctgcactatctttttattgtagataataagtagctgcagtgttgttcagttaaactgtgtccaaaagtttacatatagttactaaaaacactgttttacatcgtggattgtactgttctcagtggattaatagaattggacgctggagatagacccgccggagaagatggcctgcccactgctcacagtagtctagtccctgcccaccaagtacggatctcatctcaccagctgcctgtgcagcagtccaattcctcttgctggagcataccagaagcagaatcgggtgagaggaaatgggatcaacaagaacgtctcatccatctttcccggtcctcctgctcttcctcctcgctaccgccgccgccgccggaagcaacaaggctgaggaggtggacgacctccagtaccttattgacaactccgaagacatcccacccaacgaccctgacgggtggcctgagggcggcggcggcggcgactacgacgacgaccttctcttccaagatcaggaccaggacctcccagactacgagccgcagatcgacgagacccacgtcgtggtcctcaccgccgccaacttctcctccttcctcgccgccacccgccatgtcatggttgagttctacgccccctggtgtggccactgccgcgagctcgcccctgaatacgccgccgccgccgcgcatctcgccgtccaccacaaccagaccgatctcgctcttgccaaggccgacgccaccgaggaaaccgacctagcccagaggtacgacgtccagggcttccccactatcatcctcttcatcgacggcgtccccaaggactacaacggcgcgaggaccaaggacgccatcgtcgactggatcaacaagaagctcggcccggccgtgcaagatgtcaccagcgtccacgaggccgagaggatactcaccggggatgacaaagccgtcattgccttcctcgacactctaaccggtgctcacagtgacgagcttgctgctgcttcaaggctggaagatagcatcaacttttatcaaacttcgattcctgatgttgctaagcttttccatatcgacccagcagcaaagcgtccatccatagtattactgaagaaagaggaggagaagttgaccttctatgatggaaagtttaaagcatcagccattgctgattttgtgtctgctaacaagcttcctttggttaccacactaactcaagaaacttccccttctatttttggcaatgcaatcaagaagcagattttactatttgctgttgcaagtgaatcctcaaaatttctgtccatctttaaggaagcagcaaagccatttaagggaaagctattatttgtctttgtggagcgagacaatgatgaagttggtgaaccagttgccaactactttggtcttactggacaagagaccacagttcttgcttacactggtaatgaagatgctaggaaatttttccttgatggcgaggtgtcacttgaagccattaaggacttcgctgaaggtttcttggaagacaaacttacaccattctacaagtctgaaccagtacctgaatctaatgatggggatgtcaaaattgttgttggaaagagtctggatgtaatagttttggatgaatcaaaagatgtacttctggagatatatgcaccgtggtgtgggcattgtcaatcactggagcctacttacaacaaactagccaagcatctaagtggagttgactcccttgtgatagccaaaatggatggtactaccaatgagcatccacgtgcaaagtctgacggatacccaacaattctcttctatccagctgggaagaaaagctttgagcctgtcacgtttgagggggagcggacagtggtagatatgtacaggttcatcaagaaacatgctagcatccctttcaagttgaagcgccaggagtcaagaagggagagcatccagacggatggtgtcaaggacgaactgtagggcaggtcatgcattgatagatagctgagttttgaattttggttttataaaattaggtccgccaccgaatttcgcgttttcagcttaaacatcacctaaatctgtttctttatattatactatattaaagcaccagtttcaaccgtagtccagcgtcaatatttttcaaaagacctcctacatttttttagaatcaactctcactcctataatttcttttctactactataataggagagttatgt

SEQ ID NO: 130969 - DNA, 1125 bp, Zea Mays
atggcggtgacgatgacgctgatatctcttcgaacattctcgactctgatacctccaactccgacgcgccaatatcgtaccagatcgcggcgggcgacacctactaaatcatctccaccaccaagccgcagaacacgcagtaccagcatggagcgcgtgaaccccaaactggtgcccaccaacctcgacatcggcatcacggtcatgttccctatcttctgccagtgcccggccgccgccgacaacgccaccgcgctcatcaccaccaagcttcagcaatacacgtcactcgatgaccactgccatgagcggggcatccttcaccaggacatcaagggctccaatctgctgatcgactaccccgacatgctcggtgacttcggcctcaacaactacggcgctgggcaccgacaaccgctcaccagccgcgtcgtcacgctctggtaccgcacacctgtgctgctgctgaactccaccagctacggcgtcggcttcgacctctggagcgcgggttgcctcaacgagatcttcttcggcaagcccctcatgcccggcagtggcgagatgtaccagctactgaagatcttcaagctgtgcgggtcacctccggatatggtcgaactccaacagcacatcaacaatggtcacgcggttctaggtgcccaccgtgtgttcgaggaattgtcatcacatgttattgccacctgcaacaatggtgttggctcgacgatgcaagacctggcacatgctatcggtaatactgaagtgtggccaataccatggccatctttcagtttctctccaattggattggctccactattagcattggaatcaattgcagtggtaggtggaaggtgcgtgcttcagaagagtgcaaaattcaaaattatctataggctgagtagtgtgttggcttggtttgttggttctggtgaccaggaacttagatggttgtctagttatctattcatgcattatggtaattcctggaagttagttgtgtatgatggccaagggcacatattggtgacaatgttgagctcaatttctattcgagaagtgggttcctttagatgtgtgctgaaattcatatgggtcctattctggtcgtgggtgtcctag

SEQ ID NO: 130970 - DNA, 101 bp, Zea Mays
atagtgataattattattcgcctattcaccccctctaggcgacatcaagatcttgttcttgggcatagggaactttcacttattacattattggtgtccga

SEQ ID NO: 130971 - DNA, 1713 bp, Zea Mays
ccacatgtaattggacgtgatttgtgttattttctgccattgctggttgacataatggaactgtattttcaggctgccaactatctgaacatcaagggattgctggacctgacctgccagacggttgctgacatgatcaagggcaagactccggaggagatccgcaagacattcagcatcaagaacgacttcacccaagaggaggaggatgagatccgcatggagaaccagtgggccttcgagtgattgttgtcttcctttccctgccatggcgaagcccgtctccatccaggtgtggaaccccagcggcaagtaccgcgtggtgagcaccaagtccatgccgggcacacgatggatccgcctgctcaccgacaacgactgccgccttgagatatgcaccgagcacaagaccatcctctccgtggacgacatcctggcgctcatcggcgatcgctgcgacggcgtcattggacagctcaccgaggactggggggacgtgctcttctctgcgctcaagcgcgccggaggcacggtcttcagcaacatggccgtcggctacaacaacgtcgatgtcgaggctgccaacaggaatggcatcgcaatcggcaacacgccgggcgttctgacggagacgacggctgagctcgccgcctccctctcgctggcggcagccaggaggatcgtcgaggctgaccagttcatgagggctggcctctatgacggatggctcccacacctgttcgttggcaacctgctcaagggccaaactgttggagtcattggagctggtcgcattggctccgcctatgcacgcatgatgattgagggtttcaagatgaacctcatctactacgacctgtatcaggccacacgtcttgagaatttcgtcacagcatatgggcagttcctcaaagcaaacggtgaggagcctgtcacctggaagagggccgccaccatggaggatgtcctcagggaggctgacgtgataagtctgcatccggtgctggacaagaccacctaccatctgataaaccccgagaggctggccatcatgaagaaggaggctgttcttgtgaacgcaagccgagggcccgtgatcgatgaggccgcgctggtggagcacctcaaggctaaccccatgttccgcgttggcctcgatgtctttgaggatgagccttacatgaaacctggactcgctgacatgaagaacgccgtcgtggtaccgcacatcgcatcagcctccaagtggacacgcgagggaatggcaaccctgtctgctctcaacgttcttgtatggtaagatcaaggggtaccctgtgtgggggaaccccaatcaggtggagcccttcttgcaggagaatttgacgccaccgcctgcctgcccaagcatcgttaatgccaaacaaattggcctgccatcggcaaagctttaggagcgaacactgacaggctggtatctacatgttgaagatgtgtcgtcgtcgtctccaccacgcgcacatatatgtacatgcatgtggattgaggtcatgcatctgcagagcaggtagcacatattaatttggatcatatatattgaccaatacacactgtatgctagattgctaggttgctgtgcatggatcatattgatcaatgacgaccaggcctccctccgtttcccttctatatttaggacctatttggttccttaagtccaatttggttccttaa

SEQ ID NO: 130972 - DNA, 1709 bp, Zea Mays
ccacatgtaattggacgtgatttgtgttattttctgccattgctggttgacataatggaactgtattttcaggctgccaactatctgaacatcaagggattgctggacctgacctgccagacggttgctgacatgatcaagggcaagactccggaggagatccgcaagacattcagcatcaagaacgacttcacccaagaggaggaggatgagatccgcatggagaaccagtgggccttcgagtgattgttgtcttcctttccctgccatggcgaagcccgtctccatccaggtgtggaaccccagcggcaagtaccgcgtggtgagcaccaagtccatgccgggcacacgatggatccgcctgctcaccgacaacgactgccgccttgagatatgcaccgagcacaagaccatcctctccgtggacgacatcctggcgctcatcggcgatcgctgcgacggcgtcattggacagctcaccgaggactggggggacgtgctcttctctgcgctcaagcgcgccggaggcacggtcttcagcaacatggccgtcggctacaacaacgtcgatgtcgaggctgccaacaggaatggcatcgcaatcggcaacacgccgggcgttctgacggagacgacggctgagctcgccgcctccctctcgctggcggcagccaggaggatcgtcgaggctgaccagttcatgagggctggcctctatgacggatggctcccacacctgttcgttggcaacctgctcaagggccaaactgttggagtcattggagctggtcgcattggctccgcctatgcacgcatgatgattgagggtttcaagatgaacctcatctactacgacctgtatcaggccacacgtcttgagaatttcgtcacagcatatgggcagttcctcaaagcaaacggtgaggagcctgtcacctggaagagggccgccaccatggaggatgtcctcagggaggctgacgtgataagtctgcatccggtgctggacaagaccacctaccatctgataaaccccgagaggctggccatcatgaagaaggaggctgttcttgtgaacgcaagccgagggcccgtgatcgatgaggccgcgctggtggagcacctcaaggctaaccccatgttccgcgttggcctcgatgtctttgaggatgagccttacatgaaacctggactcgctgacatgaagaacgccgtcgtggtaccgcacatcgcatcagcctccaagtggacacgcgagggaatggcaaccctgtctgctctcaacgttcttggtaagatcaaggggtaccctgtgtgggggaaccccaatcaggtggagcccttcttgcaggagaatttgacgccaccgcctgcctgcccaagcatcgttaatgccaaacaaattggcctgccatcggcaaagctttaggagcgaacactgacaggctggtatctacatgttgaagatgtgtcgtcgtcgtctccaccacgcgcacatatatgtacatgcatgtggattgaggtcatgcatctgcagagcaggtagcacatattaatttggatcatatatattgaccaatacacactgtatgctagattgctaggttgctgtgcatggatcatattgatcaatgacgaccaggcctccctccgtttcccttctatatttaggacctatttggttccttaagtccaatttggttccttaa

SEQ ID NO: 130973 - DNA, 1771 bp, Zea Mays
ccacatgtaattggacgtgatttgtgttattttctgccattgctggttgacataatggaactgtattttcaggctgccaactatctgaacatcaagggattgctggacctgacctgccagacggttgctgacatgatcaagggcaagactccggaggagatccgcaagacattcagcatcaagaacgacttcacccaagaggaggaggatgagatccgcatggagaaccagtgggccttcgagtgattgttgtcttcctttccctgccatggcgaagcccgtctccatccaggtgtggaaccccagcggcaagtaccgcgtggtgagcaccaagtccatgccgggcacacgatggatccgcctgctcaccgacaacgactgccgccttgagatatgcaccgagcacaagaccatcctctccgtggacgacatcctggcgctcatcggcgatcgctgcgacggcgtcattggacagctcaccgaggactggggggacgtgctcttctctgcgctcaagcgcgccggaggcacggtcttcagcaacatggccgtcggctacaacaacgtcgatgtcgaggctgccaacaggaatggcatcgcaatcggcaacacgccgggcgttctgacggagacgacggctgagctcgccgcctccctctcgctggcggcagccaggaggatcgtcgaggctgaccagttcatgagggctggcctctatgacggatggctcccacacctgtcagtccctctgcttcctcatatactcctgcaaatgcaacaataacaatgtattgtcgcaggttcgttggcaacctgctcaagggccaaactgttggagtcattggagctggtcgcattggctccgcctatgcacgcatgatgattgagggtttcaagatgaacctcatctactacgacctgtatcaggccacacgtcttgagaatttcgtcacagcatatgggcagttcctcaaagcaaacggtgaggagcctgtcacctggaagagggccgccaccatggaggatgtcctcagggaggctgacgtgataagtctgcatccggtgctggacaagaccacctaccatctgataaaccccgagaggctggccatcatgaagaaggaggctgttcttgtgaacgcaagccgagggcccgtgatcgatgaggccgcgctggtggagcacctcaaggctaaccccatgttccgcgttggcctcgatgtctttgaggatgagccttacatgaaacctggactcgctgacatgaagaacgccgtcgtggtaccgcacatcgcatcagcctccaagtggacacgcgagggaatggcaaccctgtctgctctcaacgttcttggtaagatcaaggggtaccctgtgtgggggaaccccaatcaggtggagcccttcttgcaggagaatttgacgccaccgcctgcctgcccaagcatcgttaatgccaaacaaattggcctgccatcggcaaagctttaggagcgaacactgacaggctggtatctacatgttgaagatgtgtcgtcgtcgtctccaccacgcgcacatatatgtacatgcatgtggattgaggtcatgcatctgcagagcaggtagcacatattaatttggatcatatatattgaccaatacacactgtatgctagattgctaggttgctgtgcatggatcatattgatcaatgacgaccaggcctccctccgtttcccttctatatttaggacctatttggttccttaagtccaatttggttccttaa

SEQ ID NO: 130974 - DNA, 949 bp, Zea Mays
aaatctgttcattgccggctacctttcataaataacttatgaggccaaactaaagagggcagggcaggcgaatcgaaggaaaagtagtcaggagaggcgtttccctcgcaatcgaccatcacagatcaaatcgctgcaactagctagggtttcgtcgcctcatctctcgtcgatccatcgatggcgtccgagggcgaaaacaagaggatgatcacgctcaggagctccgacttagaggagttcgaggtggaggaagcggtggccatggagtcgcagactctccgccacatgatcgaggacgactgcgccgacaacggcatcccgctccccaacgtcaactccaggatcctctctaaggtcatcgagtactgcaacagtcacgtccacgccgccgccaaacccgctgactccgctgcctccgagggcggcgaggacctcaagagctgggacgcgaagttcgtcaaggtggaccaggctacgctcttcgacctcatcctggctgccaactatctgaacatcaagggattgctggacctgacctgccagacggttgctgacatgatcaagggcaagactccggaggagatccgcaagacattcagcatcaagaacgacttcacccaagaggaggaggatgagatccgcatggagaaccagtgggccttcgagtgattgttgtcttcctttccctggtgatggtggtggttcttttacaagaacagatggatgtctgcactgcactctacaatgctagtctatctacttacgaaatagtagtgaaatagtagtataatggtcgtgatggttgtatccttttttggattggatgtatgtcaagctggtgggtgctagttcgtctgtctggacttgttactagttaatatctcataatacatatataaaagtggatcttatgatgatttgcctccatggctggttgttgtgccaa

SEQ ID NO: 130975 - DNA, 6139 bp, Zea Mays
cgtctgtcactctcctctctcgcgtcttggtcctcctcctccccttcatcgaacgaatccatccaaggcaaaagggaacgagggaagcaagcaaaaaatccccaattcctcctagatcgatccaccgccgacgcggccgccgcctcctcgtccgcctccaagcgcccccgccgcaactcctcttcctcctcctctgcgccgccgcgccagcagccaccgatggaaccctcgccctcctcccgccgccgctcccgcgccgccgccgccgacaagggcaaggaccccgaccccgcctcctccgaccacccttccccacccgcccctgacgatgacgccgacgtcaccttcccccagcccttcacctccgccagcaccgccctccagggcctcctccgcaggctcggcgccggcctcgacgacctcctcccatcctcctcctcagcgccctcctccgccacgtccggtcacctcaagaggatcctcgccggcctgcaggcgcacggcgacgagtcgcgccagctccagtccctcatgcagctctgcgagatgctctccatcggcaccgaggactcgctcgccgccttcccggtcgatgcttttgtcccaatcctcgtcgggatgctcggccgcgaggacgagcctgccaccgctggtgccagccccgacgtcatgctgctcgcggcgcgggcactctccaacctcgttgatgtgctcccctcctcctgctccgcggtcgtgcactacggggccatacagtgcttctgtgctcgactgctcaccatcgagtacatggacctcgctgagcagtctctacaagcccttaagaagatctctctggagcacccaactgcctgtttgcgagctggtgccctaatggctgttctatcgtatctcgacttcttctccactggggttcagagggtagccttgtctaccgctgcaaatatttgcaggaagctgccgtccgatgcttccgagtttgtcatggaagctgtccccttgctcacgaatcttctaaatcaccatgattccaaggtactagagcatgcttctgtttgtttgacacgcattgctgaagcttttgcctattaccccgacaaacttgatgaactctgcaatcatggattagttgctcaagctgctagcttgatagctgttggcaactcatctggccagacatcactgagcacatccacatatacaggcttaatccgtcttctctcaatatgtgcaagtggatccctgctggcagttaaaacactacttcttcttgggatcagcggcactcttaaagatatcctttctggctctgctttgatttctggaacatcagtctcccctgctgtaacaaggcctgcagatcagatgtttgagattgtgagccttgccgatgatttgcttccgcatatccctgcgagaatcattaagttaccaacatattaccatacatataaaggctcttcaacaaagaaatctgcttccatcaaacaagaggggggtggttcaacaggaaatgaaaggtctggccgtgagaggctattgcgtgagcaacctgagcttttacaacagtttggtatggatttgttacccacaatgacacaggtgtatggttctagtgtaaatgcaccaatacgtcacaagtgtttatctatcattggaaaattaatgtactacagctccgccgaaacaatccagtctctccttggcacaacaaacatatccagcttccttgcgggcattcttgcatggaaagatcctcaagtgttgattcctgctcttcagatagcagaaataatgatggaaaagcttccagagacattttccaagttatttgtgagggaaggtgtcgttcatgctgtggagtcactcatatgttcagaatcttccaacaaaatgccttctcaggtgccacctcaggataaagataaagattctgccatgccatcacgttctagacgtcaacgccggcgtgcgggtgctgttgcagcagaaaatagttcattggatgaatcaaatagttccaaccttggtgttatgtgctcaacagcaaccgcttcagaagctccaaacaccagccttcgtttcacagttagtgaccatgcaaagtctttcaaagataaatactttccggcggatactgattcaagtgatatcgggtttactgatgaccttcttaaactgagggcactctgtgcaaagttgaatactgtctctgagaacgtcaaaacaaaagcaaaagggaaatcaaaagctataagcactaattttttggacatctcaattgatgttgaagaacaattagacaaaataatatctgaaatgctctctgagcttagcaaagttaatggtgtttccacatttgaattcattagaagtggtgttgtcatagcattgcttgactatttgtcctgtgggacatttgggaaggaaaaggtatctgaaggaaacctatctcagcttcgtcagcaggcccttagacgatacaaaaccttcatatctgttgccctttctattgatcatggacgagatgaaactcccatggcactgttggttcagaaactgcaaagtgcattgtcttcgctggaacgtttccctgttgtgctcagccagtctagtaggattggtattggagggtctcgtctgacttcaggtcttagtgctctggctcaacccttcaagcttcgtctttcccgagctcaaggcgaaaaatcacttcgggattattcatcaaatattgtgcttatcgacccatttgctagtcttgcatctgttgaagaattcctttggcctagagttcaacgcagtgaggttgcatcgaagcctataattccatctggtaataattctgaatctggggttcctggcaccacggctggtgcatcattaacagctgcaatggctcaatctggtcggcgcccaacaacaagatcaaagtcatctgctgcaggtggtcttacatctaagaaggattctcatgatgaaagcactagtactgccaaaggaaaaggaaaagctattgtaaagccaaactcagatgaatcaaaaggacctaatacaaggaatgctgcccaccaaaaatctgcttcagagaaagatttggaaatgaagcaggcacatggccacagtagctctgaggttctccaagaagggtctcttccaatctgttctcaagatggtgtgcatgacgtgaaactgggtgatgccgatgaatctaacattggatcagctacttttagccatgcacagccatcatctggttctggggctagaaacacttctagcaggggaccggattctactgaatttcgaagtatgggcacattcggttcacgaggtgcaatgtcatttgttgctgcgacgatggctggtctggcttctgttggtggtcgcagtgttagaggtgtccgagatcggcgtggtctgtcacttggaggtagcatgaatgatcacaataaacttatattcactgctggtggcaagcagcttaacaaacatttgactgtatatcaagctatccaacgtcaacttatgctcgacgaggatgatgaagaaaggtttaatggatctgatataccaaatgatggaaaccgcttctggggtgatgtgttcacaataacgtaccagaaggctgataaccaagttgagaagggttgccaagggacttccacctcattaaacataaaatcagattcttacaggtccatttctgaagcacaaggggtttctcttcttgatagcatcttacaaggagaacttccttgtgatcttgagaggacaaactcaacgtacaacattttagcattattgcgtatacttgaggggcttaatcagttatcccctcgtttaagagtacagggagcatctgatgattttgctgagggaaaaatcaataccctggatgagttatatagaactggagccaaggtaccttctgaagtgtttgtcaatagcaagttaacaccaaagcttgctcggcaaatgcaggacgttctcgcactatgtagtggcagtttaccttcttggtgttatcaaatgaccaaggcctgcccattcctgtttccttttgagacaaggaggcagtacttctattccacagcctttgggttgtcacgagcattgaatcgactccagcaacagcagagtgataatcacagctctggtggtgaaagagaggtcaggtttggcaggttacaacgccagaaagttcgtgtttcccgtaaccgtattctagattctgctgctaaagttatggagatgttctccagtcagagggctgttcttgaggtggaatactttggcgaagttggaactgggctggggcctactctagagttttatactctcttaagccatgaactacaatgtgctcaactgggattatggagagctacttcttcatatgattcaggattgcacactgatatgaaggatgtgatccgtttagatcctgaagatgggtcgtcaggaaaagaactcaacacagatctaccaggtgatggcatgtatttgatacaagctcctcttggattgttccctcgaccttggccacctaaagttgatacttcagaaggtagcagattcttcaaagttttggagtatttccgcttaataggtcaagtgatcgcaaaagtcctgcaagatggcagacttttagatttgcctttatcaacagcgttttataagcttatacttggacaggaacttgatttgtttgacatagtgtcatttgattctgagtttgggaagacattgcaagaactgcaagttcttgttgaacgaaagcagttccttgaatccacttctggcaagaaccagctacaagttgcagatttgtgtttccatggcgcttctattgaagatttgtgtttagattttactcttccaggttatcctgattatgtgcttaaagagggtgaaggaggcacaattgttaatatttataatttagaagagtatattactttggtggtggatgctacagttaagtcagggataaagcgacaggttgaggcatttagatcagggtttaatcaggtgtttgacatgtcatccctccacatattttcacctcaagaacttgactatctaatatgtggtcgacaagaaatttgggagtcggaatccctggtggataacataaaatttgatcatggatatactgctaaaagtcctgcgatcgtgaatctactcgagattttgtcagaattcacccctgagcagcagcatgcgttctgccagtttgtaaccggtgctcctcggcttccacatggtggattggctgcccttagccccaagcttactatagttaggaagcatccttcaagtgctgtgaatacttcaaattcaactggggcagtagagtccgctgatgatgatttgcctagtgtgatgacgtgcgccaattatctgaagctgcccccctactccacaaaagaaatcatgcgcaagaagttgctttatgcgatcctggaaggccgaggatcatttgatctttcataagaaatatacaatatccgaactaacatacaggggtcagttttattctggagatttagtttcttggtccatgtataacactgagttgaggttaccagctcactcagcaaacggcttcaagggcgagagccccagtcctcactcggatgcaggtgctgctgtcgatttctcccttcttttacatttgttcagctactgtattctcttcgagggttgcccttgtcacctgcaattatgaatctacagcttttgtcatcgaggaagtttaacagattttggtttctctaccatgatctgtttccattgggcaggctaagctatagtaattgaggatgtgcgccttgagtgaggatgtgcgccaacaagaacccccgtttgtttcagtacatgtaaataaaagggattttttgttccagaattgttatctgtaacaagaacatctacatctgtgatgactgaccattaataaatgtgtcccggtgtaccatttgttttttttctttgagcactggcagtagcaggatacacaaaagggagtgtatgctatatactactagtcgcggatagctcatctggtcatggccacagttttttcttatggagagaataacaaaatttggccctataaacagaaaaaaataaa

SEQ ID NO: 130976 - DNA, 5980 bp, Zea Mays
cgtctgtcactctcctctctcgcgtcttggtcctcctcctccccttcatcgaacgaatccatccaaggcaaaagggaacgagggaagcaagcaaaaaatccccaattcctcctagatcgatccaccgccgacgcggccgccgcctcctcgtccgcctccaagcgcccccgccgcaactcctcttcctcctcctctgcgccgccgcgccagcagccaccgatggaaccctcgccctcctcccgccgccgctcccgcgccgccgccgccgacaagggcaaggaccccgaccccgcctcctccgaccacccttccccacccgcccctgacgatgacgccgacgtcaccttcccccagcccttcacctccgccagcaccgccctccagggcctcctccgcaggctcggcgccggcctcgacgacctcctcccatcctcctcctcagcgccctcctccgccacgtccggtcacctcaagaggatcctcgccggcctgcaggcgcacggcgacgagtcgcgccagctccagtccctcatgcagctctgcgagatgctctccatcggcaccgaggactcgctcgccgccttcccggtcgatgcttttgtcccaatcctcgtcgggatgctcggccgcgaggacgagcctgccaccgctggtgccagccccgacgtcatgctgctcgcggcgcgggcactctccaacctcgttgatgtgctcccctcctcctgctccgcggtcgtgcactacggggccatacagtgcttctgtgctcgactgctcaccatcgagtacatggacctcgctgagcagtctctacaagcccttaagaagatctctctggagcacccaactgcctgtttgcgagctggtgccctaatggctgttctatcgtatctcgacttcttctccactggggttcagagggtagccttgtctaccgctgcaaatatttgcaggaagctgccgtccgatgcttccgagtttgtcatggaagctgtccccttgctcacgaatcttctaaatcaccatgattccaaggtactagagcatgcttctgtttgtttgacacgcattgctgaagcttttgcctattaccccgacaaacttgatgaactctgcaatcatggattagttgctcaagctgctagcttgatagctgttggcaactcatctggccagacatcactgagcacatccacatatacaggcttaatccgtcttctctcaatatgtgcaagtggatccctgctggcagttaaaacactacttcttcttgggatcagcggcactcttaaagatatcctttctggctctgctttgatttctggaacatcagtctcccctgctgtaacaaggcctgcagatcagatgtttgagattgtgagccttgccgatgatttgcttccgcatatccctgcgagaatcattaagttaccaacatattaccatacatataaaggctcttcaacaaagaaatctgcttccatcaaacaagaggggggtggttcaacaggaaatgaaaggtctggccgtgagaggctattgcgtgagcaacctgagcttttacaacagtttggtatggatttgttacccacaatgacacaggtgtatggttctagtgtaaatgcaccaatacgtcacaagtgtttatctatcattggaaaattaatgtactacagctccgccgaaacaatccagtctctccttggcacaacaaacatatccagcttccttgcgggcattcttgcatggaaagatcctcaagtgttgattcctgctcttcagatagcagaaataatgatggaaaagcttccagagacattttccaagttatttgtgagggaaggtgtcgttcatgctgtggagtcactcatatgttcagaatcttccaacaaaatgccttctcaggtgccacctcaggataaagataaagattctgccatgccatcacgttctagacgtcaacgccggcgtgcgggtgctgttgcagcagaaaatagttcattggatgaatcaaatagttccaaccttggtgttatgtgctcaacagcaaccgcttcagaagctccaaacaccagccttcgtttcacagttagtgaccatgcaaagtctttcaaagataaatactttccggcggatactgattcaagtgatatcgggtttactgatgaccttcttaaactgagggcactctgtgcaaagttgaatactgtctctgagaacgtcaaaacaaaagcaaaagggaaatcaaaagctataagcactaattttttggacatctcaattgatgttgaagaacaattagacaaaataatatctgaaatgctctctgagcttagcaaagttaatggtgtttccacatttgaattcattagaagtggtgttgtcatagcattgcttgactatttgtcctgtgggacatttgggaaggaaaaggtatctgaaggaaacctatctcagcttcgtcagcaggcccttagacgatacaaaaccttcatatctgttgccctttctattgatcatggacgagatgaaactcccatggcactgttggttcagaaactgcaaagtgcattgtcttcgctggaacgtttccctgttgtgctcagccagtctagtaggattggtattggagggtctcgtctgacttcaggtcttagtgctctggctcaacccttcaagcttcgtctttcccgagctcaaggcgaaaaatcacttcgggattattcatcaaatattgtgcttatcgacccatttgctagtcttgcatctgttgaagaattcctttggcctagagttcaacgcagtgaggttgcatcgaagcctataattccatctggtaataattctgaatctggggttcctggcaccacggctggtgcatcattaacagctgcaatggctcaatctggtcggcgcccaacaacaagatcaaagtcatctgctgcaggtggtcttacatctaagaaggattctcatgatgaaagcactagtactgccaaaggaaaaggaaaagctattgtaaagccaaactcagatgaatcaaaaggacctaatacaaggaatgctgcccaccaaaaatctgcttcagagaaagatttggaaatgaagcaggcacatggccacagtagctctgaggttctccaagaagggtctcttccaatctgttctcaagatggtgtgcatgacgtgaaactgggtgatgccgatgaatctaacattggatcagctacttttagccatgcacagccatcatctggttctggggctagaaacacttctagcaggggaccggattctactgaatttcgaagtatgggcacattcggttcacgaggtgcaatgtcatttgttgctgcgacgatggctggtctggcttctgttggtggtcgcagtgttagaggtgtccgagatcggcgtggtctgtcacttggaggtagcatgaatgatcacaataaacttatattcactgctggtggcaagcagcttaacaaacatttgactgtatatcaagctatccaacgtcaacttatgctcgacgaggatgatgaagaaaggtttaatggatctgatataccaaatgatggaaaccgcttctggggtgatgtgttcacaataacgtaccagaaggctgataaccaagttgagaagggttgccaagggacttccacctcattaaacataaaatcagattcttacaggtccatttctgaagcacaaggggtttctcttcttgatagcatcttacaaggagaacttccttgtgatcttgagaggacaaactcaacgtacaacattttagcattattgcgtatacttgaggggcttaatcagttatcccctcgtttaagagtacagggagcatctgatgattttgctgagggaaaaatcaataccctggatgagttatatagaactggagccaaggtaccttctgaagtgtttgtcaatagcaagttaacaccaaagcttgctcggcaaatgcaggacgttctcgcactatgtagtggcagtttaccttcttggtgttatcaaatgaccaaggcctgcccattcctgtttccttttgagacaaggaggcagtacttctattccacagcctttgggttgtcacgagcattgaatcgactccagcaacagcagagtgataatcacagctctggtggtgaaagagaggtcaggtttggcaggttacaacgccagaaagttcgtgtttcccgtaaccgtattctagattctgctgctaaagttatggagatgttctccagtcagagggctgttcttgaggtggaatactttggcgaagttggaactgggctggggcctactctagagttttatactctcttaagccatgaactacaatgtgctcaactgggattatggagagctacttcttcatatgattcaggattgcacactgatatgaaggatgtgatccgtttagatcctgaagatgggtcgtcaggaaaagaactcaacacagatctaccaggtgatggcatgtatttgatacaagctcctcttggattgttccctcgaccttggccacctaaagttgatacttcagaaggtagcagattcttcaaagttttggagtatttccgcttaataggtcaagtgatcgcaaaagtcctgcaagatggcagacttttagatttgcctttatcaacagcgttttataagcttatacttggacaggaacttgatttgtttgacatagtgtcatttgattctgagtttgggaagacattgcaagaactgcaagttcttgttgaacgaaagcagttccttgaatccacttctggcaagaaccagctacaagttgcagatttgtgtttccatggcgcttctattgaagatttgtgtttagattttactcttccaggttatcctgattatgtgcttaaagagggtgaaggaggcacaattgttaatatttataatttagaagagtatattactttggtggtggatgctacagttaagtcagggataaagcgacaggttgaggcatttagatcagggtttaatcaggtgtttgacatgtcatccctccacatattttcacctcaagaacttgactatctaatatgtggtcgacaagaaatttgggagtcggaatccctggtggataacataaaatttgatcatggatatactgctaaaagtcctgcgatcgtgaatctactcgagattttgtcagaattcacccctgagcagcagcatgcgttctgccagtttgtaaccggtgctcctcggcttccacatggtggattggctgcccttagccccaagcttactatagttaggaagcatccttcaagtgctgtgaatacttcaaattcaactggggcagtagagtccgctgatgatgatttgcctagtgtgatgacgtgcgccaattatctgaagctgcccccctactccacaaaagaaatcatgcgcaagaagttgctttatgcgatcctggaaggccgaggatcatttgatctttcataagaaatatacaatatccgaactaacatacaggggtcagttttattctggagatttagtttcttggtccatgtataacactgagttgaggttaccagctcactcagcaaacggcttcaagggcgagagccccagtcctcactcggatgcaggctaagctatagtaattgaggatgtgcgccttgagtgaggatgtgcgccaacaagaacccccgtttgtttcagtacatgtaaataaaagggattttttgttccagaattgttatctgtaacaagaacatctacatctgtgatgactgaccattaataaatgtgtcccggtgtaccatttgttttttttctttgagcactggcagtagcaggatacacaaaagggagtgtatgctatatactactagtcgcggatagctcatctggtcatggccacagttttttcttatggagagaataacaaaatttggccctataaacagaaaaaaataaa

SEQ ID NO: 130977 - DNA, 716 bp, Zea Mays
atatttgatggacaaggccatgatgattctattgacacaagtgacttagaaaaatatttgacagatccaatattaaagattggtaaaaataatcagcatacttttgacatactagcctggtggaaagcacacaaagaagaatatcctatcttgggccagcttgctcgtgacgtcttagctatgcaagtgtcaacagtagcttcagaatctgcttttagtgcgggtggtcgtgtacttgatccatttcgtactcgtcttgaccctaccatggtagaagcgcttgtctgcaccaaagattggatagctggagcaagaaaaggttccaaggctaagagtgttgctattcctaatatggtttgtgaaatggaggaacttgaggctcttgctagaaatctttcacttgaggatgaagacctagatgatgaccatgatgatggaccagaggcatcgttgtaagcttgttgatgaagacctagatgatgataatgcaacatgaatgctccaaatgttttttattgtacttgttgcgtaatgctttgtgatcttgcgaacttgggacttgtggatttgtgtactttgtgatctgtgtgatgaacttgttatattgtgaacttgtgatctgtgtgatccacttattatattgtgaacttgtgatcaacttgttatattgtgaacttgtgatctgtgtgatccacttattatattgtgaacttgtg

SEQ ID NO: 130978 - DNA, 603 bp, Zea Mays
atggctagtgaaggtgaagcttcacctccacggaagcgtatgttgttggagttgcctagtgaacatcaaagtcaaaacttgacatcgccacctcatgcaaatacgagtcaaccttttggtgtgtccgcttcatcatcaacacctgctgcaacatctcatgaacaaggtgcaaatccagaagaaggaattaatttggatgaggatgatccttcaaagttgaagcaagcaaagaagtccacttcaaatgtttggcagtattttgagaagtatgaggttgtcgtagaggagaatggcaaatctgtgaagcaagtttgggccaaatgcaagtatccgggatgcaaaaacaagactagcaaagctagggctgaaagtagtagaggaacaactgcattttggtctcatttgaaaaattatcataagattgtgaaggggcaacaagagctcaaggcagaaaaggatcatggcacaggtatatgcattgttcagccatataaatatgatgaagaaaccagtttgagaaagttttatacagctattatcatgcatgagtatccatttaacattgctgagcatgaatactttgtggaattcattaaatcattg

SEQ ID NO: 130979 - DNA, 3027 bp, Zea Mays
tacctccttgaggtctcccttgcgagcagcaacatggagcgggttccagccacggtcgtccgcgtcgtggcagctccgaaggcggctcatgctgagcgacctgcgcacctgcaccatggtattttggtatccttggcggctcctcgagcagcaggacaggggaggatctcgagactcagatccaaagcaacggaacaatgaaacgaacgggagtaaaatagcggggatcggttccgatggaggaagcggccgggggcggaggcggaagcactcagagatcggaatcggagaaagagggataggaggaaacggctagcgggagtagttgcccatgccgaagggagccaagggattcaagccgggtccgagggcgcggaggttcttgtggagcatcggcgaggaagacggcggcgtcgatgagcggcacggggcgtaaaccatagtatggaggcacgtgctgtctggtctggtggtggtgccggtgtatttgttcccttctcgttccctactccaatcgaatcggaattcgaccgccaggcagtctagaggaagtcggaattggggatcattgctagcctatcccgccgccgatctgcgtctgcctggtggtggtggtgggagcgagagccgagagggaagaggcaaaccctagaatttattatttaggaagaagaacaacaaatcagaatccaattcccatccttcttatttttgttttctgagacaaacttctatttgtggatggatagacagaattgcccccgagcggccaaaacggaaacgacccgagccgaccaagccagggttcgtcgggtgcccgtgctgctcagatgacgcaagaggtagcccatggactaggaaatggaggcccatgaagggcccacctagatttcattccgctacggttgcgacggacgatgattcccactccattttgttgcggtgcagaatcccacccgccggcaaaaaccctcttctccttcttctctccgccgccgccgccatggccgccgccgtcgcacgctcccgcgccgccgcggcgtgggtccgcctcctttccttgcgtccgcatagcctcgcgggttccaccgcactcccacgccacggccatcacctaggctcgcggatcacgccgccgcgccgccacctggcattctccgcctcatccggggacgccaggccccaccagaagttccagagcgagtgggtcgtgcacgagctgctcgctgaggtcgagcgcgagcgccagcgggagcgacaggaccgccgcgcaaaggacggcaaagaccaggaggaagagccggaggaagacgaagaggactacatgggcgtcaagccgctcattgagaagctcgagcgacgcaagaccaaggatatggccgccggcgaaggcttctgggagcccaccgactccgacagcgacgaggacgacgagcgctacacgcccgatgccatcaagcagcgcgtcgacgagttcgagcgcaagtgcaagcgccatgaggagttcctgcaatcattcgcagaggccgacaccctagacgaggctcacaaatggatgaccaaaatcaacaactttgaggagcgccatctcaagctgccactggagtacagggtcatcggcgacatgatgaaccgtctcaaggatgccacggggaaagagcgcttcgttctccttcagaagctcaaccgagccgtcaggatcatggaaatcaaggaagcctacgaccccagtaaccctgcaaactttgggatcatccagcaccagcaggttggttctcctgaggatgtcgtgctcaatgccggctttgataaggagaagcagatgatccaaggggcagaacttgaggatgtcgacgaggaattcaatgatgtgaaggagagggatgatattctcatagataaactcgatgctattgaaaagaagattgaggggaagctagaactgttggatcataccttcggtaagaaaggcagagctttggaggaggaaatcaaggatttggtggaggaacgcaattccctgtccgagaagagcaggagacctatgtacagaaaaggttttgatgtgaaagttatcgatgttaacaggacatgcaaagtcacaaaggttatcgttctttgtttgagtgacttcaactgataattagtcttttcgccaactctgttgcctaattttacatcttgtttatcagggaggccaaatagcaaaattcacagcgctattggccactggaaattacaatggtgttgttggcttcgctaaggctaaaggcccaacagccaagattgcaatacagagagcgtatgagaaatgcttccagaatctccactacatggagcgatacgaggatcacacaatcgctcatgctatccaggccaaatatgagaaaacaaagatatatctctggcctgggccaatgaggagtggaatgtctgctgctggtaggactgttgagactgtgctgtacttggctggtttcagcaatgtcaagacaaagattatcggatcaaggaacccacttaatgtgattaaagctctcttcatagctttgaatgctattgaaaccccgaaggatgtccaacagaagtttgggcgtactgtcgtcgagtcatatttattgtgatcatcatgattgtttggaggacacagaggcgagcggagcctgtataggttttgccatgagaagaccaaagaggcaaatgccaggtccaaccaacgtgagccctctttgttttggacttttggtggtgatgttgaccagaccattgatgttgaagtggcaagaatgtcagtgtcaacagtaatcggataaatagatggtatttccctgaccctttgtttgtagaacttgaatgaacctggggacagaaacacatttgagggttcttgtataaatcaaggtcaagatcagaattgcctcgtcgtgcctttgttttgttaccatagcttcttctccctacatactgttgtttggatgataaatttaattgaatattaatttctcctgaactggttggacaggtgag

SEQ ID NO: 130980 - DNA, 2926 bp, Zea Mays
tacctccttgaggtctcccttgcgagcagcaacatggagcgggttccagccacggtcgtccgcgtcgtggcagctccgaaggcggctcatgctgagcgacctgcgcacctgcaccatggtattttggtatccttggcggctcctcgagcagcaggacaggggaggatctcgagactcagatccaaagcaacggaacaatgaaacgaacgggagtaaaatagcggggatcggttccgatggaggaagcggccgggggcggaggcggaagcactcagagatcggaatcggagaaagagggataggaggaaacggctagcgggagtagttgcccatgccgaagggagccaagggattcaagccgggtccgagggcgcggaggttcttgtggagcatcggcgaggaagacggcggcgtcgatgagcggcacggggcgtaaaccatagtatggaggcacgtgctgtctggtctggtggtggtgccggtgtatttgttcccttctcgttccctactccaatcgaatcggaattcgaccgccaggcagtctagaggaagtcggaattggggatcattgctagcctatcccgccgccgatctgcgtctgcctggtggtggtggtgggagcgagagccgagagggaagaggcaaaccctagaatttattatttaggaagaagaacaacaaatcagaatccaattcccatccttcttatttttgttttctgagacaaacttctatttgtggatggatagacagaattgcccccgagcggccaaaacggaaacgacccgagccgaccaagccagggttcgtcgggtgcccgtgctgctcagatgacgcaagaggtagcccatggactaggaaatggaggcccatgaagggcccacctagatttcattccgctacggttgcgacggacgatgattcccactccattttgttgcggtgcagaatcccacccgccggcaaaaaccctcttctccttcttctctccgccgccgccgccatggccgccgccgtcgcacgctcccgcgccgccgcggcgtgggtccgcctcctttccttgcgtccgcatagcctcgcgggttccaccgcactcccacgccacggccatcacctaggctcgcggatcacgccgccgcgccgccacctggcattctccgcctcatccggggacgccaggccccaccagaagttccagagcgagtgggtcgtgcacgagctgctcgctgaggtcgagcgcgagcgccagcgggagcgacaggaccgccgcgcaaaggacggcaaagaccaggaggaagagccggaggaagacgaagaggactacatgggcgtcaagccgctcattgagaagctcgagcgacgcaagaccaaggatatggccgccggcgaaggcttctgggagcccaccgactccgacagcgacgaggacgacgagcgctacacgcccgatgccatcaagcagcgcgtcgacgagttcgagcgcaagtgcaagcgccatgaggagttcctgcaatcattcgcagaggccgacaccctagacgaggctcacaaatggatgaccaaaatcaacaactttgaggagcgccatctcaagctgccactggagtacagggtcatcggcgacatgatgaaccgtctcaaggatgccacggggaaagagcgcttcgttctccttcagaagctcaaccgagccgtcaggatcatggaaatcaaggaagcctacgaccccagtaaccctgcaaactttgggatcatccagcaccagcaggttggttctcctgaggatgtcgtgctcaatgccggctttgataaggagaagcagatgatccaaggggcagaacttgaggatgtcgacgaggaattcaatgatgtgaaggagagggatgatattctcatagataaactcgatgctattgaaaagaagattgaggggaagctagaactgttggatcataccttcggtaagaaaggcagagctttggaggaggaaatcaaggatttggtggaggaacgcaattccctgtccgagaagagcaggagacctatgtacagaaaaggttttgatgtgaaagttatcgatgttaacaggacatgcaaagtcacaaagggaggccaaatagcaaaattcacagcgctattggccactggaaattacaatggtgttgttggcttcgctaaggctaaaggcccaacagccaagattgcaatacagagagcgtatgagaaatgcttccagaatctccactacatggagcgatacgaggatcacacaatcgctcatgctatccaggccaaatatgagaaaacaaagatatatctctggcctgggccaatgaggagtggaatgtctgctgctggtaggactgttgagactgtgctgtacttggctggtttcagcaatgtcaagacaaagattatcggatcaaggaacccacttaatgtgattaaagctctcttcatagctttgaatgctattgaaaccccgaaggatgtccaacagaagtttgggcgtactgtcgtcgagtcatatttattgtgatcatcatgattgtttggaggacacagaggcgagcggagcctgtataggttttgccatgagaagaccaaagaggcaaatgccaggtccaaccaacgtgagccctctttgttttggacttttggtggtgatgttgaccagaccattgatgttgaagtggcaagaatgtcagtgtcaacagtaatcggataaatagatggtatttccctgaccctttgtttgtagaacttgaatgaacctggggacagaaacacatttgagggttcttgtataaatcaaggtcaagatcagaattgcctcgtcgtgcctttgttttgttaccatagcttcttctccctacatactgttgtttggatgataaatttaattgaatattaatttctcctgaac

SEQ ID NO: 130981 - DNA, 3087 bp, Zea Mays
tacctccttgaggtctcccttgcgagcagcaacatggagcgggttccagccacggtcgtccgcgtcgtggcagctccgaaggcggctcatgctgagcgacctgcgcacctgcaccatggtattttggtatccttggcggctcctcgagcagcaggacaggggaggatctcgagactcagatccaaagcaacggaacaatgaaacgaacgggagtaaaatagcggggatcggttccgatggaggaagcggccgggggcggaggcggaagcactcagagatcggaatcggagaaagagggataggaggaaacggctagcgggagtagttgcccatgccgaagggagccaagggattcaagccgggtccgagggcgcggaggttcttgtggagcatcggcgaggaagacggcggcgtcgatgagcggcacggggcgtaaaccatagtatggaggcacgtgctgtctggtctggtggtggtgccggtgtatttgttcccttctcgttccctactccaatcgaatcggaattcgaccgccaggcagtctagaggaagtcggaattggggatcattgctagcctatcccgccgccgatctgcgtctgcctggtggtggtggtgggagcgagagccgagagggaagaggcaaaccctagaatttattatttaggaagaagaacaacaaatcagaatccaattcccatccttcttatttttgttttctgagacaaacttctatttgtggatggatagacagaattgcccccgagcggccaaaacggaaacgacccgagccgaccaagccagggttcgtcgggtgcccgtgctgctcagatgacgcaagaggtagcccatggactaggaaatggaggcccatgaagggcccacctagatttcattccgctacggttgcgacggacgatgattcccactccattttgttgcggtgcagaatcccacccgccggcaaaaaccctcttctccttcttctctccgccgccgccgccatggccgccgccgtcgcacgctcccgcgccgccgcggcgtgggtccgcctcctttccttgcgtccgcatagcctcgcgggttccaccgcactcccacgccacggccatcacctaggctcgcggatcacgccgccgcgccgccacctggcattctccgcctcatccggggacgccaggccccaccagaagttccagagcgagtgggtcgtgcacgagctgctcgctgaggtcgagcgcgagcgccagcgggagcgacaggaccgccgcgcaaaggacggcaaagaccaggaggaagagccggaggaagacgaagaggactacatgggcgtcaagccgctcattgagaagctcgagcgacgcaagaccaaggatatggccgccggcgaaggcttctgggagcccaccgactccgacagcgacgaggacgacgagcgctacacgcccgatgccatcaagcagcgcgtcgacgagttcgagcgcaagtgcaagcgccatgaggagttcctgcaatcattcgcagaggccgacaccctagacgaggctcacaaatggatgaccaaaatcaacaactttgaggagcgccatctcaagctgccactggagtacagggtcatcggcgacatgatgaaccgtctcaaggatgccacggggaaagagcgcttcgttctccttcagaagctcaaccgagccgtcaggatcatggaaatcaaggaagcctacgaccccagtaaccctgcaaactttgggatcatccagcaccagcaggttggttctcctgaggatgtcgtgctcaatgccggctttgataaggagaagcagatgatccaaggggcagaacttgaggatgtcgacgaggaattcaatgatgtgaaggagagggatgatattctcatagataaactcgatgctattgaaaagaagattgaggggaagctagaactgttggatcataccttcggtaagaaaggcagagctttggaggaggaaatcaaggatttggtggaggaacgcaattccctgtccgagaagagcaggagacctatgtacagaaaaggttttgatgtgaaagttatcgatgttaacaggacatgcaaagtcacaaaggttatcgttctttgtttgagtgacttcaactgataattagtcttttcgccaactctgttgcctaattttacatcttgtttatcagggaggccaaatagcaaaattcacagcgctattggccactggaaattacaatggtgttgttggcttcgctaaggctaaaggcccaacagccaagattgcaatacagagagcgtatgagaaatgcttccagaatctccactacatggagcgatacgaggatcacacaatcgctcatgctatccaggccaaatatgagaaaacaaagatatatctctggcctgggccaatgaggagtggaatgtctgctgctggtaggactgttgagactgtgctgtacttggctggtttcagcaatgtcaagacaaaggtgtgattcttgagtcccagctatcactatcagtcctttttcaaaattgtgatttcctttctatttttttcttctgcagattatcggatcaaggaacccacttaatgtgattaaagctctcttcatagctttgaatgctattgaaaccccgaaggatgtccaacagaagtttgggcgtactgtcgtcgagtcatatttattgtgatcatcatgattgtttggaggacacagaggcgagcggagcctgtataggttttgccatgagaagaccaaagaggcaaatgccaggtccaaccaacgtgagccctctttgttttggacttttggtggtgatgttgaccagaccattgatgttgaagtggcaagaatgtcagtgtcaacagtaatcggataaatagatggtatttccctgaccctttgtttgtagaacttgaatgaacctggggacagaaacacatttgagggttcttgtataaatcaaggtcaagatcagaattgcctcgtcgtgcctttgttttgttaccatagcttcttctccctacatactgttgtttggatgataaatttaattgaatattaatttctcctg

SEQ ID NO: 130982 - DNA, 720 bp, Zea Mays
ggctttgatcaaaacaaggcatgtatctcagttcatatgtcttgcctaccaatcagcaccttcacatatgggaatttgaacacacgggaaatttggaaatgtgaagcatctttgtatttgcatggatctgatatatgcctgcacacatttggatcttttcatttgtgtgcacttagaccaactccagcagtttatttatatccatacccatatggggtgggatgggtagattgactttccatagaattatgggtaacccaacgcgtcgtccagcagtttacccaaacggatacccatatgctggccgctatacatatatgttctaaccttctccctgccacttgatgtaggctgctgctggtcgtggcggtggtcctgttggacgaggtggtgcaccccctgtgaggaggtagatctgtcgcgctatgtggcaaatcaagcttttgccctagttgcaaaaactttgcttgagcagcgatgctatatggttgttaagggtagcttatcagcagcagttcatgtttacagcatagatgcaggactttgtgtaactttgcacgagaagactgtggacagtttcgacgatgctatattgctattgagggtctgatttggataatactccctccgtcccaaaatattccaaaatatgctcttgatttttatgtctatgtttaaataaacgataatgaatctagacacacatataaaataaataca

SEQ ID NO: 130983 - DNA, 1642 bp, Zea Mays
cttcctctgtttggaacttatcttttgatctgattactacagggccattgaaggaccacatttatttgcatcaaaaccatctgccgcctgaggtactcaaagaaaggctccctggtatttctgaaactgctgctatttttgctggtgttgacgtcaccaaggagcccattccagttttgcctactgtgcactacaatatgggtggtatcccaacgaactaccataaggaggtagtggatatcaagggtgataatccagatgctgttatccctggtctaatggctgctggtgaagtagcctgtgcagcaccgcgttggtggatgatcgatcgtccagttgtatgtgactaaaacgccatgccttgtgcattagagaagatacagaatcgccatgccctgtataggacagtgagccaaattcttgttcattttgcactatgatacagattgattcattaggccctaggttagaggttgtgactgatgagttgggaagagattacttgattggtggtgtacaattcttggacaggatacaggtttcagtttttggtccattagttcaggaattgtttcatttacatgtatattcagtacactcgtataatggaaacaggtaaatctctatctcattctttgattatcgtgttattatacggttccgttgcaacgcacgggcactcacctagtaatctataagctgaaacagtcgtgcccttaatcgagtgggctgaaactccaacaatagagaatcggtccagcccaagactaaacaaagcaaacttgagttgtttggaggcggagggagcagagaaatcccccaaccaaaccaaaccctcgccgtgccgccgcctccgactcctgctccgtccgagcctaccaccacagggcaagggcttcatccagccgcgtgcgagcctgaccgcccagttagacgatgagccgcagcctcggtatcccggtgaagctgctgcatgaggcggcgggccacgtcgtcacggtcgagctcaagaccggcgaggtctaccgcggctccatggtcgagtgcgaggacaactggaactgccagctcgaaaacatcaccttcacggcaaaggacggcaaggtgtcgcagctggagcacgtcttcatcagggggagcagggtcaggttcatgattatacccgacatgctcaagaacgccccaatgttcaagcgccttgaggccaggattaggggtaaaggctcagctgttggtgtcggccgaggccgcgcggtcgccatgcgggctagggctgctgctggtcgtggcggtggtcctgttggacgaggtggtgcaccccctgtgaggaggtagatctgtcgcgctatgtggcaaatcaagcttttgccctagttgcaaaaactttgcttgagcagcgatgctatatggttgttaagggtagcttatcagcagcagttcatgtttacagcatagatgcaggactttgtgtaactttgcacgagaagactgtggacagtttcgacgatgctatattgctattgagggtctgatttggataatactccctccgtcccaaaatattccaaaatatgctcttgatttttatgtctatgtttaaataaacgataatgaatctagacacacatataaaataaataca

SEQ ID NO: 130984 - DNA, 1570 bp, Zea Mays
cttcctctgtttggaacttatcttttgatctgattactacagggccattgaaggaccacatttatttgcatcaaaaccatctgccgcctgaggtactcaaagaaaggctccctggtatttctgaaactgctgctatttttgctggtgttgacgtcaccaaggagcccattccagttttgcctactgtgcactacaatatgggtggtatcccaacgaactaccataaggaggtagtggatatcaagggtgataatccagatgctgttatccctggtctaatggctgctggtgaagtagcctgtgcagcaccgcgttggtggatgatcgatcgtccagttgtatgtgactaaaacgccatgccttgtgcattagagaagatacagaatcgccatgccctgtataggacagtgagccaaattcttgttcattttgcactatgatacagattgattcattaggccctaggttagaggttgtgactgatgagttgggaagagattacttgattggtggtgtacaattcttggacaggatacaggtttcagtttttggtccattagttcaggaattgtttcatttacatgtatattcagtacactcgtataatggaaacaggtaaatctctatctcattctttgattatcgtgttattatacggttccgttgcaacgcacgggcactcacctagtaatctataagctgaaacagtcgtgcccttaatcgagtgggctgaaactccaacaatagagaatcggtccagcccaagactaaacaaagcaaacttgagttgtttggaggcggagggagcagagaaatcccccaaccaaaccaaaccctcgccgtgccgccgcctccgactcctgctccgtccgagcctaccaccacagggcaagggcttcatccagccgcgtgcgagcctgaccgcccagttagacgatgagccgcagcctcggtatcccggtgaagctgctgcatgaggcggcgggccacgtcgtcacggtcgagctcaagaccggcgaggtctaccgcggctccatggtcgagtgcgaggacaactggaactgccagctcgaaaacatcaccttcacggcaaaggacggcaaggtgtcgcagctggagcacgtcttcatcagggggagcagggtcaggttcatgattatacccgacatgctcaagaacgccccaatgttcaagcgccttgaggccaggattaggggtaaaggctcagctgttggtgtcggccgaggccgcgcggtcgccatgcgggctagggtaatcagctcttgctttctttccacaagcaccacttgttaatcttgaaggattttattcattcagtgaatccataaattttggatttacaagattcttagctcctgtgaataaatcttcaactgctttgtagatgtagtacgtgatgctggatgcagtccagcacatgcaacattatccaaattctagttctgggcatgcttttactaaagtcacagaacatcgtagagcaattcttcatatccaggcatgcctttgacagtgttgttcaatccctgttgccgcaattctcacacgt

SEQ ID NO: 130985 - DNA, 311 bp, Zea Mays
atgacgcaggagatgactctggaggaatatgaaaagggctctgacaaggacttgaaaaagaaagaaagtgctgaaagagaagaacggggcaacaagggctctgacaaggacttgaaaaagaaagaaagtgctgaaagagaagaacagggcaagaaggtatatatctgatatttttcacctgcttcagtctgatataatcagagtcactgttgtttccctgaccgtcatgtctgttttatgttttccttcctctctcaagtccctgtgcattttgcagaagatacttctaggtttaatactataaattaaat

SEQ ID NO: 130986 - DNA, 1216 bp, Zea Mays
acgcatgctagctgcaacaatgtactatcacaataagacgaagatgccaccaccaccttgctcttgcttctctgctgtctctgttcccttctcctccttcaaaaccataacaatgctcctcctcctcctcctcatccttcagcaactgtctgcggctgcggttgcagggatggccaccaccaagcttgggttgtctgacgtggtaaccgacacctgcgacagatgcagcaagagcaatccacaggtgaactacaccctctgcgtctcgtctctgtcgtcggaccccgagagcaggcaggcggacctccacggtctcgccatcatctcggccaagctgctgaggtcaggcgcggtggccatggaggccaagatggcggacctcagcaggaaggagcgcccatggtccccccggaggtcctgcctggacgcctgcgtcggggtgtaccgcaactccctctacgacctcggcagctccatcgtagccatccaggagaggaggtacgcggacgccaagacgtccatgagcgccgcggtggatgcgcccgtcacctgcgaggatgagttcaaggagcagggcttggagccacccatgagagcggagaccaaacgcctgtttcaacaggcggtcatctccctcgcaatcatctccctgctatgactatgggtgtgtttggtttggcttttggctttggcttttgccccctaaaagccaaaagccaaccaaagggctggatccaggaagcagctttttctaaaagccgactttctcgtagtgcaaaactgaaagcacccctagacctgcttttagtggcttttggatggtactgtgaaaacatatatcgaagaacttttaacgacttttagtggtttccaccaaacgatttttagcttttaaacagcacacagcctacagcagctttttccacagctcacagcccacagcaactttttccacagccacagcccaaccaaacagaccctatgactatatatattattgcttcttcgatcgatctcttctcttatgttgatgtcgtgagttatctctagatatatatatgtctcatatgctatgcatgatgtttgatcttatcaagttacaatccgaatgagtataaattattactacagagaacataaccgagatgtcatgtaccatatcccttcataatacatgtgggctaatccaccagctgtcagatgtttagtttctata

SEQ ID NO: 130987 - DNA, 938 bp, Zea Mays
atgctagctgcaacaatgtactatcacaataagacgaagatgccaccaccaccttgctcttgcttctctgctgtctctgttcccttctcctccttcaaaaccataacaatgctcctcctcctcctcctcatccttcagcaactgtctgcggctgcggttgcagggatggccacaggtgaactacaccctctgcgtctcgtctctgtcgtcggaccccgagagcaggcaggcggacctccacggtctcgccatcatctcggccaagctgctgaggtcaggcgcggtggccatggaggccaagatggcggacctcagcaggaaggagcgcccatggtccccccggaggtcctgcctggacgcctgcgtcggggtgtaccgcaactccctctacgacctcggcagctccatcgtagccatccaggagaggaggtacgcggacgccaagacgtccatgagcgccgcggtggatgcgcccgtcacctgcgaggatgagttcaaggagcagggcttggagccacccatgagagcggagaccaaacgcctgtttcaacaggcggtcatctccctcgcaatcatctccctgctatgactatgggtgtgtttggtttggcttttggctttggcttttgccccctaaaagccaaaagccaaccaaagggctggatccaggaagcagctttttctaaaagccgactttctcgtagtgcaaaactgaaagcacccctagacctgcttttagtggcttttggatggtactgtgaaaacatatatcgaagaacttttaacgacttttagtggtttccaccaaacgatttttagcttttaaacagcacacagcctacagcagctttttccacagctcacagcccacagcaactttttccacagccacagcccaaccaaacagaccctatgactatatatattattgcttcttc

SEQ ID NO: 130988 - DNA, 401 bp, Zea Mays
atgctagctgcaacaatgtactatcacaataagacgaagatgccaccaccaccttgctcttgcttctctgctgtctctgttcccttctcctccttcaaaaccataacaatgctcctcctcctcctcctcatccttcagcaactgtctgcggctgcggttgcagggatggccaccaccaagcttgggttgtctgacgtggtaaccgacacctgcgacagatgcagcaagagcaatccacaggtgaactacaccctctgcgtctcgtctctgtcgtcggggtgtaccgcaactccctctacgacctcggcagctccatcgtagccatccaggagaggaggtacgcggacgccaagacgtccatgagcgccgcggtggatgcgcccgtcacctgcgaggatgag

SEQ ID NO: 130989 - DNA, 1277 bp, Zea Mays
aggttgttcgttcgttcgacaccattaattatattctctctctctctctctctctttcatttctatagccagcaggtagcaggcaggcaaccggccggtatattagtagatcttcgatcgttcatccaagctaataagtcagtaagcagcagtaggtcgaaaatggcgatgaggtcgctagcgctactggtcctcctcagcctgctggttgttggtgtggcgcaggcggtggagttggagatggagttggtgcctgctgatgcaattgcgatgactatggatcgtgagccgccgcaggagtgcgcgaccccggtgagcgtggaggaggcgtgccgcagcgcgtcggagacgcacgccggcgtggcctacgaccactgcatggcgtcgctgggcgccgacccgcgcagcaaggaggccggcaacaagaacatgcacgcgctggcggtgctggccaccaggatggccatcgaccacgccgccagcaccgagtccaagatcgacgacctcgcggagctggaggcggcgtcgtcggatccgcaggcgcgcgcacgcttcaaccactgcctggagcagtacggcggcgccgccgacctcctccgcgacgcgctggacaacctcaaggccaagatctacggcaaggccatggagcagctgaccgcggcgatgggcgcctccgagagctgcgaggacgcgtggaagggcgaggaggatgtccccgtcgccgcgcacgacagggagtacgggcggatggcgcacatcgccttcggattcacacaccacgccgccgccgccgcatgaatcatcatgtcatatgcatgcatcgcttctcttccttgtcgcattaattttcatgcgtccaatgattcatatctctatatgcatatctctctgctctgccttgttggctggctcttctcatcattccctagcagatcgcatagtattagttgcatgcattatattgatgatgcaggtatttcgtcgagcaacaaggcgtactatcaattgtttttgtaatacccaaaattagtgaataaagggaaactggttataaaattttatgagatgtgttctcttatttatttaccatatacacattctcatatgtttaagtgattaacttaattaacaaatgataagccaaataaaatttgtgtatctcatgctagattttttgttgtgcacttacggtatactgggcaaactcaacttaggttttaaaataaattgaaaccatattttaaatttgaaaagaaaaatagaaaataaaataaaaa

SEQ ID NO: 130990 - DNA, 378 bp, Zea Mays
gatgaggttgcggtaggcgaggaggacgaagggctccatccccacgttcagcgccagcttggagaggagcacggcgaccatggtgaagacctgcaccagcaccatgctcgccggcagcgtcaccgcctccatcgaccatgcgccgcctgtcgtcctgcttgccatatatactagctgagcgacgatcgatgacgagctccacgccggggagtcggacgatcctcactgttcctgctgatctcatgtgtcagctcccccctgcactactacacatgcatggatgcaaattctcgatgcatgcatgcttcaataatgacagctatatagcaccactactagtgtacttgcgtaagcgcatggcaatctagctacttatta

SEQ ID NO: 130991 - DNA, 3077 bp, Zea Mays
atggaggcgcgcggcggcgcggggacagggaggcacgcgacggcacggggacagggaggcgctcgacggcggtggggaagagggtggcgctcggcggtggtgggggagagggtggcactcggcggcggtgggggagagggtggcgcggggatagggaggtgcgcggcggcggggggcaggaatgcgcgcatacaggaggccgaggcgtgctcgaggtgttattgcagatatttgggtagaattatacagcagttgcaatcacacctaatgcgagggacatggaggcgtgcggcggcgcggggacagggaggcacgcgacggcgcggggacagggaggcgctcgacagcggtggggaagagggtggcgctcggcggcggtgggggagagggtggcactcggcggcggtgggggagagggtggcgcggggacagggaggcgcgcggcggcggggggcaggaatgcgcgcatacaggaggccgaggcgtgctcgaggtgttattgcagagaatgcacccaggccgaacctacgcgccagatatttgggtaaaattatacagcagttgcaatcacacctaatgcgagggacatggaggcgcgcgacggcgcggggacagggaggcacgcgacgacgcggggacagggaggcgctcgacggcggtggggaagagggtggcgctcggcggtggtgggggagagggtggcactcggcggcggtgggggagagggtggcgcggggacagggaggcgcgcggcggcggggggcaggaatgcgcgcatacaggaggccgaggcgtgctcgaggtgttattgcaggattctgccaaatctcatatacttattcctgttcacccacggcacaacaatcatcaattcatgcaggagggcaatccttcttgatcaacatggggaataatgtacaagaatacatgagggaaaaccaagcttcacatcaagccataagcactcaacatattaattaaaaagcatatatgttcacagtgttaactgacagtacacaaataacctttggcaaagaaaaaacaacaacaaaacaggatggatgttctgtccatttctctttcggaaaccacaagactatattatatatatattgcaggcaatgcagccaaacacatcttcttttttatatatacaatacaattctttgacaagtgtaaatgtttatatccccctgtaaaggttgagcctgctggtgccaccaagcatccggttaaccacggtcgcagcagcatcggccccatggcttggagaggtgacctctggcgactcttccctgatctgcaacgatgacacagcctgagcggctatgaagccagggcaggtaacagactgacggaacgttccttggtagtacgggccttggaggtcactcacttctccccagcatggcagtgcctgtccaatcccccaatcagcccgcctccccttgggggctctgggagcatacgcatggctgccgcataccagtccatcctcagacgggtacacctcggcgggctgtgcgtccacggtgaattcaaaagcagccgagggggcccaatggttgcaccttatatggtgcttgttcagcatcaaatggcagggttcatcggagtcctcgcctatgaggacatgaagagcgactgcttctgctatggcagcaccttcctcgtccagcctttgctgttcttccttcttctgctgcttcttcttttccagctccgagattatggcagccgagtttgccagcgctttctcaagtcggcgccgcttcttctccgcctgcttctggcggtccagctcgtccttggcctgcttcttttttcctttcttcaacactttgcctgcctgattgctgctcatggtagccctgtccatgacagccgtgcctgctgctattcactattacctctggtagacctgactcctctactcactactaggtataattagggaagaaagaaaacaaaatgttcaaacttcattctttggcctcattggtttgtctaacttttttttattttaataacgaggaagaaaaggaaaggaactgttgctaagatgggtgggtgagtgcaggatgctgctacacccactcaggtctgaatgagtatcttatcttgcggaagatgcagtcccagaaggaaaccacgggggagagcaagagcaagaaatggtaagcgcctgctatttcatctatgcttagtcttgtcccagacttgttgctgagcaggccctggcccatcttagtagcaccagaattggagtaaagccccagccaaccagctcataaggctccttcactgtggcaagagaggagataattaagttgagaaggggggcagcagcaggtgaagggaaatgaagcaggggatgaatatatagaagaacaaattaatgaaacgactttgacataatgaattgatgtacattattagttagataactataacaggcaaggtactagccactccgagactatgctgttgggttgggaatcaagacaattgcgccatccaagtatctagatacctatctagtgaatgaaatacgtacagaagtaaaactagacggcagccctatgaaaaaaagctaaaatctacacatagaagtgagatgacaaagtagtataccaatcgaacatgagatgattttgatccacaggttccgttagcaagagatggatatacgtacagagaacaattaaatccatgtttccatgcataggtaggaggaaaaccttgatatactagcaaccaattaaagacggaagaccctcaaaattatggcacggctgtcccagacggaacaagcaactgacagaaattcgcatcattcagggtcaatatattctttcccaattggccggcccagcatgaaattgagaacatatcgaattggggcggggatggaagccacaagtggcagatccgatccagcggaataggaacaggaggcggggcgaaatcagtacctgcttgaaggcctgggagggatgtgggatcggcgggcgggcgggcggggagacggcggagaggaaagggatctggggtcggcgtcgtcgatccggatcagg

SEQ ID NO: 130992 - DNA, 2500 bp, Zea Mays
cccttgctcactcaccagtcacccacacgcacactcctgcagtttgaaatccctattgtattgtttgaggtaaaaagccaagcattgccccaacagcaacatgtaacaagccaagcttcaccatcgccatcagctacccaagtgggagtgcagattgagtggcctgtgactacagtactggcatcacttcgcttccactcctgtccagcccgcccgcccgccatgcagtccggctacggcggcgtgtctgagttccagcagttcatcatggacggcggcttcgccatgtccgcgcctccgcagcagcagcagccgcccgccaccgcccaggagatgggtgggcccttcaggtaccagccgctgcaccaccacgcgctgccgccaccgcaccaccaccaccacgcgcagcacatgccgccgcacttcgcccacttcggcgccgcgccgccgccgccgcccttcacgcagcagctgctgcaccaggcggccgccggggggcaccaccacctccagctcttccacgagcagcagcaccaccacaagccccagccgccggcgagatgggcaccgcacccgcatcaccaccaccaccaccaccatctcggattcgacgtcgaggccgccgtgccggagagctcgggggcggcgggcggcgggagcgccggggcctcggccggcgccgcgccttcgggcgtgcccccgttcctggcagccgccatgaacttcaagctggcggtcgacgccggcggcggcagcggcgccacggaaggcaccgacgacggcggtggcgccgcgggcagcggcatgatgcttcacgttggcagcggtgggggcggcggcgacgaggccgccactgagagccgcctccgtcgttggaccggcgacgaggagacctccatcaaagaacccacctggcggcctctggacatcgactacttgcagagctcaagcagcagcaagaggacggggaaggagaaggtggccacgccggctgcccccgccaattacttcaagaaaggcgacgctgcggccgcgggcggcggcaactacaagctgttcagcgagctggaggccatctacaagccggggagcggtggcgcccagacgggctccggctcctgcctcaccggggacgacaatgccatcctcgagccggccgtggccgacctcccggccgtgggcccgcagcagctcaacacgtcggagacgtcggccggggaggaggcggccgcggtggtgcagccgcagcaacagccccaggcgtcggcggacgcggcgcggcgcaagcggaagcggcggcggcaggagcagctgagcgcgtcggcgtccttcttcgagcggctggtgcagcggctgatggagcaccaggagagcctccaccgtgggttcctggaggccatggagcggcgcgagcgggagcgcgccgcgcgcgacgaggcgtggcggcggcaggaggccgacaagttcgcccgcgaggccggcgcgcgcgcgcaggaccgcgccagcgccgcggcgcgggaggccgcaatcatcgcctacctggagaagatctcgggcgagtccatcacgctgccggccccgcccgccgccgcggcgtccggcgacgacgccacggcggccggcaaggagctggtgccgtacgacggcggggacgcgacagcggccgagggtggcggcgggtcgctgcacctcagcagcacgtcgcggtggcccaagcacgaggtggaggcgctgatccgggtgcggacgggacttgaggggcggttccaggagctcgggctcaagggcccgctgtgggaggaggtgagcgcgcgcatggcggcggcgggctacggccgcaacgccaagcgatgcaaggaaaagtgggagaacatcaacaagtacttccgcaaggccaaggagagcggcaagaagcggccggcgcacgccaagacgtgcccctacttcgacgagctggaccggctctactcccggtcggccgacggcgggggaggcgaggccaggcagctggggagctcagagctgctggacgcggtgatcaagtaccccgacgtgcgctacgggccgccggtgttcggtggcggcaatgctaataatgaaggtggagaggacgacgacagcgacggggaggaggaggaggaggaggaggaggacggcattggcaaggggagggccggggatgatcaggacgacgaggtggacaacgatgatgagtagctagctaacagtacccccacccctcgctcgcatgcatgtttgttgaacaaatttgcttagcaatctgtttaattttctttcttgcttgttactaaatcactgctagctagtagtggtaggtgttatcgctagtgcatttcaacacttgttattattttagctagcactccactgcttctgcttctagctctgctgttattattatgttgtatactatcataagatactgctaatctaatgaacaaattaagtaagtaatggtatgatatatgtagaatgaata

SEQ ID NO: 130993 - DNA, 1783 bp, Zea Mays
gaaagctcaatccatcgcctgttgggcattgtgatactcttgataccaccgtgtagtatagctctcacaacaataacgatttggtgagatacatgaaaaagaaagccacagcccaaatactcgtagtaagcagcttaatgcagctagaaagcacacattgtagcggtttgtttttattgaacacgggtaccggatgctgctgctaggttgtggaaattgatgcaataattaattaatgaagagagacggtgatgtgatcatcagaggccgaggagctggcagttctcccagatggtcttggcggagcggcgcagtcgtttggcctcctcctcggtgagctccatctcggcgacgccctggacgccggcgcggccgagcctggcgggcaggctgaggaagacgtcgttcccgtcggggatgccgtggaaccccctggcgaggacggagaccgggtggatgcggcgctggtcccggagcagcgacgcggcgaggctggcgacggagtagccgatggcccaggaggtgtagcccttgaggctgatgacctcgtaggcgctgtcgacgacggcgcggcggatgccctccagcgcctcctcgtcgaagcagcggtggctctcctgcagcgacttgagcaccggcatccccgccacgctcacgctcgaccacaccgccaccgagctgtcgccgtgctcgccgaccatgtacgcctgcaaaacaaattgattgattcatagacatgttgtatgctcagttctaccaagatttaaatcagatcaaatcttcttccttcttctttttttaccaagtttatgctctcggttttaccgagtttaaaatcagctcaaatctttttaccaagtttatgctcagttttaccctacatttaaaatatgaaatcttttggagacgctcttagcaaccagaggagtggtcacagtccaacgggaactgatgcctctggcagatgtgggccaatggcagatgtcattactcctcacgaacctgtacgtcctgggcgttgacgtcgaggtgctcggcgagaaggaacctgaacctggacgagtcgaggttggtgccggatccgatgacgcggctggccgggaagcccgaaagcttccaggcgacgtaggtgagcacgtccacggggttggacacgacgagcagcagcgcgtcgtgggactgctccgccagcggcggcacgatcttgcggaacagcgccacgttccgctggagcaggtcgagcctcgtctcgccctggatctgccgcgccccggccgtcacgatgaccaggtccgagcccctggtcacggacatgtcggtgccggacacgaggcgcgtgcgcggcaggaacgccgccgcgtgctgcaggtccagcatctccccgcggagcttgtccgggaccgcgtccaccagcgcgatctcgtcggccaggtcgcgcgtgaggatggtctgcgcgatggccatccccacgttgcccgcgccgatgaccgacaccttggtcagcctccgccggtggtgctgcgacgtcggcgtcgacgagtcgccggacacagggcggaagaagcccgacgacgcgtcgccggcgtcgaagcccagctcggagagcgaagtggccttcttcatcttcttcttcccaccggtggtgctgctgttgcgggcggaatgggatgggattacgtgtgtgatatgatctggttgggtcaaatctccgcggatcggatttctctgtggaggaaggaaggaatggcaatgggcaatggctactcgactcgtgggaggggaa

SEQ ID NO: 130994 - DNA, 1066 bp, Zea Mays
gagtccgaggagctgtgtgttctcccatagcgtcttggcggagcggcggagcctcctggcctcctcctcggtgagctccatgtcggcgacgccgaggatgccggcgcggcctagcctggcgggcaggctgaggaacacctcttggtcgtcggggatgccgtggaatcccgcggcgaggacggagaccgggtggatgcgtcgctggtcgcggaggagcgaggacacgaggttggcgacggagtagccgatggcccaggacgtgtagcccttgaggccgatgacctcgtaggcgctgtcgacgacagcgcggcggatgccctcgagcgcctcctcgccgaagctgctgtggctgtcccgcagcgtcttgagcacgggcatcccggcgacgctgacggtcgaccacacggccacggagctgtccccgtgctcgcccaccatgtacgcctgcacgtcctgtgcgttggcgccgaggtgctcggcgaggaggaacctgaacctggacgagtcgaggttggtgccggagccgatgacgcgggtggcggggaagcccgacagcttccaggcgacgtgggtgagcacgtccacggggttggacacgacgagcagcagcgcgtcgggggactgctccgccagcggcggcacgatcttgcggaacagcgccacgttccgctggagcaggtccagcctggtctcgcccgggatctggcgcgccccggccgtgacgatggccaggtcggagcccctggtgacggacatgtcggtgccggacacgaggcgcgtgcgcggcaggaacgccgccgcgtgctgcaggtccagcatctccccgcggagcttgtccgggagcgcgtccaccagcgcgatctcgtcggcgaggtcgcgcgtgaggatggtctgcgcgatggccatccccacgttgcccgcgccgatcaccgacaccttggtgagcctgcggcggtggtgcggcgacgtcggcgtgacgccgccgtcggtcactgggcggaagaagccagaggaggcgccgttggcgtcgaagcccagctcggagagtgatgaggccttcttcatc

SEQ ID NO: 130995 - DNA, 831 bp, Zea Mays
tataccagaaactctcagcaatttaatcccagaaactcttagaaatttaacagtgctttctagatttgttctggatgcccaatggcctcagtggagataataccttggagtctaagcaactgtcctcttcaaaacttgaacctttcacgcaatagactcactggtccaatacccaaagagcttttttttagcatctacattatctggtttcctgctcttgggctgaagcaaaaacttggcagaaatccgggagacaggacctgaagcaagagcttggcgtccatgtcatgtatgttgacggctcaaactcaacaagaaaggtcatgtattattgtacgtcactggattgatcagccaggttgagcaaattcatccaaaacctcttctctggcctgcaggctcctgccagcacgtccttcagcctccccatggaggcaaaatgcaacctctcttccagcttccccttcacatccgggacttgctttgttatccacataatgtagagcgctgaaagctctgcttggacacgcgactcctcaaactcatccacaggatcatgcaggcactctgacagcagttgtatctcctggatgacaaacatatccatctgggatgtcgttgcgggccagtttccttcaacagtgagcaagtgttgtatccacaagtgtgaaaggaaccgacggtggttccataacgactgcagcaatacatcaccacagctagtataaacaaaacacacacccgccaacaagaactacaagtggaagaacaacaacaggctaattttcaaacctctctcccctggtagcgtttgatcagcatctcatccca

SEQ ID NO: 130996 - DNA, 826 bp, Zea Mays
gtcagtagtagcctggcggccatggcgatggcgcctcaggggcaggccgagcacggccaagtccacgtccacgaccatcagcttggccaccggcccgagcccaacagcaggcaccccgaccccggcgcggccgccacgagcagcatcgccaccaaccggtggggggccctactccggcgccggcgattttgccagcaacatggccgtcatcctggccgccctgctgaccgcgctggcgctcgccctggcgctcaacgccgccgtgcgctacctcctcagtcgcagccgccgagctcggcgcggtcgcgccggctccagctccggggagagggacagggacagcgacgccaacatctccgacccggagaagctggccgtggaggcgcccccgcccccgcccccgccagccctggtttactccgcggccgggaccaagctggcgggcgccgcggcggagtgtgccatctgcctggccgagttcgcagacggggacaccgtgcgcgtcatgccggtctgcggccacggcttccacgcgcgatgcatcgagctctggctcgcggggggacgccgctcctcctgcccgacgtgccgcgcaccggccggagctgccgcggccacgccatcgtcgtcgtgaataatggctcggtttggccatggccagttgcgacgatgttcactgttcttggcacaggcgcacagctagcatgtgtcggttcggtgttccttcattttcagtttgcgtgttgtagtggatcattctatatattctaaaataatgtgtcaatatatctatatactcttgtttaatctgttcagggttgccatt

SEQ ID NO: 130997 - DNA, 1263 bp, Zea Mays
gtgttacgttgtgggcggctgctggcttctgacagcagcgagagcgagagcgagaggccggccggggggcgcgcgccatggacgtggccgtggcgctctccttgctcttctgctgcgtcctcctgctggcctccggcgccatcgccttcctcctcatccgccacttcctggcctccggcgccgaggcgcgagcagcagcgccacgccatcgtcagccaccgccagcggccaaccagcagcagcagcgagcagcgtcaatagccgtcaagaaggaggaggaggaggcgccgcggcggctggcgtggcgggaggtggaggcgctgacaggcgggttcgacgagtccgccgtggtgggccgcggcggctccagcgcagtctacctcgccaggctccttgacggctcgcccgtcgccgtcaaggtgcaccgctggtgcggcggcgagcgccggctgcgcgccttccggcaggagctggacctgctccgccgcctccgacaccccaacatcgtcgcgctcctcgcctactccgacgaccacgaggaagaaggcgcgctggtgctggagtacctcgccggcggcacgctggcggacgcgctccacggcacctccaccgccgtggtgcacggcgacgtgtcggcgtccaacgtgctcctcttcgacggcggcgcgcggctctgcgacctgggctccgcctgcgagggcttctcggcggccgtggcgccggcgcgcgccgccgtgggatcgccgggctacgccgaccccttcttcctccgcacgggcatcgtgtccaccaagtccgacgtgtacggcttcggcgtactgctgctcgaggccgtcaccggcctgccgccggcgtccgaggcccagaacctgacggcgcggatcctgccgcgggtcagggagcgcggggtggcggggctcgtcgacggcaggctcggggacggcgggctcgacgaggaggaggccgccagcgtggccgagctcgccgtggagtgcctggccgcgcagcccgggctccggccgtcgatggcgcaggtgcgcgccgccatcgcggagaaagcggcgaggtccatcgccaaggcgggttacggccaccatatccagctcagcaagctgctggagctcacatgattccttgcattgtccttgatgtttattagttaggggtacaaaatttaggattgtaagaaaaatggattagtcccgagacactatcctttgcattgtaccatgacctcaaaccatcaagacactatcgcccctc

SEQ ID NO: 130998 - DNA, 1276 bp, Zea Mays
atcaagctcggccttgtaacttgccaccacttttccttccggttccgtgttacgttgtgggcggctgctggcttctgacagcagcgagagcgagagcgagaggccggccggggggcgcgcgccatggacgtggccgtggcgctctccttgctcttctgctgcgtcctcctgctggcctccggcgccatcgccttcctcctcatccgccacttcctggcctccggcgccgaggcgcgagcagcagcgccacgccatcgtcagccaccgccagcggccaaccagcagcagcagcgagcagcgtcaatagccgtcaagaaggaggaggaggaggcgccgcggcggctggcgtggcgggaggtggaggcgctgacaggcgggttcgacgagtccgccgtggtgggccgcggcggctccagcgcagtctacctcgccaggctccttgacggctcgcccgtcgccgtcaaggtgcaccgctggtgcggcggcgagcgccggctgcgcgccttccggcaggagctggacctgctccgccgcctccgacaccccaacatcgtcgcgctcctcgcctactccgacgaccacgaggaagaaggcgcgctggtgctggagtacctcgccggcggcacgctggcggacgcgctccacggcacggcggccgccccgctgccgtgggcgcagcgcatgcgcgccctccacgacgtggcgtgcgcgttggagcacctgcactgcggcggcggcggcggcacctccaccgccgtggtgcacggcgacgtgtcggcgtccaacgtgctcctcttcgacggcggcgcgcggctctgcgacctgggctccgcctgcgagggcttctcggcggccgtggcgccggcgcgcgccgccgtgggatcgccgggctacgccgaccccttcttcctccgcacgggcatcgtgtccaccaagtccgacgtgtacggcttcggcgtactgctgctcgaggccgtcaccggcctgccgccggcgtccgaggcccagaacctgacggcgcggatcctgccgcgggtcagggagcgcggggtggcggggctcgtcgacggcaggctcggggacggcgggctcgacgaggaggaggccgccagcgtggccgagctcgccgtggagtgcctggccgcgcagcccgggctccggccgtcgatggcgcaggtgcgcgccgccatcgcggagaaagcggcgaggtccatcgccaaggcgggttacggccaccatatccagctcagcaagctgctggagctcacatgattcc

SEQ ID NO: 130999 - DNA, 1913 bp, Zea Mays
aattccttatggaagctgaagaagtagcgtggatttgtcatctcgcgctgccacgtttgactttggacttgctgccacgtttggtagttgctacttgctacaccggaggaagaagaacaagtagtgcttttcttctcttgtcacgttcacggggcggccgatcgaccgttcacctcgcccgacggcccaagcagcccatgtcttcgtcgggcccctccccggcgacgggaatccacgcgtcgccgccgttgggccttttgccggcgacgggaacccatcacaccaggtcatggggcaaaacaacctccacaagttttactggttctaccaccaaacatgagcagagcttgcatggaaatgttaagccgttgcaattggcggcaaatgaatcctctcgtttggcttacagaagtccagcacttaaaaaccagtggaatcttcctgctagttcttcctccactaatgtggttaccacctttgatgataacgaacacgtgtcttccagtgttattgaagaaaaagttggagtactgttattaaaccttggtggtccagagacacttgacgatgttcaaccatttttattcaacctatttgctgatccagatatcattcgactccctaggctcttcaggtttcttcaaagaccactggccaaacttatttctacttttagagctcctaagagtaaagaagggtatgcttcaattggtggtgggtcgccgttaaggaaaattactgatgaacaggcgaatgctttgaagattgccctggaaaagaaaaaattgaacgcaaacatatatgttgggatgcggtattggtaccctttcacagaagaggccattgatcaaattaaaaaggataagattaccaagctcgttgttcttcccctttaccctcagtactccatatcaacaagtgggtcaagcattcgtgttctccaagacattgtcaaggaagattcatatttttctggtttgccaatttccattattgaatcatggtaccaacgagatggctatgtgaaatcaatgtctgacctaattgaaaaggagctctccgccttctccaatcctgaagaggttatgatattcttcagtgcacatggtgtgccacttacctatgttgaggatgctggagatccttacagagatcagatggaggattgtattgctttgatcatgggggagttaagatcaagaggaatcttaaatagtcacactttggcgtaccagagtcgggtggggccagttcaatggctgaagccatatactgatgaagttttagtagaacttggtcaaaagggtgtgaagagcctcctggctgttccagtaagctttgtgagtgagcacatcgagacattggaagaaattgacatggagtacaaggagttggctctggaatcaggcatcaagaactggggtcgggttcctgctcttggatgcacttcaacattcatctccgaccttgcagatgctgtcgtcgaagccctgccctctgcttcagcgctcgcgaccagaaagcctgacgacatcgattccagcatggacctgacgcattacctcaccaagatgctgtttggctcaatcttggcatttgtcctgctgctatcaccaaggctagtttccgccttccggagcaccatgctttaagtttttctccaaagcactaaatttgagattgagaatgagatatttcattttggacctttttttcctccttaatagaatgatgtgcagttcttctgctcgttccagagaaaaaaataactgctaggaactcacaaggtagtaggggattgcaaaagggatgtgaacagctgttttgatcgaagttgtctataaataccgtgctcacggactctgtattttaatggtttcttgtgctcgactaattttgttgttcttgtccaa

SEQ ID NO: 131000 - DNA, 960 bp, Zea Mays
ggacggctgccaccgcggcccggatgtttccctgccaccataaatgcgccgcggccgtcctcgctgcccaacccttcgctgcgccgccgcctccgacatcgtctcttcgtccccacgagcaaccgataatccgccggcgctgagatgttggtttatcaagacctcctatctggcgacgagctcctgtcggattcattcacctacaaggagctcgagaacggcgtcctgtgggaggtcgagggaaagtgggtcacccaaggtcctgttgatgtagacattggtgccaatccatccgccgagggtggtgaggatgaaagcgttgatgacacagccgtgaaggtggttgatattgttgacacattccgtctacaggagcaacctccttttgacaagaaatcatttgtctcttacataaaaaaatacatcaagaatctcactgctgtgttggagccagagaaagcggatgagttcaaaaagggtgtcgagggtgcaaccaagtttctccttagcaagctgaaggaccttcaattttttgttggtgagagcatgaaggacgaagcgtccgtggtattcgcctattacaaggatggtgccactaatccgacattcctctatttctctcatggtcttaaggagatcaagtgctagattagttacccatgttgggtactatatatgttctattgttatagccacaactatagctgccctgcctgaactgaactcaggttttttttaagaaaaaactgtccaagattggattgcttgttaaagctaaatattgttattgacgtgttattgcttagttgtcattgtctttcagctagtcattttatatttttgttttttatctcttcgttaaaatcttatacttatttttgacgaaagtagatgtgagttaattattagtatttctatttggactaaagaattagatttgagttaattgttaatagataa

SEQ ID NO: 131001 - DNA, 886 bp, Zea Mays
ggacggctgccaccgcggcccggatgtttccctgccaccataaatgcgccgcggccgtcctcgctgcccaacccttcgctgcgccgccgcctccgacatcgtctcttcgtccccacgagcaaccgataatccgccggcgctgagatgttggtttatcaagacctcctatctgtgggtcacccaaggtcctgttgatgtagacattggtgccaatccatccgccgagggtggtgaggatgaaagcgttgatgacacagccgtgaaggtggttgatattgttgacacattccgtctacaggagcaacctccttttgacaagaaatcatttgtctcttacataaaaaaatacatcaagaatctcactgctgtgttggagccagagaaagcggatgagttcaaaaagggtgtcgagggtgcaaccaagtttctccttagcaagctgaaggaccttcaattttttgttggtgagagcatgaaggacgaagcgtccgtggtattcgcctattacaaggatggtgccactaatccgacattcctctatttctctcatggtcttaaggagatcaagtgctagattagttacccatgttgggtactatatatgttctattgttatagccacaactatagctgccctgcctgaactgaactcaggttttttttaagaaaaaactgtccaagattggattgcttgttaaagctaaatattgttattgacgtgttattgcttagttgtcattgtctttcagctagtcattttatatttttgttttttatctcttcgttaaaatcttatacttatttttgacgaaagtagatgtgagttaattattagtatttctatttggactaaagaattagatttgagttaattgttaatagataa

SEQ ID NO: 131002 - DNA, 1896 bp, Zea Mays
ccacgcgtcgcacgcggattgtgtggccgaccgttgcgctggcggacgttggctcaccggacagtccggtgaattatagccgtacgccgccaaattctcccgagagcggccagttcgccggaagccagcctggcgcaccagacactgtccggtgcaccaccggacagtccggtgtgccagactaagctgagtattggctgctccgagccaagtccttttcttcttctcttttctctgattctagcacttagacagaatatgttagtactcaaaacaatgtactaagtctagaaacataccttgttacattatttgcaccttttgcttgtttggcacataatatcttattcactatgtgttggacacttaatcaccaaaatattatagaaatggcccaagggcacatttccctttcatttggctcaccggacagtccggtgcaccaccggacagtccggtgaattatagccgtacgccgccgtcgaaacccgagagcggcgagttcactagagaccagcctatgtcgctcaccactctttcaggttgtttcaaatggacgtaaagagcgctttcctcaacgggccaatcaaggaggaggtatacatggaacaaccccctggctttgaggatgacaggtaccccgaccatatgttcaagctctctaagacgctctatggacttaagcaagccccaagagcatggtatgaatgccttatatatttcttaattgctaatgctttcaaggtttggaaagccgatcccactctttttactaagacttgtgatggtgatctttttgtgtgccaaatttatgtcgatgacataatatttggttctactaatcaaaagtcttgtgaggagtttagcagggtgatgacacaaaagttcgagatgtcgatgatgggtgagttgacctacttccttgggttccaagtgaagcaactcaaggatgtcaccttcctctttcaaacgaagtacacacaagatcttctcaagaggtttgggatgaaggacgccaagcccgcgaagacaccgatgggaaccgacgggcatgtcgacctcaacaaaggaggtaagtctgtcgatcaaaaggcatacccgtctatgataggttccttgctttatttatgtgctagtagaccggacattatgcttagtgtatgcatgtgtgctagatatcaatccgaccccaaggaatgtcaccttgtggccgttaagcgaattcttaggtatttagttgctacgccttgctttgggatctggtatccaacggggtctacctttgacttgataggatattcagactccgattatgtcgggtgcaaggttgataggaagagcacatcggggacgtgccgattcctaggaaggtccctggtgtcttggagttccaagaaacaaacatctgttgccctatccaccgctgaggccgagtatgttgccacaggacagtgttgcgtgcaactactttggatgaggcaaaccctccaggactttggctacaatctgagcaaagtccccctcctatgtgacaataagagtgcaatccgcatggcggataatcctattgaacacagccgcactaagcacatagacatccgacatcacttcctgagagaccaccagctaaagggagatatcgaggtgtaccatattagcaccgagaactagctagccaatatctttaccaagccattggatgagaaaactttttgcaggttgcgtagtgagctaaatgtcttagattcgcataacttggattgatctatagcatacatgtgttctatgcctttgatcatgttactttatgcattttgtgttatctatttgtggtgctcaagttgtacaaaatctcccctagacctcacaagtccatatgcaaatggtgcacatatt

SEQ ID NO: 131003 - DNA, 973 bp, Zea Mays
ggacggctgccaccgcggcccggatgtttccctgccaccataaatgcgccgcggccgtcctcgctgcccaacccttgctcgctgcgccgccgcctccgacatcgtcccttcgtccccacgagcaaccgataatccgccggcgttgagatgttggtttatcaggatctcctatctggcgacgagctcctgtcggattcattcacctacaaggagctcgagaacggcgtcctgtgggaggtcgagggaaagtgggtcacccaaggtcctgttgatgtggacattggtgccaatccatccgccgagggtggtgaggacgaaagcgttgatgacacagctgtgaaggtggttgatattgttgacacattccgtctacaggagcaacctccttttgacaagaaatcatttgtgtcttacatcaaaaaatacatcaagaatctcactgctgtgttggagccagagaaagcggatgagttcaaaaagggtgtcgagggtgcaaccaagtttctccttagcaagctgaaggacctccaattttttgttggtgagtccatgaaggatgatgcgtctgtggtattcgcctattacaaggatggtgccactaatccgacattcctctatttctctcatggtcttaaggagatcaagtgctaggcgtgcggcgaaattagttacccatgttgggtactatctatgtactattattatatccaaaactatagttgtcctggctgaattgaactcaaaagggtttgtttgagaaaaaattgtcccaagattggattgcttgttaaagctcaatattgttattgaagtgttattgcttagttgtgattgcctttcagttagtctttttatattttatatttttatctcttcattaaaatcttgtttttgacgaaagtagaagtgagtttattattagtatttctatttggactaaagaattggatatgagttaattgttaatagataa

SEQ ID NO: 131004 - DNA, 850 bp, Zea Mays
ggacggctgccaccgcggcccggatgtttccctgccaccataaatgcgccgcggccgtcctcgctgcccaacccttgctcgctgcgccgccgcctccgacatcgtcccttcgtccccacgagcaaccgataatccgccggcgttgagatgttggtttatcaggatctcctatctgtgggtcacccaaggtcctgttgatgtggacattggtgccaatccatccgccgagggtggtgaggacgaaagcgttgatgacacagctgtgaaggtggttgatattgttgacacattccgtctacaggagcaacctccttttgacaagaaatcatttgtgtcttacatcaaaaaatacatcaagaatctcactgctgtgttggagccagagaaagcggatgagttcaaaaagggtgtcgagggtgcaaccaagtttctccttagcaagctgaaggacctccaattttttgttggtgagtccatgaaggatgatgcgtctgtggtattcgcctattacaaggatggtgccactaatccgacattcctctatttctctcatggtcttaaggagatcaagtgctaggcgtgcggcgaaattagttacccatgttgggtactatctatgtactattattatatccaaaactatagttgtcctggctgaattgaactcaaaagggtttgtttgagaaaaaattgtcccaagattggattgcttgttaaagctcaatattgttattgaagtgttattgcttagttgtgattgcctttcagttagtctttttatattttatatttttatctcttcattaaaatcttgtttttgacgaaagtagaagtgagtttattattagta

SEQ ID NO: 131005 - DNA, 837 bp, Zea Mays
ggacggctgccaccgcggcccggatgtttccctgccaccataaatgcgccgcggccgtcctcgctgcccaacccttgctcgctgcgccgccgcctccgacatcgtcccttcgtccccacgagcaaccgataatccgccggcgttgagatgttggtttatcaggatctcctatctggcgacgagctcctgtcggattcattcacctacaaggagctcgagaacggcgtcctgtgggaggtcgagggaaagtgggtcacccaaggtcctgttgatgtggacattggtgccaatccatccgccgagggtggtgaggacgaaagcgttgatgacacagctgtgaaggtgaatctcactgctgtgttggagccagagaaagcggatgagttcaaaaagggtgtcgagggtgcaaccaagtttctccttagcaagctgaaggacctccaattttttgttggtgagtccatgaaggatgatgcgtctgtggtattcgcctattacaaggatggtgccactaatccgacattcctctatttctctcatggtcttaaggagatcaagtgctaggcgtgcggcgaaattagttacccatgttgggtactatctatgtactattattatatccaaaactatagttgtcctggctgaattgaactcaaaagggtttgtttgagaaaaaattgtcccaagattggattgcttgttaaagctcaatattgttattgaagtgttattgcttagttgtgattgcctttcagttagtctttttatattttatatttttatctcttcattaaaatcttgtttttgacgaaagtagaagtgagtttattattagta

SEQ ID NO: 131006 - DNA, 842 bp, Zea Mays
ggacggctgccaccgcggcccggatgtttccctgccaccataaatgcgccgcggccgtcctcgctgcccaacccttgctcgctgcgccgccgcctccgacatcgtcccttcgtccccacgagcaaccgataatccgccggcgttgagatgttggtttatcaggatctcctatctggcgacgagctcctgtcggattcattcacctacaaggagctcgagaacggcgtcctgtgggaggtcgagggaaagtgggtcacccaaggtcctgttgatgtggacattggtgccaatccatccgccgagggtggtgaggacgaaagcgttgatgacacagctgtgaaggtggttgatattgttgacacattccgtctacagagaaagcggatgagttcaaaaagggtgtcgagggtgcaaccaagtttctccttagcaagctgaaggacctccaattttttgttggtgagtccatgaaggatgatgcgtctgtggtattcgcctattacaaggatggtgccactaatccgacattcctctatttctctcatggtcttaaggagatcaagtgctaggcgtgcggcgaaattagttacccatgttgggtactatctatgtactattattatatccaaaactatagttgtcctggctgaattgaactcaaaagggtttgtttgagaaaaaattgtcccaagattggattgcttgttaaagctcaatattgttattgaagtgttattgcttagttgtgattgcctttcagttagtctttttatattttatatttttatctcttcattaaaatcttgtttttgacgaaagtagaagtgagtttattattagta

SEQ ID NO: 131007 - DNA, 1471 bp, Zea Mays
ggacggctgccaccgcggcccggatgtttccctgccaccataaatgcgccgcggccgtcctcgctgcccaacccttgctcgctgcgccgccgcctccgacatcgtcccttcgtccccacgagcaaccgataatccgccggcgttgagatgttggtttatcaggatctcctatctggcgacgagctcctgtcggattcattcacctacaaggagctcgagaacggcgtcctgtgggaggtcgagggaaagtgggtcacccaaggtcctgttgatgtggacattggtgccaatccatccgccgagggtggtgaggacgaaagcgttgatgacacagctgtgaaggtggttgatattgttgacacattccgtctacaggagcaacctccttttgacaagaaatcatttgtgtcttacatcaaaaaatacatcaagaatctcactgctgtgttggagccagagaaagcggatgagttcaaaaagggtgtcgagggtgcaaccaagtttctccttagcaagctgaaggacctccaattgtaagttctatcaataaatacattgcatatctattattagcttagtaatgctatgtgaaatatcctctgcaagttctatacccaaatctattgataatacatttcatatctatcgttaacttattatagcaatgcagcgtgaactactatactatctttttctaatatgaattagaacttggtattctcatacacaaatgtatatatagactttgtgatcccacgtttgcagattgtaccatcctatctttttctaatatgaattagaacttttggtattctcatacacaaatgtgtctccagactgtgtctctagactttgtgatcccacattgggcagattgtttttgttcatgtaatacactggtctgcctgtaacctcctgtttgcctgaaaatgctgctctaacctcttcatgctgctgtgcattattttgccacaatagttttttgacaatagcttaacatattacattttattcctaccacgatttattcacaactctctgtagtttggtctaatgttggcatttatgtaaggatagtcctttgtaactgataatttagtctaatgtttgttttttttgttaaatctaatgttgacattgttgtcatttacatgtctaatattgacattgttatttatgtttttaatagttttgttggtgagtccatgaaggatgatgcgtctgtggtattcgcctattacaaggatggtgccactaatccgacattcctctatttctctcatggtcttaaggagatcaagtgctaggcgtgcggcgaaattagttacccatgttgggtactatctatgtactattattatatccaaaactatagttgtcctggctgaattgaactcaaaagggtttgtttgagaaaaaattgtcccaagattggattgcttgttaaagctcaatattgttattgaagtgt

SEQ ID NO: 131008 - DNA, 258 bp, Zea Mays
atggccaagcgcccagctcccttgctcttgctgcccgccgtggccggctccctactgctctcgtctaggtcgccgctgtcgagttccctcaccgagtccttaccctgctcgctgtcacggccgccgtcaaatcgtcggagtcgctcaactcgccaattacatcttggccggtcgtcaattttctattcgccgtggtacaacacagctgttagatccagtctccaaaccgccacggcgtttgccggacttcgccgataa

SEQ ID NO: 131009 - DNA, 1919 bp, Zea Mays
gacgtcgcgcgcagaaaccaatccaaataaaaatcctggagccatcggccgccggcagccacagcagtcgcttccctgatctgccaagcaatggagacgcgtctcttcctcctctgtgctactactgtcgccatcgctctcgtctccgttttgctggtcctcgtcgcccgcggccgcaagcccagcgccggtcgcctcccgccgggtccgccggcgctgctcttcctcgccaagttccttgcgctgcggcgctccatcttcgacctggctccgctgctccgcgacctgcacgcgcgctacggccccgtcatctcggtccgcctcgcccgcacgctcgtcttcgtcgccgaccgccgcctcgcgcaccgcctcctcgtccagggcggcgccaccttcgcggaccgcccgccacccgttgacccaaacagcctcttcagcgccggcggccgtgatgtcagctcctcgccctacggcgcatactggcgcctcgtgcgccgcaacctcgcgggcagaggcgctgcagcccgcccgcgtcgccctcttcgcgcccgccaggcggtgggcgtgcgacggcctcgtcgacaacctcctccgtcgcagtcgtcggagcgacgctggcgctggcgctggcgctgccggagacgacgccactaccgtcacgctgaggccgttcctccgccgcgccatgttcgagctgctagtgtacatgtgcttcggcgtgcggctgggccaggacacgctcgacgagatcgaggggctgcagcaccgggcgctcctgacgctcaccaccttcccgatcttcgccttctttcccgcagtcaccaaacggctcttccgcagccggtgggaggccaacgtcgcggtgcggcggaggcaggacgatctgttcgtccctctcatccacgccaaggccacgcgcgggaacgacgacggcgacaccagcgccagcccgccgagctacgcggacacgctccgcgcgctgcgagtgcccgaggagggcgaccgcccgctcacggacgccgagatggtcagcctctgctccgagttcctcaacggcgggacggacacgacggtgacgctggtggagtggatcatggcggagctcgtcaaccacccggacgtgcaggccaaggtgcacgaggaggtcatcaggtcgccgtcgtcgtccaagctggcagaccacggtggcgatgacatccaggtcggccaggcgatgccgtacctcaaggccgtggtgctggagggccttcgcctgcacccgccgggccacttcgtgctcccgcatggcgtgcagaccgacggcgccgacgtcggcggctacacggtgcccaggggtgcggagctgaacttcctggtggcagagatcgggcgtgacgagacggtgtggacaaaggcgcgggagttccggccggaccggttcctggacggcggggagggctgcggcgtcgacatcaccggcagccgggagatcaagatgatgcctttcggcgccgggcggcgcatgtgccccggctactcgctcggcgtccaccacgccgagtacttcgtggcgaggatggtgcgggacttggagtggcgcccgccggtggacggcgtggcggtggaaatagcggaagcgctggacttcaccgtcgtcatgaagcagccgctccgtgcacgcatcatcgccagatattagctccatgcgtggtattctgctggggataagataagctactattctgttacatcagtatcccttcgtggatgtactactaatctgttggcgatgcttgatgcttccaagagctggagtagaatacatgtagctacaccgtttactaattaccctactaatatatacaactacaccttttaccaattataatatacttaatgcttatattatatacatatcactataatactatcattacatc

SEQ ID NO: 131010 - DNA, 1504 bp, Zea Mays
caaggaaggcaaagcccaggcccagacccagacccgccgataaaggccatggccgccgccgagccgccgccgccctccgggatgggcttcttcggcatgctcagcttccgccgcagcgccaccgccgtcgcctccttcgacccagcgcaggacgatgagctcctcgcgctcgacgccctccagtcccacgttgccgcccgcctccaggcgctctccgcgcacgccacccctggccctggctccccgtcgctcctcaccctccctttcctctcggagctcctcgacgccgtcgtctcctctgacgacgccttccgcggagtgctcgcgctggccccagtcgccgccgcgatcgccaggccccccgccgaccgcctcgccggcgacctcctcgaccgcgccgtcaagacgctcgacgttctcaacgcggcatccctcacgctgaccacggtccgggccgcgcaccgtgccgcgctcgccgccgcgtcctgcctcctcctcgcgccgtcgctccacaccgcgcacctcgcgcgcgcgcgcagggccatctccaggctcttccccgccgacgacgcatccgccaaggcctgcggcggctccgcggcctcgccctcctcgcgcaccatgcgcgcgctctccttcagcgtctccaagaactggtccgcgggccgccacatgaccgccatggcggcgcacctcgcgccgctgccgcacccgctgtcgcccgccgcggccgccccgggcgcggggtgcgggctcggactggcgctctacaccatgagctccgtcctcgtcttcgccatgtgggcgctggtcggcgcggtgccgtgccaggaccgggcgtccggggccaccgggccccccgtcgcgccgccgaagcaggcgcagtgggcggcgcccatgtccgcgctccaggagaggatcgcggaggagtggaggcgcaaggaaaagaagggatcttgctccggctccgcgcccacgtcggggctcctcgcggagatgcaggccgtggagcgcgccgcgcgcgagctcaacagcgtgctcgaggagatcgccgaggaggaagaggaggaggaggacgacgagcggcggcaggggatcgtgggcgaggagcgcgcgcgggacgtgacggagcgcgccgaggagctggcggcggcgtgccggacgctcgaggacgggctcgcgccgctggagcggcaggtgcgcgcggtgttccaccgcgtcgtcgcctgccgcgcggaggtcgtccgctgcatggagctcagcgcgcgcgccggcaccgccaatgccgcgtccgcgtcaggcgtgccgccgccgcaccagcactccttctgaggcgacgatcgtcgacgaattgcttgcttgctttggggggtcacaaattattctctccccccattgccctgtactgtaccattctttgatttgtactgctaccctgccactgccagtaaaacaacgcctctcttgcttctcatgccctgtagatgatgagcctgctgtatgt

SEQ ID NO: 131011 - DNA, 2347 bp, Zea Mays
aagcgagcccccgtcccgctcccttcctgctacctgctggccgctgccctttccttcccggaatggtatcgtgcgacctgtagtcgtcgccagccacctcgctccctcctagacgacacccagctagtgctcccttccacacccaggaaccagccacctaaccccgcccgccatgccgggcctcgccgcctccgacaactcgcccccggcgccggcgccgccgccgcgccggctctcgtcgccgctaccccgtcgcgcgccgtcgtccccgtcgccgtccgcctcctcgcgcgccaagcctcggaagccctcgccctctcccgcggccttccccaccgacgccgacgactcgctcgacaacccggatctggggcccttcctcctcaagcaggcgcgcgacgccatggtgtcgagcgagggcggtggcgccgcgcgcgcactcgagttcgccgagcgcgccgccatggcgctcgagcgacgcggcgagggcgccgagctcgagctcgccatgagcctccacgtcgccgccgccatccactgcggcctcggccgccacgctgacgccatccccgtcctcgagcgcgccgtcgcagtcgtcacgccgccgccagaggcgcctgccgacggcgaggccgaagccgaggccggtgcaaccggcggcgacgaccaccagcagctgcagcctgccgagcctgaccagaggggcgaggagtggtccctcgccgccttctccggctggatgcagctcggcgacacgcacgccatgcttggccgcatggacgactccatcgcctgctacggcaagggcctcgagatccagatggctgcgctcggcgagcgcgatcctcgcgtcgcagagacctgcaggtacctggcggaagcgcacgtgcaagctctgcagttcgacgaggcagagaagctgtgtcgcgaagccctccagatccaccgagagcacagcgctccggcatccctcgaggaggcctcggaccgccgcctgatggccctcgtcctggacgccaagggtgactacgacggcgcccttgagcacctcgtgcttgcctccatgaccatggttgccaatggccgtgacattgaggttgccaccattgacgtcgccataggcaacacgtacctcgccctcgcccgcttcgacgaggccgtcttctcctaccagaaggcactgactgttctcaaatcggcccgtggcgacgaccatccgacggttgcgtcggtctacgtccgccttgctgacctttaccaccggacaggcaggctccgtgagtctaaatcctactgcgagaacgccctgcgtgtctatgccaagcccgcgccaggtgctgcccctgatgagatcgctggaggcttaatggagattgctgccatctatgaggcgcttggcgatctcgatgaggccctgaagcttcttcagagggcactcaggttgctcgagggctcaccggggcagtggagcactgttgccggtattgaggcacagatgggtgttctgtactacatggttgggaggtatgcagattcgaggaactcgttcgagagtgcggttgcaaagttgagggccattggtgagaggaagtcggcatttttcggcgttctgttgaaccagatggggctagcttgcgtgcagctgttcaagatagacgaggctgcacagttgtttgaagaggcaagggcggttctggagcaggagtgtggcgcttctcatcctgatactcttggtgtgtacagcaaccttgctgcaatctatgatgctatgggaagagtggaggatgcaatcgagatcctggagcatgtgctgaaggtgagggaagagaagcttggcacggcgaacccagacgtggatgacgagaagaagcggctggcggagctcctgaaagaggcggggcggtctcggaaccggaagcagaagtcgctgcagaacctgttcgggaccaactcgcagcgggcgaagaaggaagccgggaggaggtggtccaactttgggttcagaagctgaggaagctgcactgttggtcgtcgtcgtcgtcgggcggttgtggcctttgtaacataaaggagggatgggaaaggaaaaaaaagcacgtgtaaagatgttgctgtaggttattattattaggaatgtgatggtggtgttggtttgctgtttgtgtatgtgtggcactgcattactgtgttacttgtcttgggttatattttcagtagcgattattgttaactgggtgctgttataccttgagaagagaacattggttttgtcgtggaggaatggtgttgactggtgggtgatgagaattacatgtgattgtttgttagtacattgcttccttccatt

SEQ ID NO: 131012 - DNA, 110 bp, Zea Mays
ggagcactaagtgttgtaactaggagcggtaatagacaccctataaaatttaaggatcaatttgaattagcatcagactctatttttattcactttaactaaaacttatt

SEQ ID NO: 131013 - DNA, 492 bp, Zea Mays
atgtcgtcgtcgaacaggttgttgtccgtgttgtacccgcccacggagaacaccaccgcgggcaccgcgtgccgcttcgtgcactcgggcgccgccgcgcccgaagccaccgacttcaccgttatgtgtggcattgaggagtcgtccttgcgggcgtacggtcggagccgcttctcgacgctctcgtcgaaccccccgccgccgccgccggacgggttcaccaggtacaccgtcctctgcttcgggctcacgcgcacgtcgccggacagctcgcacacggtcggccgggcgtacgggaaccgctcgtccacgctgttctcgtcgcacgtcatcttgcctccttgttggccgccgttgccatcctcagatggcttgttggtgggctcggcctccgcattcccgccgccgtccttcctggtgggcaagccgggctcgtcggaccccgctgccatgtcgttcctcatgacggcagcttccggcaagccgggctcc

SEQ ID NO: 131014 - DNA, 2772 bp, Zea Mays
ccattcatctccaccgccgccgcatcagccatggcgcgccgccacctcgcctaccccctgcgcctctcgatcctctcccgcaatcccggagcccctgcccgctcgctatgcgcctcatcgtccacccacgaggtcccagtcccggccgtcgaggcccaggcggaggcggaagcggcggcgaaggctgctgcgtccccctctccgtcggcgcccgccaacccgccccggcgcgaggagcctctccacgagacggtgctgcacatgatccggcggcggccgtggacgacgcgcctggagaactcgatccgcctgctctcgcccaccctcgacgcgccgctggtccacggcgtcatctccggggccgcatccgcggggcgcgccgacctcgcgctccagttcttccgcttcgcataccgccggggcgggttcagcccggagggcgccacgttcgcgctcctcgtgcccgcgctcgcgtcgcgccgcatgctcaaccacgcgcgctgcctcgtcctcgacaccatgccgtccttctccgtcgcgcccgacgagcccacgctcgccgcgctcatctccgcctacggcagggccgccatcccgcaggaggccgttaagctgttccggatgatgcccaacataggcgtcccccgcacggcgctctcctacaacgccgtactcaaggccatactctgccgcggacgcgaggccatggccaggcggatctacaacgccatgatcgcggacggggtggcgccggacgtgtccacctacaacacgctcatctgggggttcggcctgtgcaagaagatggagaccgcagtcagggtgtttggggacatgaagggccatggggtgacccctgatgtcaccacctacaacaccctgctgaacgcctgggtgcgtgccggtgatctggagagtgcgcgcaaggtgtttgatgaaatggctggggaggggaccgagcggaactcggtctcgtacaatgtcatgatcaaggggtacgtggaaggcaatagggtggaagaggcagtggcgttgttcgctgagatggctgagaaaggattgaggctgagtgagaagacatttgctgcgttgatgccagggctttgcgatgaccagggcagggtggcagaggcccggaaggcagtggatgacatggcagagcggaggctcacgccaaaggacaagtcagtgtttctgaggcttgtcacaacgctgtgcaaggctggtgacttggatggggcgctcgaggtgcactggaagagcgggcagttcaagcatgtgctggtggatccaagacagtatggggtgctgatggaaggcctttgcgctggcggcaagtgcgagactgctattgaggtgctagatgagcttatggagaagggcaccttgctgagcccaaagagtcctgtgcttgaagcatcggcttataacccggtgatcgagttcctgtgcagcaatggtagcaccgccaaggccgagacattcttcaggcagctgatgaagaaaggtgtggatgacaaggctgcattcaacagtctcatccgtggacatgcaaaagaaggtgtgccagaggcagctcaggagattctcgccatcatgacacgccgcgaggtcccaactgaccctgaatcacatgcgctgctagttgatagcttcctgaagaagaatgagccggctgatgcaaagacggcattagacagcatgatgcaacagggtcacttgccaagcccagctctgttcaagtctgtcatggaggcgctgttcaacgatggccgggttcagaccgcaagcagggtcatgaagagtatgattgagaagggagttactgagaacatggatgtggcacacaagatactggaagctctattcacgaggggccatgtcgaggaggcaatcggccgtgtcaatctgatggtggaaaatggctgcatgcctgatctggataagttgctggtcggcctatgtgacaatggtagagtgatggaggcgcagaagctggctgattttgcgttggacagggactttgatgttagcttctcgacctatgacagagttctggaggccctgtacgccgaagaaaagacgttgcctgcgtactccatgctgtgcaagatcaagaacaaaggaggtgttgtcagccagaaaggctgcgatgacttgatggagagcttaaaatccgaaggatactcaaagcaagcagatattctgtctaggatcttggcagagaatgcacagtcgacgcccaagaggggcagaagggttgccatgggtgcttagtgagctttgccagcttgtttagagcatctgtgttgttgttgttttacttcaagaaagatgtgatttctttcttttcatcgatgcttcttgagctatttatcaagtgggggattttggtcctatgggacgataagcaagggcgtttactttctgtttggaggatccctgatctgttcgtcttggcgagaagaaacatatgcaataataggcaaagatgtacctcctattatgagtggtgttgtcaaatttagaattaattacttttaacatactgcacttccaacatttttaccaatgacattttggattgaggctaatggagttactctttgctttttttttgttttgcttttgtgaggctctactaatttgttacatgaaagctgtcaagaggcaatatgtgtatccggctccttttgcgttttattggatgccctacatggtggaggagaggacatccccatttctattacacgcgtaaaagaaatacaaaga

SEQ ID NO: 131015 - DNA, 2609 bp, Zea Mays
caaaccatttgttcattggaaccgcctgcattgcatacaagctgccttccttgtctaaccagctcttagacaacaagattctgcttccagaccaggatactacgcccgtttctgtctgtgtgcctccgttcaatgcacacgcttcatttggtttctgtcacttgttcatcacgctctaccgtctctagcgccatctccgtactagttttgatgactggacttatttgatgctcttgccgttctcgacttggggcgcgagccgatggatctcctccggatgaaacttctcctgccctccttcatcagctgccttcttctgatgcaggcagcactatgtgatggcgccgccgccaccaccaccaccaccggcgaaaacggaacggcaaactggacatgtgtgtgcgcagctcatcctctcggtgaaccagactccaacagcagcttgctgtccaattgctcttcctcctgccattgccaccgagatgagaacggcggcggcggcggcggcggcgcaggctcgtggaactgcacgtgtgcctctggtgatgagggccttcagaaggaagagcatgctgagctacgtgacgggagctgtttcacttcctgcaactgcacgtcgggtactggaacttcagaggaagggagaaagcgtgtctcaagcaaaacagtcatagctacgctcctggtctgcgtggttctcaccaccaccgctttcctcgtcaccaccgtatactacttccgccgcaaggacgccctctctccgcgatcgcagatatactccttcgatagatacactactagctggagcagcaggtcgaacctcgtcagcagtcgatcgtctccgcttccccagatgaaacccaaaccaaagcttggtggtctgaaagagtttctgtgcagctgcaatcttgtcatctgtgggggagagagcggcgcattccccggtgtcgtcgcccggttctcgtacgcagagctggagcaagcgaccgggagattctcggacgaccaccttatcggagtcggtgggtcaagcaaggtgtaccgcggccagctcggcgatggcagagtcgttgccgtgaagaagcttaggccgctaggaggcacggacgaagacttggagttcctgtcagagatcgagctgctgtcgaggctgaaccactgccacgtggtgccgttgctggggtactgctcggagagccagggccggcagctggagcggctgctggtgttcgagtgcatggccaacggcaacctgagggactgcctagacctgaagcgagggaggaagcccatggactggcagacgcgggtgagcgtcgcgctcggcgccgcgagggggctggagtacctgcacgaggcggcggcgccgcgcatcctccaccgcgacatcaagtccaccaacatcctcctggacgacaagttcagagccaagatcactgacctcggcatggccaagtgcctgatgaacgacggcgtgaccagctgctcgagctccccggcgcggatgctgggcacgttcggctacttcgcaccggagtacgccatcgtgggcaaggcgtcgctcaagtccgacgtcttcagcttcggcgtcgttgtgctggagctcatcaccggccggcagcccatccacaagtcgtcgtcgacgagggccgacgagagcctcgtactctgggcgacgtcgcggctgcgggacagcgggctggtggtcacggagctgccggacccgacgctgcagggcaagttcccggcggaggagatgcagatcatggcgcacctggcgcgggagtgcctgcagtgggaccccgaggccaggcccaccatgacggaggtcgtgcacatcctcgccaccatcgcaccactccagcacggcgccaagcgtcggaaccttcccatcgccaccgccttcaacctcacgccatcgccgcacgtcgggcggtgtgacccggagcctaaagacgacgacatcgagaggcagatgcagcagcaggagtgctcgccgacgacggctgtccagtggcaacaacaacaagcgcgctgcacccacgcgccaacgggccgcgcgtcgtggcccggcgacagggggaacgttgtgagcagaggcgcggcggtgtcgggcgagctggtgaacgggacggtgctgatgaacccccacgggcggggcagctggcggcggccgccgccgcttggcgacgaggaggcagtggacgtggatctgacggagccccggatggaggcgttcacgcagccggcggcgtttcagcctttcaggtgacggaaggattaggatcaggtggtggtggttctgattggtgcggcggcggcgggtgctgctgtacatcttcttgttcgtgcctccacgatccacaccaggatcatctgcttctgcatctgcgttcatgaatgtacagtacaggcaaatacatctagattggcaacgggaaaagaaaagaaaggcatcgagatcgttatgggatataggacctagattgaacacgagatcaatgcatgaatctgaatccacggcgcgcgtcattggacacatcactgttgtacacaagcaaacagacaatgagtgttcacagaagcaaaaaatataagaccgagttcaa

SEQ ID NO: 131016 - DNA, 2589 bp, Zea Mays
acagtgcagtgcattcaatctcaaataaaaagccctgctacagtgctagcagtactcggatccacgaccttctccctccctccgctgctgctccgtcaaggaagggaggaaagaaagggcaggggaatggaggtggaggaagacggccgagccgcccgagtgctgctgagctcccagtgtctctgtctctgatgagatgactggacttatttgatgctcttgccgttctcgacttggggcgcgagccgatggatctcctccggatgaaacttctcctgccctccttcatcagctgccttcttctgatgcaggcagcactatgtgatggcgccgccgccaccaccaccaccaccggcgaaaacggaacggcaaactggacatgtgtgtgcgcagctcatcctctcggtgaaccagactccaacagcagcttgctgtccaattgctcttcctcctgccattgccaccgagatgagaacggcggcggcggcggcggcggcgcaggctcgtggaactgcacgtgtgcctctggtgatgagggccttcagaaggaagagcatgctgagctacgtgacgggagctgtttcacttcctgcaactgcacgtcgggaacttcagaggaagggagaaagcgtgtctcaagcaaaacagtcatagctacgctcctggtctgcgtggttctcaccaccaccgctttcctcgtcaccaccgtatactacttccgccgcaaggacgccctctctccgcgatcgcagatatactccttcgatagatacactactagctggagcagcaggtcgaacctcgtcagcagtcgatcgtctccgcttccccagatgaaacccaaaccaaagcttggtggtctgaaagagtttctgtgcagctgcaatcttgtcatctgtgggggagagagcggcgcattccccggtgtcgtcgcccggttctcgtacgcagagctggagcaagcgaccgggagattctcggacgaccaccttatcggagtcggtgggtcaagcaaggtgtaccgcggccagctcggcgatggcagagtcgttgccgtgaagaagcttaggccgctaggaggcacggacgaagacttggagttcctgtcagagatcgagctgctgtcgaggctgaaccactgccacgtggtgccgttgctggggtactgctcggagagccagggccggcagctggagcggctgctggtgttcgagtgcatggccaacggcaacctgagggactgcctagacctgaagcgagggaggaagcccatggactggcagacgcgggtgagcgtcgcgctcggcgccgcgagggggctggagtacctgcacgaggcggcggcgccgcgcatcctccaccgcgacatcaagtccaccaacatcctcctggacgacaagttcagagccaagatcactgacctcggcatggccaagtgcctgatgaacgacggcgtgaccagctgctcgagctccccggcgcggatgctgggcacgttcggctacttcgcaccggagtacgccatcgtgggcaaggcgtcgctcaagtccgacgtcttcagcttcggcgtcgttgtgctggagctcatcaccggccggcagcccatccacaagtcgtcgtcgacgagggccgacgagagcctcgtactctgggcgacgtcgcggctgcgggacagcgggctggtggtcacggagctgccggacccgacgctgcagggcaagttcccggcggaggagatgcagatcatggcgcacctggcgcgggagtgcctgcagtgggaccccgaggccaggcccaccatgacggaggtcgtgcacatcctcgccaccatcgcaccactccagcacggcgccaagcgtcggaaccttcccatcgccaccgccttcaacctcacgccatcgccgcacgtcgggcggtgtgacccggagcctaaagacgacgacatcgagaggcagatgcagcagcaggagtgctcgccgacgacggctgtccagtggcaacaacaacaagcgcgctgcacccacgcgccaacgggccgcgcgtcgtggcccggcgacagggggaacgttgtgagcagaggcgcggcggtgtcgggcgagctggtgaacgggacggtgctgatgaacccccacgggcggggcagctggcggcggccgccgccgcttggcgacgaggaggcagtggacgtggatctgacggagccccggatggaggcgttcacgcagccggcggcgtttcagcctttcaggtgacggaaggattaggatcaggtggtggtggttctgattggtgcggcggcggcgggtgctgctgtacatcttcttgttcgtgcctccacgatccacaccaggatcatctgcttctgcatctgcgttcatgaatgtacagtacaggcaaatacatctagattggcaacgggaaaagaaaagaaaggcatcgagatcgttatgggatataggacctagattgaacacgagatcaatgcatgaatctgaatccacggcgcgcgtcattggacacatcactgttgtacacaagcaaacagacaatgagtgttcacagaagcaaaaaatataagaccgagttcaa

SEQ ID NO: 131017 - DNA, 2595 bp, Zea Mays
acagtgcagtgcattcaatctcaaataaaaagccctgctacagtgctagcagtactcggatccacgaccttctccctccctccgctgctgctccgtcaaggaagggaggaaagaaagggcaggggaatggaggtggaggaagacggccgagccgcccgagtgctgctgagctcccagtgtctctgtctctgatgagatgactggacttatttgatgctcttgccgttctcgacttggggcgcgagccgatggatctcctccggatgaaacttctcctgccctccttcatcagctgccttcttctgatgcaggcagcactatgtgatggcgccgccgccaccaccaccaccaccggcgaaaacggaacggcaaactggacatgtgtgtgcgcagctcatcctctcggtgaaccagactccaacagcagcttgctgtccaattgctcttcctcctgccattgccaccgagatgagaacggcggcggcggcggcggcggcgcaggctcgtggaactgcacgtgtgcctctggtgatgagggccttcagaaggaagagcatgctgagctacgtgacgggagctgtttcacttcctgcaactgcacgtcgggtactggaacttcagaggaagggagaaagcgtgtctcaagcaaaacagtcatagctacgctcctggtctgcgtggttctcaccaccaccgctttcctcgtcaccaccgtatactacttccgccgcaaggacgccctctctccgcgatcgcagatatactccttcgatagatacactactagctggagcagcaggtcgaacctcgtcagcagtcgatcgtctccgcttccccagatgaaacccaaaccaaagcttggtggtctgaaagagtttctgtgcagctgcaatcttgtcatctgtgggggagagagcggcgcattccccggtgtcgtcgcccggttctcgtacgcagagctggagcaagcgaccgggagattctcggacgaccaccttatcggagtcggtgggtcaagcaaggtgtaccgcggccagctcggcgatggcagagtcgttgccgtgaagaagcttaggccgctaggaggcacggacgaagacttggagttcctgtcagagatcgagctgctgtcgaggctgaaccactgccacgtggtgccgttgctggggtactgctcggagagccagggccggcagctggagcggctgctggtgttcgagtgcatggccaacggcaacctgagggactgcctagacctgaagcgagggaggaagcccatggactggcagacgcgggtgagcgtcgcgctcggcgccgcgagggggctggagtacctgcacgaggcggcggcgccgcgcatcctccaccgcgacatcaagtccaccaacatcctcctggacgacaagttcagagccaagatcactgacctcggcatggccaagtgcctgatgaacgacggcgtgaccagctgctcgagctccccggcgcggatgctgggcacgttcggctacttcgcaccggagtacgccatcgtgggcaaggcgtcgctcaagtccgacgtcttcagcttcggcgtcgttgtgctggagctcatcaccggccggcagcccatccacaagtcgtcgtcgacgagggccgacgagagcctcgtactctgggcgacgtcgcggctgcgggacagcgggctggtggtcacggagctgccggacccgacgctgcagggcaagttcccggcggaggagatgcagatcatggcgcacctggcgcgggagtgcctgcagtgggaccccgaggccaggcccaccatgacggaggtcgtgcacatcctcgccaccatcgcaccactccagcacggcgccaagcgtcggaaccttcccatcgccaccgccttcaacctcacgccatcgccgcacgtcgggcggtgtgacccggagcctaaagacgacgacatcgagaggcagatgcagcagcaggagtgctcgccgacgacggctgtccagtggcaacaacaacaagcgcgctgcacccacgcgccaacgggccgcgcgtcgtggcccggcgacagggggaacgttgtgagcagaggcgcggcggtgtcgggcgagctggtgaacgggacggtgctgatgaacccccacgggcggggcagctggcggcggccgccgccgcttggcgacgaggaggcagtggacgtggatctgacggagccccggatggaggcgttcacgcagccggcggcgtttcagcctttcaggtgacggaaggattaggatcaggtggtggtggttctgattggtgcggcggcggcgggtgctgctgtacatcttcttgttcgtgcctccacgatccacaccaggatcatctgcttctgcatctgcgttcatgaatgtacagtacaggcaaatacatctagattggcaacgggaaaagaaaagaaaggcatcgagatcgttatgggatataggacctagattgaacacgagatcaatgcatgaatctgaatccacggcgcgcgtcattggacacatcactgttgtacacaagcaaacagacaatgagtgttcacagaagcaaaaaatataagaccgagttcaa

SEQ ID NO: 131018 - DNA, 2598 bp, Zea Mays
acagtgcagtgcattcaatctcaaataaaaagccctgctacagtgctagcagtactcggatccacgaccttctccctccctccgctgctgctccgtcaaggaagggaggaaagaaagggcaggggaatggaggtggaggaagacggccgagccgcccgagtgctgctgagctcccagtgtctctgtctctgatgagatgactggacttatttgatgctcttgccgttctcgacttggggcgcgagccgatggatctcctccggatgaaacttctcctgccctccttcatcagctgccttcttctgatgcaggcagcactatgtgatggcgccgccgccaccaccaccaccaccggcgaaaacggaacggcaaactggacatgtgtgtgcgcagctcatcctctcggtgaaccagactccaacagcagcttgctgtccaattgctcttcctcctgccattgccaccgagcagatgagaacggcggcggcggcggcggcggcgcaggctcgtggaactgcacgtgtgcctctggtgatgagggccttcagaaggaagagcatgctgagctacgtgacgggagctgtttcacttcctgcaactgcacgtcgggtactggaacttcagaggaagggagaaagcgtgtctcaagcaaaacagtcatagctacgctcctggtctgcgtggttctcaccaccaccgctttcctcgtcaccaccgtatactacttccgccgcaaggacgccctctctccgcgatcgcagatatactccttcgatagatacactactagctggagcagcaggtcgaacctcgtcagcagtcgatcgtctccgcttccccagatgaaacccaaaccaaagcttggtggtctgaaagagtttctgtgcagctgcaatcttgtcatctgtgggggagagagcggcgcattccccggtgtcgtcgcccggttctcgtacgcagagctggagcaagcgaccgggagattctcggacgaccaccttatcggagtcggtgggtcaagcaaggtgtaccgcggccagctcggcgatggcagagtcgttgccgtgaagaagcttaggccgctaggaggcacggacgaagacttggagttcctgtcagagatcgagctgctgtcgaggctgaaccactgccacgtggtgccgttgctggggtactgctcggagagccagggccggcagctggagcggctgctggtgttcgagtgcatggccaacggcaacctgagggactgcctagacctgaagcgagggaggaagcccatggactggcagacgcgggtgagcgtcgcgctcggcgccgcgagggggctggagtacctgcacgaggcggcggcgccgcgcatcctccaccgcgacatcaagtccaccaacatcctcctggacgacaagttcagagccaagatcactgacctcggcatggccaagtgcctgatgaacgacggcgtgaccagctgctcgagctccccggcgcggatgctgggcacgttcggctacttcgcaccggagtacgccatcgtgggcaaggcgtcgctcaagtccgacgtcttcagcttcggcgtcgttgtgctggagctcatcaccggccggcagcccatccacaagtcgtcgtcgacgagggccgacgagagcctcgtactctgggcgacgtcgcggctgcgggacagcgggctggtggtcacggagctgccggacccgacgctgcagggcaagttcccggcggaggagatgcagatcatggcgcacctggcgcgggagtgcctgcagtgggaccccgaggccaggcccaccatgacggaggtcgtgcacatcctcgccaccatcgcaccactccagcacggcgccaagcgtcggaaccttcccatcgccaccgccttcaacctcacgccatcgccgcacgtcgggcggtgtgacccggagcctaaagacgacgacatcgagaggcagatgcagcagcaggagtgctcgccgacgacggctgtccagtggcaacaacaacaagcgcgctgcacccacgcgccaacgggccgcgcgtcgtggcccggcgacagggggaacgttgtgagcagaggcgcggcggtgtcgggcgagctggtgaacgggacggtgctgatgaacccccacgggcggggcagctggcggcggccgccgccgcttggcgacgaggaggcagtggacgtggatctgacggagccccggatggaggcgttcacgcagccggcggcgtttcagcctttcaggtgacggaaggattaggatcaggtggtggtggttctgattggtgcggcggcggcgggtgctgctgtacatcttcttgttcgtgcctccacgatccacaccaggatcatctgcttctgcatctgcgttcatgaatgtacagtacaggcaaatacatctagattggcaacgggaaaagaaaagaaaggcatcgagatcgttatgggatataggacctagattgaacacgagatcaatgcatgaatctgaatccacggcgcgcgtcattggacacatcactgttgtacacaagcaaacagacaatgagtgttcacagaagcaaaaaatataagaccgagttcaa

SEQ ID NO: 131019 - DNA, 2275 bp, Zea Mays
acagtgcagtgcattcaatctcaaataaaaagccctgctacagtgctagcagtactcggatccacgaccttctccctccctccgctgctgctccgtcaaggaagggaggaaagaaagggcaggggaatggaggtggaggaagacggccgagccgcccgagtgctgctgagctcccagtgtctctgtctctgatgagatgactggacttatttgatgctcttgccgttctcgacttggggcgcgagccgatggatctcctccggatgaaacttctcctgccctccttcatcagctgccttcttctgatgcaggcagcactatgtgatggcgccgccgccaccaccaccaccaccggcgaaaacggaacggcaaactggacatgtgtgtgcgcagctcatcctctcggtgaaccagactccaacagcagcttgctgtccaattgctcttcctcctgccattgccaccgagatgagaacggcggcggcggcggcggcggcgcaggctcgtggaactgcacgtgtgcctctggtgatgagggccttcagaaggaagagcatgctgagctacgtgacgggagctgtttcacttcctgcaactgcacgtcgggtactggaacttcagaggaagggagaaagcgtgtctcaagcaaaacagtcatagctacgctcctggtctgcgtggttctcaccaccaccgctttcctcgtcaccaccgtatactacttccgccgcaaggacgccctctctccgcgatcgcagatatactccttcgatagatacactactagctggagcagcaggtcgaacctcgtcagcagtcgatcgtctccgcttccccagatgaaacccaaaccaaagcttggtggtctgaaagagtttctgtgcagctgcaatcttgtcatctgtgggggagagagcggcgcattccccggtgtcgtcgcccggttctcgtacgcagagctggagcaagcgaccgggagattctcggacgaccaccttatcggagtcggtgggtcaagcaaggtgtaccgcggccagctcggcgatggcagagtcgttgccgtgaagaagcttaggccgctaggaggcacggacgaagacttggagttcctgtcagagatcgagctgctgtcgaggctgaaccactgccacgtggtgccgttgctggggtactgctcggagagccagggccggcagctggagcggctgctggtgttcgagtgcatggccaacggcaacctgagggactgcctagacctgaagcgagggaggaagcccatggactggcagacgcgggtgagcgtcgcgctcggcgccgcgagggggctggagtacctgcacgaggcggcggcgccgcgcatcctccaccgcgacatcaagtccaccaacatcctcctggacgacaagttcagagccaagatcactgacctcggcatggccaagtgcctgatgaacgacggcgtgaccagctgctcgagctccccggcgcggatgctgggcacgttcggctacttcgcaccggagtacgccatcgtgggcaaggcgtcgctcaagtccgacgtcttcagcttcggcgtcgttgtgctggagctcatcaccggccggcagcccatccacaagtcgtcgtcgacgagggccgacgagagcctcgtactctgggcgacgtcgcggctgcgggacagcgggctggtggtcacggagctgccggacccgacgctgcagggcaagttcccggcggaggagatgcagatcatggcgcacctggcgcgggagtgcctgcagtgggaccccgaggccaggcccaccatgacggaggtcgtgcacatcctcgccaccatcgcaccactccagcacggcgccaagcgtcggaaccttcccatcgccaccgccttcaacctcacggtgagctcctcctcctccccaatcacgtacgtacgtacatctcttgcaaaaagcgccacgcgtgcatgctgatttcaaacatggcacggcgcaccgtgcacgtacgctcaactctgcagccatcgccgcacgtcgggcggtgtgacccggagcctaaagacgacgacatcgagaggcagatgcagcagcaggagtgctcgccgacgacggctgtccagtggcaacaacaacaagcgcgctgcacccacgcgccaacgggccgcgcgtcgtggcccggcgacagggggaacgttgtgagcagaggcgcggcggtgtcgggcgagctggtgaacgggacggtgctgatgaacccccacgggcggggcagctggcgg

SEQ ID NO: 131020 - DNA, 5498 bp, Zea Mays
atgtccaacacttcaggaggatcattgatggacggagcagctggaggcaacctggcaagcaggaatgacagccagggcgtcattagtagctctcactcagggtcagaccacgtgaccaaagtgccgagcgtgaggaggcggacacatcctcccatgaggttggggagtgaggtgccagagccatccccgaagatgcggaaggtggtaaatgaggaggatacaccttgtggagcttcaaatacgggcaagatcagtgcttcaccttctgcggtgtcgagagatcccaacggaacttctacctccgaagaccatgctggagggcattcaagtgagtatgccacagttgggaatgctaggggctcaccaattaaacgaagatgtatgcagacaagtcactacttgggactatttacacccctaaaagggaaacacacagatgaagttgctaaatccaagcaatcaactgtttccacaaaaacaaagaagtttaaggaaattcaatttcagaaacttcagagattgccagatgggtgccatcctgattttgataatgatcatctgtgttctgtaaataatcatgacctgcttcctgaaatgagtactccaagtgctgaccttcatctacttactgagacaggagtggaaaacatgaggacacctaaaagtcttcacgctgaacttaagcgtgagctgtcaaagctaaatacggtgttaaagctaccagataatgtactctttctggccaaccagttccttgaatatcttttaaataatcatttagttgtgcgggagccacggagcatactgcatgcgttcaacatagccttgtgttggcgtgctgcttcttttctgaaatacactgagttggatcatcgagaatcacttgcccttgcttcagatggattgaattatgaatgcaatgaggagctcgcagaacttttctataaaaaaataggcatcctaaaagaaaaggttgcacataaaccaggtggaataatcaatggtagattatcaccacatgagagctcatctgctaacttgagaagtgaccacagtttccggaagcaggcaatggatcttcatggtaacttcacaaaaggcactgaagatagcccatctgccactgatcagatggtgatggtttcagatgaacaagaattgctatctgctccagatgctggtagagaacatctcttaagtgaagaatcttctagtagtgctgcaatgaaaagaatagatttatttaacagcatatttttctcaagagagagggatatcattgagaagcaacaacttgagatattaaatttaagaacactgagagacaatcaagttaagaaactgaaagaggtatgccatgcagttgttcaacacattcggataagtaacattgacgaagagatggaaattgaccaaataaagttagtaattcagtggttcactatgtttatgcattctttcttggcgcacatcaggctccagtttttcaaacttgatgcactgcattctacaacactggctgaagaggaactgatgaaggaaaaactcaaacaggaagtagtatcaggtgaattagaccaatttcctgatcattgcgttactctaccagattccaattctgtcattgaggaatttatccattttaagaaacaaaatgatgatagtcatgttgaccaaaaaatggctttggatggtgaccagcttatggatgacagaccgatggaaattactattttacgcagtttgttttcaccagaggcttgttctacacttgcagtgagaaatgagcctacagaagctcatttgaggtctggtgggagagcatcatcagaatatgtagatcttccagataacaataatcactgtatttctgttggaattgactaccaaggaggttgttctgctagttctattcctacaagtcatggttcaatcaatcaggaattttcgactggtgatgacagaaatattgaacatgccaagggtgacattattgctaatccaagtatggttccaggaagtgcaacttctcttgtggtaatcaatgcagaaaatgatagtactgttgcagcagatccagaccacttggaatcacatattttggcttctgtcacgaccttgcagcatccaacatcagaagaaccgtctgatacattacatgcaatggcagttcaggatctgcaaactgagatgcaaacaacatgcccaacattgggtgctcaacatcagaaggtgtgccctgatgattctagtaaaatgaaccatgaaccagatacaacaactggaatgttgcaggaagggacaacttctgaccatttaggtgattccagtaaggtgaacgttgaaccagatataacaactggaatgtctcaggaagggaaaacttctgaccatttagatgattccagcactggagttaaagaaaaaaatattgacactgtcattgcagatccattgaattcagaaaatcaatcttatattgctatgccagaagcttgggtagctgaaattcagagtgatcagtcaagtatgcctgcacaacatagtacaagtcttcctactcagcggaagttaccagttttgggacatccaccagaagaagcaaatccatcaagtaatttggacacagaggctgcccagaagccagatattcaaccatcaagctcaacgttggatgctgacagctctgaaacaaggcatcagccagaaactacaacagttctgtcacaggtaggcagtaaaaatcacgatgttggcacttttcacgcacaaaaagcccaatcagactcaccaattttggctgccccacaaagcacagctatgttgtcacttcctttggaggctggaactcctgctaatgtatcaagtacgtcttccctgcaaagtaacggtgtatcttcaaggcacacacctgctgtttcagaatcatcaggtatgttgggcactcagccagaacaggatttgcatcatgacctggggccatccatgtcattgttgggtgttccacttcaaagaatgctcccagatgacaggagccaaacagtctgtcagccagatagaggaactgatttgtcagggaaaggcgaaactgaatatctagcttgtaccaccagcgatctgtccacccttccactttctggtgaagctgaaactgagaatggtcaagcaagtatgcctgcacaggaaatcacaagtccccatgcccaacatagtttagctttagcaacttcacagcatccagttggtgatttgcagccaccgacgttgattctgtctgaggaaacagaaagggctggtctcttgtgcacctcagcatctcaggatttgcaactgtcaatgataacacaggaggatgttccacttgaaagaactgatctgtcgggcatgcctgtgacacaaagtacaactgttctgcagagtgtggaaccttcatgtgatccacatgcagaagaggcaggtacttggggtatgttgtcagctccagatttgcagtccagaatgcagtcatcatctcaattgcaggatcaaattgcggaagcagaaggagcaggcatttttggcaccattccagctcagaacttgcagcctgaaacgtggtcatcaacctcagctcagcatatctcaccattgaggacacaccctgatgagagaattcaaataggtcttcagccaaatacgacaccggttcctgagctgctaggccaactatctacattgacacctgcaggtctattgtctagtaacgaaccactaatgaatgagcttgaaaaactgaaatactgcaacgccgtgctctgtaaaaaccatgaacagaagaaatcacaacttcaaacagagtgcaaccaagaaatagagaaggtaaaggagaagtatgagttgttacgtcaagaggaagattctgtgtatcatcgattgaccacagaccttaaccgtatctacacgaaagttcttgtaaatcaatcactagctgaattctttaaagcatctctagttcaagagagatctgcaaggcccacaatttggcaggcaccccagtcctctcagcatgctccgtgtgggacaacagcagctcaagccacactattaccggttgcctcatctttagccactcgaccaacagttttgatgtcatatcatacaacaggacctcacctcccaccttcacaggtggctcggccaccggcttctggggctatccaactgcaacctgttttacctggaaaccattccagagcagcaccatcacctgttggttcaatgcatccacgacatggaatctacagagctgttggagcacaatcacgtgggcctgctcctcatctccagcaactcaggatgccagcaccgtttgcaatggttcacagagatggacagcatccacccagtatcatgaatcccggggttataccatcgagacagtctgtccatggtaattttgaaagctctgcttctggcaatgcactggcaggtatctcatttgcatccatggcaccaagttcaggtcaccaggcgatgtcgtccacatcagactcacatccagttttcccagcatcctcgcttctaccaggttcaggtccagggtcgatgacaaactttgtgcggtcaagtaccagaatccctgttgtcatggcgagcgaacaagcaccacgcctgaatccatatgttcaccacatcggaggtggtccactgaacgctgcaccagcaggaattcagcaagctagagctcatataggacgcactcctcaggctgcctcagatcagagtcaggacgtgctgcatcgcctactactacagttgcccgaagtcatggcgccaagcttagctcagccaaccgcatcaagctcacacccggctcccatggcagcccggcagcaagcagggctactgaatccagctcctgacaacgtggcatgtccactgaacgcagtggctggagttgggcgccccggagcccgcataggcagccagtcgtaccaggtatcggcttcgttgctcgagtgggaggcgacgctcagggttggcctgattcgtggacaccaaggcacgtaccccttgggacagggatgttctgacctggctggaggaccccccggcacatccgctgcccagggatgcggctccggcgccagcagagaggtggtgtgcctatctgatgacgaggagtagcatagcgtagagagtagtagttttttttttgggctgggctggtctgtgcaacgtagatgtgcatgggttggataggcaacagtagagcggcacgatatcgtcgcccccttttagcagcagcggcatccttggaagcaggagatgtctggctctgatgagggtagtatgtcgtatttttggggggtgggggactggtggcgtggcgtggcggcagcagcatattagtgaatagtgatagcatatgaaccctaattctgatatatagtcttgtcgtttcatagcctggtggtgattgtttggtgtggggctggaatgatcatatattattatta

SEQ ID NO: 131021 - DNA, 363 bp, Zea Mays
atgtcgaacatcgggcagtccttccaggccggcaaggcggaggcccagggcgagtaccaggcggagcacgcggcgcagtgcgtcaaggacaccgccggagccgcggccgacagcgcgcagctgcagcagcaccgcgccaccggcaccgttgagcaggctgctgagcaggtggcgcagacgggccagggcgtggcggcaggcgtcaaggacacggtggcgggcgcggcggttggcgtcaccaacacggtggcgggcgtggcggcgggcgtcacgaacacggtgaccggcgcggtggcgggcgtcacgaacacggtgaccggcgcggcggcgggtgtcaaggacaccgtgaccggcggccactga

SEQ ID NO: 131022 - DNA, 3534 bp, Zea Mays
ctctgcagcagagcctctgccattcctgcagatgcggtagtagtgtctgtcgacaaacgaactaccagactgtgcctctgacatggcgcagcactagaagcagcagaggcactgcagcagctagaatagaactagaaagccgatccaggtttcaggctttcagctcccgaaagtgctttctaggaaagtggcggcgggttctcttctgatggaggccagagtaacggtcctggccctgctgctagtgacagtatggtcaatctcgtgcaccagggctggcgccgccggcgacgagcgggcggcgctactcgcgctcaaagcgggcttcgtcgactcgctgggcgcgctcgccgactggacggacggcgccaaggccgcgccgcactgcaggtggacgggagtgcggtgcaacgccgccggcctcgtcgacgagctcgacctctccgggaagaacctgagcggcaaggtcacgggcgacgtgctccggctgccgtcgctcgccgtcctcaacctctcctccaacgcgttcgccaccgcgctgcccaagtccctggcgccgctgtccagcctccgggtgctcgacgtgagccagaactcgttcgaaggcgcgttcccggccggcctcggcgcctgcgctggcctcgacaccgtcaacgcctccggcaacaacttcgtcggcgcgctccccgccgacctagccaacgccacgtcgctccagaccgtcgacctcaggggcagcttcttcggcggcggcatcccggcggcttaccggagcctcaccaagctcaggttcctgggcctctccggcaacaacatcaccggcaagatcccgccggagctcggcgagctcgagtcgctcgagagcctcatcattggctacaatgcgctggagggtaccatcccgccggagctcggcggcctcgccaacctccagtacctcgacctcgccgtcggcaacctcgacgggcccatcccggcggagctcggcaggcttccggccctcaccgcgctatacctgtacaagaacaacctcgaaggcaagataccgccggagctcggcaacatctccacgctcgtcttcctcgacctgtccgacaactcgctcacgggcccgatccccgacgagatcgcgcagctgagccacctccggctgctcaacctcatgtgcaaccacctcgacggcaccgtgccggcgaccatcggggacatgccgagcctggaggtgctcgagctgtggaacaactccttgacagggcagctgcccgcgtcgctcggtaacagctcgccgttgcagtgggtggacgtgtcgtcgaactccttcaccggccccgtcccggctgggatctgcgacggcaaggagctcgccaagctgatcatgttcaacaacggcttcaccggcgggatcccggccgggctcgcgtcgtgcgcgtctctggtacgcgtgcgcatgcagagcaaccggctcaccggcacgatccccgttgggttcggcaagctgccgtcgctgcagcggctcgagctcgcaggcaacgacctgtccggagagatccccggcgacctagcgtcgtcgacgtcgctctcattcatcgacctatctcacaaccacctccaatacacgcttccgtcgagcctcttcacgatcccgacgctgcagagcttcttggcgtcagacaacctcatctccggcgagctccccgaccagttccaggattgcccggcactggcggcgctagacctgtcgaacaaccggctcgccggcgcgataccgtccagcctcgcctcgtgccagaggctggtgaagctgaacctcaggcacaaccggctcacgggcgagatacccaaggcgctcgcgatgatgccggcgatggccatccttgatctgtcgagcaactccttgaccggccacataccggagaatttcgggagctcgccggcgctggagacgctcaacctctcctacaacaacctgacggggcccgtgcccgggaacggcgtcctgcgttccatcaacccggacgagctggcgggcaacgccgggctgtgcggcggcgtgctcccgccgtgcttcgggagccgcgacacgggcgtggcggcggcgcggccccgaggcagcgcgcgcctgaggcgcatcgcagcgagctggctcgcggcgatgctcgccgccgtcgccgcgttcacggcgctcgtcggcgggcggtacgcgtaccggcggtggtacgcgggtcgctgcgacgacgagagcctcggcgcggagtcgggcgcgtgggcgtggcggctgacggcgttccagcggctcgggttcacgagcgctgacgtgctggcgtgcgtgaaggaggcgaacgtggtgggcatgggcgcgaccggggtggtgtacaaggcggagctcccgcgcgcgcgcgccgtgatcgccgtgaagaagctgtggcggccggcgccggtggacggcgacgcggcgagcgagccgaccgcggacgtgctcaaggaggtggcgctcctggggcggctccggcaccggaacatcgtgcggctgctggggtacgtgcacaacggcgcggcggacgccatgatgctgtacgagttcatgcccaacggcagcctgtgggaggcgctgcacgggcctccggggaagcgcgcgctgctggactgggtgtcccgctacgacgtcgccgccggcgtggcgcaggggctggcgtacctccaccacgactgccacccgcccgtgatccaccgcgacatcaagtccaacaacatcctcctcgacgccgacatggaggcccgcatcgccgacttcggcctcgcccgcgccctggcccgctccaacgagtccgtctccgtcgtcgccggctcctacggctacatcgcgccagagtacgggtacaccctgaaggtggatcagaagagcgacatctacagctacggcgtggtgctgatggagctcatcacgggtcaccgcgccgtggaggcggagttcggcgaagggcaggacatcgtggggtgggtgcgggacaagatccggagcaacacggtggaggagcacctggacccgcacgtcggcggccggtgcgcgcacgtccgggaggagatgctgctggtgctgcgcatcgccgtgctctgcacggccaaagcgccgcgggaccggccgtccatgcgcgacgtgatcaccatgctcggcgaggccaagccgcggcgcaagagcgggagcagcagcggcggcggcaccgccagcggcaaggacagcgccgcccccgccgtggcggtggacagggacaggccggtgttcagcaccacgccggattcagactacgcctaggcgccatgatagctacttttgcctcgtgttctatgatttgtccatgtacctagattttgctttgctgcaggatcttcttcagcctgtagccaaatgtttactgtgaagattaactagcttataggttatgtagattaatgtaagcaggggaataagctttagaaatttccttacacaagcatcccaaagagaatgaagaaatcaaatcaagccaatcaattttc

SEQ ID NO: 131023 - DNA, 1054 bp, Zea Mays
cctccaacgacaccaaaactcatcatggctagctgcatgcatgattaataagctccatcggctggtatgcatgcacgccgccattgcattgcatgtatatatatgatcccatcccacgccatatcatcgatctcgagtacgcattagccctgctgcctgcacctggctagcttgatttgctagctagggccggatcaggccctatacgactatggtctccaattggtttgtgtttgatcgtcgatcaagatggtctgatggtgcaaagctcatcttgttttgactctgcattattctcccatggtgcaaagctcggtcagattagccttttccaagagagtcaggaggccggttatatattaggcctagcaggcacctgtcttctttagcttggttctgtactttcaaaggcagccagagtgcagttagacaaggaccagtcctactaatcactcgtggttctttctctgacaaactgtgtttcagcagccttccaaaactgtgtcaactcacttgtggttctttatctgaatgcgtgtaggacagatgacattctactggggaacatgtggaaggatcccctttggaagctcgggttaagtcaatctattatttcagagcctgcaatggaagcatgcatcctcctatggcagaggattagcgatgtgaaattactgtagctcttattgtcctaatagagtaggaggagctatagctccaagcatggtggtactggtactagtagtcagcatcagttgaaatcttaagctttcatctgcacaaaatgcaggagtggatctgtttcagaacttggtagcaggaaaaagaagcttccaaagaaggccgtacaaacaccactcctagtttacagcatcttggtctctggctagtactgatcctactagttattagtaatctatcaggtccagaaagctagagcagaggtaatcttctactgtctgcagtgacagggggaatgtaaactgaagatgcaacgcgattaaatttactctgatctctgacaaagtagaaagattaaacaacgccgatcgac

SEQ ID NO: 131024 - DNA, 143 bp, Zea Mays
tgttagtttttttgttgtactaaggactaaacatgatttgggtgtgttaatactttatttattgtctgcacatagtttgtgttcttctgatatggctcatggatcctctaaaatatgtgttaggatttggagatccatgcggg

SEQ ID NO: 131025 - DNA, 693 bp, Zea Mays
atggaggttttagaaattgattggagggcaatacagattgatgatagatgggaagaagaaggagaacaagagactgcctctgagtcaatgatgtatgatcggttaggattgctagcagaagatgaacgtgaaactactgaaaggcaagatgcttttactagtagatcatttggtgtccgccgaagcgatgaatttgatgatgaaacagctgcattgccctgcactgattgcataccacaagaaagggcttacgcgcgaaggattgaaagtgtgggcgacaagtccttttggccacaagtgaccatagccaacgaagtgaatgcacctattggtaagaggagtgttggtcggcaaaggaagaatcggatgaaaagttggaaacggaaacatcgaaaaaatagcactaaacaatggttccccaaaaatatggtcgaatcagctcaacctcaggatgagaacccaccagatgacaccagaagaactgaagttactagtcaaacacaggtgatgttgcgccacggaggtgatgttctgcagcaggagttccagggagtagatgttgggcacttaacgccaccaaggctattgttaggcaccacaactttagttggtcatgttgggcactttaccccacaaaggcacaaaaaacgagcagtaggaaagaagttgacgccgaagaagaaaaatgtttga

SEQ ID NO: 131026 - DNA, 6824 bp, Zea Mays
atgcagcccagcgggggggcctccggcagctcccggggctcgccggcgtcgtcgccgcacccggaccaccagcagccgccgaccccggcgtccgcgcagcagcaagcgcagcaactagggtttaggggccagggaatgatgcatcaccatgaacagcagcaagccttccactctggtgcgccgcatggcatgatgggaccaggcggcgtgaacttccctcagtcctccggtccagtgtcgtccttccagggtcagaggaatctgccgctgtccagtggtggaccgcagggcatggttggaggtcagatgcacaaccaggttgcgatgcagcaacagttcctgaagcttgcgatgcagcagcagcagcagcagcagaaggcggcccaggggatgctcctccagcagcaggccaagatgaatatggcgggttcatcatcaagagaccaggacatgcttaacaaccctgccaagatgcaggagcttatggctcttcatcaggcccagatgtataagcggcagtgtgagcagaaagagcaggggcagtcaagtggtagtgagcaaagaagcggtgatatgaggccacctatgcctcctcaaggagtccctggacagcagttgccatcaatgggtatgatcaggcccatgcagccaatacaaggccaggtaggaatgggcagcgctggtgggaacccgataacaccaacacagtttcaagccatccaagcctgggcaaaagagcacaactttgatctgtccaatcctgcaaacataagtgcaatttctcaactcctgcccatctggcagtccaacaggatggcagccatgcagaagcagaacgaggcaaacatggctgcgcagcagcagcaagcattgccctctcaggtgaacagtgataccccagggcatgtcaatgctcccagccagggtgccctactgaagccccggcaaccccttgcccccagctcaatttctggcggggaagaggctaaggtagtgaattcgagcaacttgcagttgcaacaacagttccctgtgcataacagggatggttcaaatgaaagggctgtgaggtcacttatgacagggggcaatggtgcgcaaacgacgcatatcccccaaagttctggacatgtaaataagattcccgagcaacccaatccaaaaaatgtgcttgcaaattccgaagcaatgcagatgcagcatgtgagacagatgcaacagcttaaccaggctgctgcccccacatctaccccaattgaagcaggaggatcacaggtcccaactagtgctcagccacaaacagggcaaacgggtttcaccaaaaatcaacttcatgtactcaaagctcagatattagctttccggcgtttaaagcgtggtgaccgactcccgcctgaagttcttgaattaattgtatctggtcggccacctgattcacaaggacagcagcaagtttcgggaccccaggtaacacataaccgtgaaagacctactgtaagcaatgctgatgaacatggaaagcagatggagagtggtggtaaagctcctgaaaaacctgcattgttgaaaggaccctgtttaccaaaggtggaggtttctacttcagaagacaaagctagtcctgccagtggtcctggtcccgcgcaagtgatgaaagcttcaccaaaagagcctcttaaaattggaccagtgtctgtaccagaacattgtaacactactgtgattaaatctgagcaggatctggaacggaacatccagagaacacctgggcgaagtgattacaatgctgagaggggtaaatctgtaccagcagaaagtggttcagtggatgttgagcaggcaaaaaggactggctccacaagcagtgcccctgttccaagagatgttcccagaaaataccatggcccattattcgatttcccatccttcactaggagacacgattccatgggatctgcaaattacaacagcaatctgtcactaggttatgatgtgaaagatttattagctcaggaggggatgatagttcttggtaggaaacgtgaggataacttaaaaaagataagtggtttgcttgcaatcaatctagagaggaaaagaatccgacctgatcttgtcttgaggctacagatcgaagaaaagaagctcaaactcctagagcatcaggctcgtctaagggatgaagttgagcatgaacaacaagaaatcatggcaatgccagataggatatacagaaagtttgtcagacaatgtgaacgccaacgtgttgagcttgtaaggcaagttcagcagatgcagagagcttcaagagagaaacagctgaaatccattttccagtggcgcaagaagcttttggaggcacattgggccattcgtgatgctcgaataactcgtaatcgtggggtggccaagtaccatgaaaggatgttgagagaattctcaaagaagaaagatgatgaccggaacaaaagaatggaggcattgaaaaacaacgatgtggaaagataccgtcaaatattgttggaacagcagactagtgttcctggtgatgcagctcaaagatacaatgttctatcttctttcttgacccagactgaagagtatctttataaactaggaggaaaaataactgctaccaagagtcagcaacaagtagaagaggcagcaaatgctgctgcagcagctgcacgggcacagggcctgtctgaggaagaagtgaaggctgctgcacaatgtgctggtcaggaggttatgataaggaacacattctctgagatgaatgcaccaagggataatacatctgttaacaagtactatactttagcccatgctgtgagtgagagagttactaagcagccatcactgttgcgagcaggaactttaagggactaccaattggtgggcctacagtggatgctttctttgtacaataataagttgaatggcattttggctgatgagatgggtcttggcaagactgtacaggtcatggcattggttgcgtacctgatggaatttaaagggaattatggccctcatctcataatagtgccaaatgctgtcttagtcaattggaagagcgaactgttaaattggttaccatctgcatcttgtatcttttatgttggtgcaaaggaccaaaggcagaagttgttctctcaagaggttatggccatgaaatttaatgttcttgtaacaacatatgaatttgttatgtttgatcgttccaagctttcaagggttgattggaagtacattataattgatgaggcacagaggatgaaggacagagactccgtcttggcgcgtgatcttgatcgctatcgctgccagcggcgcctccttctcaccggtactcctctacagaatgatctcaaggagctttggtccctcttgaatttgttgcttccagaagtatttgacagtagcaaggcattttcagattggttctctaagccttttcagagggatggtcctacacataatgaagaagaagacgattggcttgagacagagaagaaagtaataataattcacaggctgcatcagattttggaacctttcatgctacgtaggcgtgtggaagatgttgaaggatcacttccacggaaggattccattgttttgagatgcagaatgtctgccgttcaaggagctatatatgattggatcaagtctactggtaccattagagttgatcctgaagatgagaaaaggcgtgcacaacggaatcccatgtaccaggtcaagacatacaagaatctcaataacaagtgcatggagctgaggaaagtttgtaatcatcctctgctgtcatatccattcttaaatcatgggaaagattttatgatcagatcttgtgggaagttgtggaatcttgatagaattttaattaagcttcacaagtcaggccatcgtgtacttctttttagcaccatgacaaagcttcttgacatcatggaggactatttgcagtggagacgacttgtttataggcgaattgatggaacaacaagcctggaagatcgagagtcagcaattgttgacttcaacaggcctggttctgattgttttatattcttgcttagtattcgtgctgctgggaggggtctgaatcttcagagtgcagacactgtcgtaatatatgaccctgatccaaatccacaaaatgaggagcaagcagttgctagggcccatcgtatagggcagacaagggaggtaaaggttatttacatggaggctgttgttgataacatatcaagttatcagaaagaggatgaattgagaaatggagggagtggagatttggaggatgatcttgctggaaaagatagatacatgggatcaattgaaagtctcatccgcaacaatatccaacaatacaaaattgatatggcagatgaggtcattaatgctggtcgttttgatcaaagaacaacccatgaggaaagacgaatgactctggagacactcctgcatgatgaagagagatatcaagactctgttcatgatgttccttcattgcaggaagtgaaccgtatgattgctaggactgaaagtgaagtcgagctttttgatcagatggatgaagactttgattggacaggtgatatgacgaagcatcatcaggttccaaagtggcttcgtgttaactccaatgaagtagatgctgtggtggctagtctgtccaaaaagccgtcaagaaatatgtcatctgggggcattgctttagacactaacgaaacacttgagaaaagaagggggcggccaaggggtacgggcaagtactccatctacagggagatcgatgatgaagatcttgaagaatctgatgaagattctgaggagaggaatactgcatccctacctgaagaaggggaagtaggggaattcgaagatgaagaagacaatgatgactcagtacctgataacaaggatgaatcagaggaagaagagcctatgaatgatgatgtatatgaatttactgaaggattaagaggcagaaaagctaataggatggaagaagctggttcaacaggctcttcttctggaagcaggagattaccaccacctgtaccttcctcatcttcaaaaaaattgcggtctctatctgcattagatgcccgcccaggcactttgtcaaagagaactccggatgacctagaggaaggtgagattgcaatgtctggggactcacatatggacctccagcagtcagggagctggaaccatgaacgtgatgacggtgaggatgaacaagtactacaaccgaaaataaaacgcaaacgaagtattcgtcttcgtccaaaacctaatgcagaaaagcaggaagatagatctggagaaggggccttccctcagcgtggtactcatcttgcatttcaaggagatggtcattatgattcacagtttaagtctgacctagatgcccgtgcttttccagctgccaggcagcaagacgcggttcatcctatagtgaaacagaagcgcaacatgtcatctaggaaggtttcaccggcttctaggtctgggaaattgagtcacttgtctgggtctggtgaggggtctgctgaactctccaaggaaaattggagcagtaaggccattgattccactgcccctgagttcggtggcacaaagatgtctgacagtatgcaaagaaagtgcaaaaatgtgataagcaagctttggaggaggattgacaaagaaggtcatcaaatgatacctaacatatcttcttggtggcggaggaatgagaattcgtcgttcagaggtccggctggtagcacacttgacctacaaaaaatcgagcagcgagtcgatgggttggagtacggcgctgtaaccgagttcatagcggacatgcagcagatgttgaaaagcgtggtccagcacttcagctataggcatgaggtccggatagaggccgagaccctccacaacttgtttttcaacataatgaagatcgccttcccagactcggacttcatggaagctaagaacgccatgtcgttttcgaatcctggaagcggtgccgccgctgccccatcatcgtcaaagcacgccgcaccatcccttaagcgcagcagagccagtgccagtgccagtgccagtgaagcagagcagcagcatggctcgggacacagcagcaggcacaatcagcctagcgaggcggtcccgcccagccggtcccacagctccaggtcagagagagaccccagacatggcggcagcagggatcagcacctccaggacggcgccgctgggttgctgcaccctagcgacatgttcatcgtgaagaagaagaggcaagagcgcgcgaggagcggcatcgggtccccttccagctcgggccgaggcgccggacctctgtcgccggccaaccctgggcgtccgggccctgccccctcgcccagaggtgccaggacgccgttccagagggatccaccgccacacccgtctcagcagtcgatgcattcagctgggtctggatggggcagcggcggtgcgcattcggatcatcaagcgggggcaagctcgtcagcacccggcatcggagacatccagtgggcgaagcctgccaagaggctgaggaccgacagagcaggcagaggcggccgagcctaacggttggttcttctttagcgtcatatggatgtgtaaatgcatccacgtagcggatggaggcgtttgataataatcgtcagtgtatttagttcatcgtcctagcaagtcaaactttgctggcagtttttaaaacagttttttaaggaaaatcaggttatatttcagacctctttaattaatttgctggttcgttccta

SEQ ID NO: 131027 - DNA, 5288 bp, Zea Mays
ggttcaagctgatcaatctaatgttgatgtgtccttttttccttttttggttgtgtatcttgatatcagcgtggtgaccgactcccgcctgaagttcttgaattaattgtatctggtcggccacctgattcacaaggacagcagcaagtttcgggaccccaggtaacacataaccgtgaaagacctactgtaagcaatgctgatgaacatggaaagcagatggagagtggtggtaaagctcctgaaaaacctgcattgttgaaaggaccctgtttaccaaaggtggaggtttctacttcagaagacaaagctagtcctgccagtggtcctggtcccgcgcaagtgatgaaagcttcaccaaaagagcctcttaaaattggaccagtgtctgtaccagaacattgtaacactactgtgattaaatctgagcaggatctggaacggaacatccagagaacacctgggcgaagtgattacaatgctgagaggggtaaatctgtaccagcagaaagtggttcagtggatgttgagcaggcaaaaaggactggctccacaagcagtgcccctgttccaagagatgttcccagaaaataccatggcccattattcgatttcccatccttcactaggagacacgattccatgggatctgcaaattacaacagcaatctgtcactaggttatgatgtgaaagatttattagctcaggaggggatgatagttcttggtaggaaacgtgaggataacttaaaaaagataagtggtttgcttgcaatcaatctagagaggaaaagaatccgacctgatcttgtcttgaggctacagatcgaagaaaagaagctcaaactcctagagcatcaggctcgtctaagggatgaagttgagcatgaacaacaagaaatcatggcaatgccagataggatatacagaaagtttgtcagacaatgtgaacgccaacgtgttgagcttgtaaggcaagttcagcagatgcagagagcttcaagagagaaacagctgaaatccattttccagtggcgcaagaagcttttggaggcacattgggccattcgtgatgctcgaataactcgtaatcgtggggtggccaagtaccatgaaaggatgttgagagaattctcaaagaagaaagatgatgaccggaacaaaagaatggaggcattgaaaaacaacgatgtggaaagataccgtcaaatattgttggaacagcagactagtgttcctggtgatgcagctcaaagatacaatgttctatcttctttcttgacccagactgaagagtatctttataaactaggaggaaaaataactgctaccaagagtcagcaacaagtagaagaggcagcaaatgctgctgcagcagctgcacgggcacagggcctgtctgaggaagaagtgaaggctgctgcacaatgtgctggtcaggaggttatgataaggaacacattctctgagatgaatgcaccaagggataatacatctgttaacaagtactatactttagcccatgctgtgagtgagagagttactaagcagccatcactgttgcgagcaggaactttaagggactaccaattggtgggcctacagtggatgctttctttgtacaataataagttgaatggcattttggctgatgagatgggtcttggcaagactgtacaggtcatggcattggttgcgtacctgatggaatttaaagggaattatggccctcatctcataatagtgccaaatgctgtcttagtcaattggaagagcgaactgttaaattggttaccatctgcatcttgtatcttttatgttggtgcaaaggaccaaaggcagaagttgttctctcaagaggttatggccatgaaatttaatgttcttgtaacaacatatgaatttgttatgtttgatcgttccaagctttcaagggttgattggaagtacattataattgatgaggcacagaggatgaaggacagagactccgtcttggcgcgtgatcttgatcgctatcgctgccagcggcgcctccttctcaccggtactcctctacagaatgatctcaaggagctttggtccctcttgaatttgttgcttccagaagtatttgacagtagcaaggcattttcagattggttctctaagccttttcagagggatggtcctacacataatgaagaagaagacgattggcttgagacagagaagaaagtaataataattcacaggctgcatcagattttggaacctttcatgctacgtaggcgtgtggaagatgttgaaggatcacttccacggaaggattccattgttttgagatgcagaatgtctgccgttcaaggagctatatatgattggatcaagtctactggtaccattagagttgatcctgaagatgagaaaaggcgtgcacaacggaatcccatgtaccaggtcaagacatacaagaatctcaataacaagtgcatggagctgaggaaagtttgtaatcatcctctgctgtcatatccattcttaaatcatgggaaagattttatgatcagatcttgtgggaagttgtggaatcttgatagaattttaattaagcttcacaagtcaggccatcgtgtacttctttttagcaccatgacaaagcttcttgacatcatggaggactatttgcagtggagacgacttgtttataggcgaattgatggaacaacaagcctggaagatcgagagtcagcaattgttgacttcaacaggcctggttctgattgttttatattcttgcttagtattcgtgctgctgggaggggtctgaatcttcagagtgcagacactgtcgtaatatatgaccctgatccaaatccacaaaatgaggagcaagcagttgctagggcccatcgtatagggcagacaagggaggtaaaggttatttacatggaggctgttgttgataacatatcaagttatcagaaagaggatgaattgagaaatggagggagtggagatttggaggatgatcttgctggaaaagatagatacatgggatcaattgaaagtctcatccgcaacaatatccaacaatacaaaattgatatggcagatgaggtcattaatgctggtcgttttgatcaaagaacaacccatgaggaaagacgaatgactctggagacactcctgcatgatgaagagagatatcaagactctgttcatgatgttccttcattgcaggaagtgaaccgtatgattgctaggactgaaagtgaagtcgagctttttgatcagatggatgaagactttgattggacaggtgatatgacgaagcatcatcaggttccaaagtggcttcgtgttaactccaatgaagtagatgctgtggtggctagtctgtccaaaaagccgtcaagaaatatgtcatctgggggcattgctttagacactaacgaaacacttgagaaaagaagggggcggccaaggggtacgggcaagtactccatctacagggagatcgatgatgaagatcttgaagaatctgatgaagattctgaggagaggaatactgcatccctacctgaagaaggggaagtaggggaattcgaagatgaagaagacaatgatgactcagtacctgataacaaggatgaatcagaggaagaagagcctatgaatgatgatgtatatgaatttactgaaggattaagaggcagaaaagctaataggatggaagaagctggttcaacaggctcttcttctggaagcaggagattaccaccacctgtaccttcctcatcttcaaaaaaattgcggtctctatctgcattagatgcccgcccaggcactttgtcaaagagaactccggatgacctagaggaaggtgagattgcaatgtctggggactcacatatggacctccagcagtcagggagctggaaccatgaacgtgatgacggtgaggatgaacaagtactacaaccgaaaataaaacgcaaacgaagtattcgtcttcgtccaaaacctaatgcagaaaagcaggaagatagatctggagaaggggccttccctcagcgtgctgccaggcagcaagacgcggttcatcctatagtgaaacagaagcgcaacatgtcatctaggaaggtttcaccggcttctaggtctgggaaattgagtcacttgtctgggtctggtgaggggtctgctgaactctccaaggaaaattggagcagtaaggccattgattccactgcccctgagttcggtggcacaaagatgtctgacagtatgcaaagaaagtgcaaaaatgtgataagcaagctttggaggaggattgacaaagaaggtcatcaaatgatacctaacatatcttcttggtggcggaggaatgagaattcgtcgttcagaggtccggctggtagcacacttgacctacaaaaaatcgagcagcgagtcgatgggttggagtacggcgctgtaaccgagttcatagcggacatgcagcagatgttgaaaagcgtggtccagcacttcagctataggcatgaggtccggatagaggccgagaccctccacaacttgtttttcaacataatgaagatcgccttcccagactcggacttcatggaagctaagaacgccatgtcgttttcgaatcctggaagcggtgccgccgctgccccatcatcgtcaaagcacgccgcaccatcccttaagcgcagcagagccagtgccagtgccagtgccagtgaagcagagcagcagcatggctcgggacacagcagcaggcacaatcagcctagcgaggcggtcccgcccagccggtcccacagctccaggtcagagagagaccccagacatggcggcagcagggatcagcacctccaggacggcgccgctgggttgctgcaccctagcgacatgttcatcgtgaagaagaagaggcaagagcgcgcgaggagcggcatcgggtccccttccagctcgggccgaggcgccggacctctgtcgccggccaaccctgggcgtccgggccctgccccctcgcccagaggtgccaggacgccgttccagagggatccaccgccacacccgtctcagcagtcgatgcattcagctgggtctggatggggcagcggcggtgcgcattcggatcatcaagcgggggcaagctcgtcagcacccggcatcggagacatccagtgggcgaagcctgccaagaggctgaggaccgacagagcaggcagaggcggccgagcctaacggttggttcttctttagcgtcatatggatgtgtaaatgcatcc

SEQ ID NO: 131028 - DNA, 774 bp, Zea Mays
attccagcagtaatgacttttattaacgatgtaatgtcatgcacaaatatctttggtccaaaggaagagcactagccaatggccaccgcgctccaccatccaagatggccaagagtagagcagagagggaaagaaagaaggaaaataaaaggtagcatgcagctaactaaaaggaggtggagtgaactgtgaagcatatacctgtgacgagcatatccatggaagatgccgccggagcagatgcaccccagctactccgatccccgtgtctatctctctgtcctgtcgtcctccccaagatctcaccagctataaatcgagtgagtgcgaacgccggcctcactcttgatcggagcgagtagctaggcagcatgacgcatgagatgaacgggtccctgaatctctgtcagcatatatacacatacacggaggtagccgccgccgaattcgtcgtgctcccatgtccatccgattggtcgtcatcaaggctgtctagagctcaagcagcagcaggaggaggttcagtgctccgcatccatatcgtcgccgtcgtcgacgacaatgcgtcggccatgtcgggcgggcagccggagggagatgctgtggcgtcgccgccggcgccacgcgtggcgttgtcttttcctgctctggttctcgattcttccctggaacaatcggaaccgaagccggcgagcgagggcggcgtctgatcgatcctccgtatgtgcagtgcagggcaagttgaatcctttggcatgtactcctatcctaacg

SEQ ID NO: 131029 - DNA, 2028 bp, Zea Mays
gcgagctataaaaccggaggagaagcagctgccaagttgcatccaatacccccacgaacccactctctctccccacgatggcaaaaatggcgatggcgtcctcccgcctcccggctctcctctgcctcgccgccgtcgccgtcgccgtcgcggcggaggccgccgccgccgccggagaaggcggcctccgcctgccccgcgacgccacgttcccggcggcgcaggcggagcggctcatccgcgcgctcaacctcctgcctaaggagaaggaggcggggccggccgcgggcggcggcgacgggcccagcgtggcgcccggggagctcctagagcgtcgcgtccggctgcccggcgcgcccgccggcgtcggggacctcggccaccacgccggatacttccgcctgccgcacacgcacgacgccagaatgttctacttcttcttcgaatcgaggggcaagaagaaggaggacgaccccgtcgtgatctggctcaccggagggcccggctgcagcagcgagctggccgtcttctacgagaatgggcccttcaccattgccaacaacatgtcgcttgtctggaacaaattcggttgggacacgatctcaaatatcatatttgttgatcagccaaccggaactggctttagctacagctctgatgatcgtgatactcgtcatgatgagattggtgtcagcaatgacctatatgactttctccaggtgttctttaagaagcacccagaatttgcaaagaatgacttctttataactggagaatcttatgctgggcactacattccagcatttgcaagcagagttcaccaaggaaacaaagcaaacgagggcattcatataaacttgaagggatttgctatcggcaacggtctcactgatccagaaatccaatacaaagcctacacagactatgcgctggaaatgaatcttatcacaaaatccgactacgaaaggatcaataggttcattccaccatgtgaatttgcaattaagatgtgtggtactgacgggaaagcatcatgcatggcagcttatatggtctgcaacaacatttttaactccatcatgaagcttgtcgggacaaagaactactatgacgtgaggaaggaatgcgaggggaagctttgctatgacttctcaaacctggagaggttcttcggtgacaaagcggtcaaggaggcgcttggagtcggtgacatcgatttcgtctcttgcagcactacggtttatgaagcgatgctcacggactggatgaggaatctggaagtcggcatcccggcgctgcttgaggatgggattaacgtgcttatatacgctggggagtatgaccttatatgcaattggctgggaaactcgagatgggtgcactcgatggaatggtctggccagaaagacttcgtatcctcctgtgactcaccgtttgtagtagacggtgcagaagctggagtcttgaagagccatggaccactgagcttcctcaaggtccacaatgcggggcacatggttccgatggaccagccgaaagctgccctggagatgctgaggagattcacgcaagggaaactgaagcaggaaccgctccctgagacgatggccttgaaggcggcgatgtgactggcgtggacgtcgtgaagggaagaagggagtctcttaattactaggtggtccgaggtgtcgttcaagcgagcgtgtgtcgatcactgagctgctgaagcttgttgtttccattggctcatggatggatgctgttgataagaagttcaatgctggaaaccctgtctgtctgctgctcttgtaaagcatctcatgtatacaccccctggatccagaaagagaaataatatgtttttttccttagcaaaagatagtgtctgaattactgttggcgatttgctgtctgactgatccgcatgctcgctcactggctggagctcacatgcattgctggctagttttgagctggatatgtacactgctgaaaagtaaactaagttgagacttcttcggatggcca

SEQ ID NO: 131030 - DNA, 1935 bp, Zea Mays
gcctgctcggatccctcccttctctgctagtctgctccgactccgatcgccacgaccttcgtcaaccacagcgtcctagatataatcccaccatccgtcaaccacagcgttggccgctcaacgaacgcagccaccgcgaccaccaacaccataaagccgcctgccaagtcccaagcttttgtccacccagacaggcaccgtaccaccgtgttccccgtcgccatggccgcgaggttccccccggtgtcgtcctacgacgcttcggcgcgggtccgccgcacggccgcggcggacctggacggcacgctgctggcgtcgtcgtcggcgttcccctactacttcctggtggcgctggaggccggctcctgcgcgcgcgcgctgctgctcctcctggccgcgccgctgctgctggcgctctacacgctggtctccgaggcggcggccatcgcgctgctggcgttcgtcacgttcgcggggctccgggtgcgcgacgtcgaggccgtcgcccggggcgtcctcccgcgccactacgccgcaggcgtgcgcgccgacacctgggccgtgttccgcgactgcggcgccgcgcggagggtcgtcgtcaccgcgtcccccgccgtcatggtcgccgacttcgtccgcgagttcctcggcgccgagctcgccgccaccgagctcgagacctgccgcgcgctcggcgacgcctggttcacgggcaggatcaaggccgtgctcgtcggggagaggaaggccgaggtcgtgcgccggctcttcgccgccggcgacctgcccgacgtcgggctcggggaccgcgagagcgaccacgacttcatggccatctgcaaggaggcttacatggtgcctccggaccggcgcgcgccgcgagcggccgcggacgcgctgctgtcccgcgccgtcttccacgacggccgcctcgtgcggcgcccggacccggcgcacgcgctcttcgcgctggcctacctccctctcggcttcctgctggcgctgttccgcgtgctcttcaacctcgccatgccggcgcgcctggtccgccacacgtaccgcctgacggggatccggctccgcgtgcgcgggactccgccgccggccccggcgccgggcgcgccggggtcgctgctggtgtgcaaccaccgcacggcgctggaccccatcatcgtgtcggtggcgctggggcggcccgtggcgtgcgtgacctacagcgtgagccggctgtcgacggcggtgtcgccggtccgcgcggtggcgctgtcgcgggaccgggcggccgacgcggcgcgtatagcggcgctgctggcggagggcgacgtggtggtgtgccccgaggggaccacgtgccgggagccctgcctgctgcgcttctcggcgctgttcgcggagctcacggaccggatcgtgcccgtggcgctggacgcgcggcaggggacctactacgggtccacggcgagggggtggaagtggctcgacccttacttcttctacatgaacccgcgccccgggtacgacgtcaccttcctgccgccgctgcggccggaggagacgtgcggcgccggcgggaggagcgccgtcgacgtggccaaccacgtgcagacgctcatcgccaaggagctcgggttccggtgcaccaagctcaccaggaaggacaagtacatgaagctcgccggcaacgacggcacggtcgggggcaggcctgagaatgagaagggcgccgccgatgatagtgctgccacggccaccaccaagaagcttgtataaagagactgtatttatagctagctggtcgactgtatcggagcagcatccattatgtatttatgtacgtatgctaatgacgacaacattagtgtgatgtgatggattcgtgaacatagaagattacaagcttaacttcatgtttaccatgacctaactttctctttc

SEQ ID NO: 131031 - DNA, 1919 bp, Zea Mays
ccgattagttgaacgatcagcctggctggttggattgaaatttcggcccagtggcccagcccagcttcctttttcccattcccaccacgtgagcagaagctgcacaaccaagagccaacagagcaacgcccaggcacacacgacacgaaccaggcaaccagctgccgagggaggaccggaggaaccctagcggaacactgtgcaggtgacggcggcgcgctaccggtgacgggggatacggcggcatcgtccccctcggcccttcctccatccccggcgcggcggcgccagtagccggcctgcaggatgatcaatcaccacgaaatagtgcagtttgggaagctgtacaatagagacatggaatcagctcctgctcatacccctcttatacatggtcttcctgatgaggtagctctcatttgcttggcaagagttcctcggcggtatcataatattctcaggcgtgtctcaaggagatggagagctctgttatgcagtgaagaatggcacttgtgccgcaagaggaataacttggacgagccgtggatctatgtaatctgtagggaagcaggcatcaaatgctatgtgttggctccagatcctccaagccggtgctttcgaatcatgcatgtcattgaacccccatgctcagggaggaaaggtgttaccattgaagctttagacaaaaagctatttcttctgggtggctgcagttccgtgtatgatgctacggatgaagtatattgttatgacgcatcctcaaatcgctggagctcagctgctccaatgcctacagcaaggtgctattttgtgtctgcatcccttaaggagaagttgtacataactgatggatacggcttgacggacaagtcaccaaattcatgggacatctatgacccggccacggactcgtggtgcacccacaagaacccgttgctcacccctgacatagtgaaattcgtcgcattgggggaggagctggtgaccattcaccgagcggcgtggcacaggatgtactttgccggcgtatacgacccgctggaacgcacctggaggggcagagggaacgagatcgctctctgctactcgagcccgacggtggtcgtggacgggacgctgtacatgctggagcagtccatgggcacgaagctgatggtgtggcgggaggacgccaaggagtgggccatgctcggcaggctctccgacaaggtcactagacccccctgcgcgctcgtggccatcggcaggaagattcatgtggtcggaagagggctgagcatggtcaccgtggatgtggacacggcggcaagggtggacgggttcctggttaccacctctgtaggcccgttggtggaggaagacctgaccccggagaggtgcgtggtgatcaccatctgaaggggtgggcgtgtccaagcttccttgacgccgggtgtattgtggtaactgtgactgactatcgtcgctggcgccgaacatttggctagctagcgtggatgatatatactgcgatgtgagtgaattcaataagaggcttggctctccatacagccaataactatagttagcatttgtatctcgtgttgtttgggctgcttttgtcgactgctggctgtaagaacaatatttgagcttcgtttgttgagtactgtgcgtcccagatggatgggattaatacaagctaatgtgatcctcgtcctggcacttttgttattgtctatttgattgatcgatcaagcgttcgatttctgcagacatggatggcgatgtgcatcgacatttgagggtttcggttttttcttttactgtcggtgtaatggttttggatgctgtgcgtcggtagctttacgatttgtgttcgctacatgcgtaatgatctgattgagatgtgtggtgtactggtgtgtgtaaaataaagc

SEQ ID NO: 131032 - DNA, 1121 bp, Zea Mays
atgatcaatcaccacgaaatagtgcagtttgggaagctgtacaatagagacatggaatcagctcctgctcatacccctcttatacatggtcttcctgatgaggtagctctcatttgcttggcaagagttcctcggcggtatcataatattctcaggcgtgtctcaaggagatggagagctctgttatgcagtgaagaatggcacttgtgccgcaagaggaataacttggacgagccgtggatctatgtaatctgtagggaagcaggcatcaaatgctatgtgttggctccagatcctccaagccggtgctttcgaatcatgcatgtcattgaacccccatgctcagggaggaaaggtgttaccattgaagctttagacaaaaagctatttcttctgggtggctgcagttccgtgtatgatgctacggatgaagtatattgttatgacgcatcctcaaatcgctggagctcagctgctccaatgcctacagcaagttccttatgctccgccgccttcctttcaggtgctattttgtgtctgcatcccttaaggagaagttgtacataactgatggatacggcttgacggacaagtcaccaaattcatgggacatctatgacccggccacggactcgtggtgcacccacaagaacccgttgctcacccctgacatagtgaaattcgtcgcattgggggaggagctggtgaccattcaccgagcggcgtggcacaggatgtactttgccggcgtatacgacccgctggaacgcacctggaggggcagagggaacgagatcgctctctgctactcgagcccgacggtggtcgtggacgggacgctgtacatgctggagcagtccatgggcacgaagctgatggtgtggcgggaggacgccaaggagtgggccatgctcggcaggctctccgacaaggtcactagacccccctgcgcgctcgtggccatcggcaggaagattcatgtggtcggaagagggctgagcatggtcaccgtggatgtggacacggcggcaagggtggacgggttcctggttaccacctctgtaggcccgttggtggaggaagacctgaccccggagaggtgcgtggtgatcaccatctga

SEQ ID NO: 131033 - DNA, 3034 bp, Zea Mays
cttcgcagtcgcagcaagcattccggctctgcatctggcccagctctgggttgcgcgaacagtcggaaccctaattccctccccggcgccggcgccggcgccccctagctgcgcccccacgaccagcagaatccagatcgaagttttgctcttgccgcggccccgcctaaactccaaaagtgcgaaccccctaactcatcgatcccagcctgcctccgcctacgcgcctcgtgacggcgtggacccctcccctatctgcgtgctgcgcgcatccgcctgcggcctgtcccgtgcagccgtgcctcctccgcgcacatctccagggtctagccgagagcagaccgccgtgacgccaccactcgcgctcgcgctcctgacatcgttgtctgccttctctgtctaagatcagagcagagctccatcgaaagcgtcgcccgcctgcttgcatctccttgaaatctgccatacctcaaattttatgcgtcctccgtctctgctcattcctgttttatggccctgtgtctgtatccttgtcggtagatgacgtattctctttggatcattgccgccattgtccattgtgtggccacgttaggtgcattcgcttatgaattggtttcgggtatggagtagtggttgtactgcactgcaagccttgattttaggaggtagtcaggtgtagatttactgtgtggtttgtttttgcgctggaaatcgatgtgatgacttacaaaggaccgtatctgggcgaggcaactattcgcgcatgattataactgatctgagacaaatgtctgagcaagtatgatcctagtgctttatcctctccgcctgatgtttgatcgaaaatgctgtgatggagtttcattctttccctgtttccttatttgctatgatgacatctacaaggacgacgtttgagtaaggtggctcttaaaatggtgcctctttgcatccaatctgaatgagattctgagcaagaccggtgctctcctctgttgatcgtcaagcactatactagctgaactctacatcaaaatgatatggatcgtcaagcactatactagctgaactctacatcaaaatgatatgctatactttcttttatgtcaaccatatatttcttttggcatccatttggtcccttgttcacattcaaacaagctttcaattttttctactatataaagcaccaatttccacggtttccatagtcgtcgcgctactccacatttaaatggtaaaaaagttaaaattatgcacaaatgatgatttgaacaatggttgttggctccacgcacattcacacccacctaaccaacataatacacatgtctttatgttttatactttacactcataaattgaaaccgtagcaatgtacacacactttggtatttaagtgtcagttttatgcaatccctttcccagtggcagcatacattgatcactctcccagtggtgaggattgtatctaagttcagtggaattgttttcctaacttttatatccaaaattgaatgacttctcagtaaaactattttgtctgcacaaccattccttgtctttaagatatcgtagattttagcaatattttgatttattgtacatgtaatgcttatttatggatgattgttatgatgactcctattagggtatagggttactgaagggattgcatcccatctgattataccaaaaaccgaatatggtttctgatcaaatccagccatactgtcgaagaacccaaccaatgatttactccattttgattaaccaaattgatgtaattatattcatcgctttcttagtggcagcattattatagaatcggaattgccttgcctatttcctagcacaattttttcttcttctcttttgggtcatgcttgttctccctttgccgtaatcttaaaatggtgcatctttttttttattacatccaatctgaatgagattctgagcaaaccaggtgctctcctcttttgatcggcaagcactgtactagctaagatctacatcaaaatgttatgctatactttcttttatgtcaatcatatgtttcttttggcatccatttggtcccttgttcaccatacaagatttcggattttattatttaagtgtcagttttatgcaatccctttcccagtggcagcatacattgattgctctcccaatggtgaggattgtatctaagttcggtggaaacttctacatccaaaattgaatgacttctcagcaaagctattttgcctgcccaaccattccttgtcttgaagatatcgtatctttttagtcatattttgatttattgtgcatgtaatgcttatctatggattattgctatgatgactcctattagggtttagggttactgaagggattgtatcccatctgattataccaaaaccgaatatggtttttgagcaaatccagccatattgtcgaagaacccaactaatgatttactccattttgattaaccaaattgatgtaattatattcatcgcttccttagtggcagcaatattatagaatcagaatcgccttgtctatttcctagcacaatttcttcttctcttctgggtcatgcttgttctccttttgtcgtgatcttaaaatggtgcctctttttttattacatccaatctgaatgaggttctgagcaaaccaggtgttctcctcttttgatcggcaagcactgtactagctgagatctacatcaaaatgctatgttgtactttattttatgtcaatcatatgtttcttttggcatccacttggtcccttgttcccaaccatacaagatttcagattttattatttaagtgccagttttatgcaatccctttcccaaccatacattgattgctctcccagtggtgaggattgtatctaagttcggtggacttattttccttacttttacatccaaaattgaatgacttctcaacaaagctattttgcctgcccaaccattccttgtcttgaagatatctttttagtcatattttgatttattgtagatgta

SEQ ID NO: 131034 - DNA, 761 bp, Zea Mays
aagcattccggctctgcatctggcccagctctgggttgcgcgaacagtcggaaccctaattccctccccggcgccggcgccggcgccccctagctgcgcccccacgaccagcagaatccagatcgaagttttgctcttgccgcggccccgcctaaactccaaaagtgcgaaccccctaactcatcgatcccagcctgcctccgcctacgcgcctcgtgacggcgtggacccctcccctatctgcgtgctgcgcgcatccgcctgcggcctgtcccgtgcagccgtgcctcctccgcgcacatctccagggtctagccgagagcagaccgccgtgacgccaccactcgcgctcgcgctcctgacatcgttgtctgccttctctgtctaagatcagagcagagctccatcgaaagcgtcgcccgcctgcttgcatctccttgaaatctgccatacctcaaattttatgcgtcctccgtctctgctcattcctgttttatggccctgtgtctgtatccttgtcggtagatgacgtattctctttggatcattgccgccattgtccattgtgtggccacgttaggtgcattcgcttatgaattggtttcgggtatggagtagtggttgtactgcactgcaagccttgattttaggaggtagtcaggtgtagatttactgtgtggtttgtttttgcgctggaaatcgatgtgatgacttacaaaggaccgtatctgggcgaggcaactattcgcgcatgattataa

SEQ ID NO: 131035 - DNA, 1281 bp, Zea Mays
actgctagctactactgcaacagctcatcttcagaggcacgggagggcaggatcctgaaggcaagaagaagaggaggaggagacacgagaaggcggcggcgacaagacacaatggggtgccggtcctgtgacaagcccaagatgaactaccgcaaggggctgtggtctcctgaggaggaccagcggctcagggactacatcctcaagcatggcctcggctgctggagtgctgtcccggcaaaggctggtctccagagaaacggcaagagctgccgcctgcgctggatcaactacctgcgccctggactgaagcgtggaatgttctcccaggaggaggaggacgtcgtcatcgatctccaagccaagctgggcaacaagtggtctcagattgcgatgcatctgccggggaggaccgacaacgaggtgaagaactactggaactcgtacctcaagaagagggtgatgcagcaggcccagggcgcgtcgtccaactccagccccaagagcccgcccgagctcacctccatgagcaccaccgccgacctgtcgtccatgtccatgcccatgcccatgtccatgcccatgcaccagcgccaccacgtcaagaacaacagcggcggcggcagcaccacgacgtcgcacgaccagcaggacgacgccaacatcagcggcagccgtgcagcgctgtcggccccaccgccgccgcccctcgcccagcagccattcgagcaccaggcggctaggagcttcgtgttctcggactgggcgccggagagctactcgctgtccacgcactggcccgccgccacgtcgacctctggcaacgtgacgccgtcccacggcagcgccgccgccttcggggaccagatgagcggcacatacggcgccggcgggctgccgccgccgcaccaggatcaccaccacagcgccgcgcccgccaccaccggcatcgcggggagtggctactttgacctgctcaatatgggagacatctacggtggattcagctcgacaaacaacgatgatctgctcttctgaactcaactgacgacgatggaggcgtgatcagtgttgtgcatgagtgagtcaaatgcagcggtatattgttggatttgttgcttcgtcttcttcttttgtacgtattttgtaacaaaattattatttgtaacaacattattaattgcgatgtagagaacacaccctaggctggacataattctttggtttctttctacaatatatattaataataaaaatgcgtaccaacccgtttgtgcaagt

SEQ ID NO: 131036 - DNA, 1251 bp, Zea Mays
atgaacgccacggcctcttcttccagcaacagccaagcccacgacgacgccgacctgccgccgcgctgcgaatgggactttcgcctggcggccaccgtgccgaccacggccctgccaggggcgtccgacgccatcggcagcgtcgacctggaccccacgggccgcctcctcgccaccggcggcatcgcccgcaagatccggatgtacgacgtgccctccatgctgctgccgccgccggatagcgccggccccgcccccgcccccgcccccgccgcgtgcatctgcgtgccggccaagctgagtagcgtgcggtggcgcccggacgggggagccgcggtggggtgcggcgactacgacggcgtggtcacggagtacgacgcggagcgcggcgtggcgtcgtgggagcgcgacgagcacggcggccgccgcgtctggtcgctggactacgccccgccgggggcgccggcggccatggcggcgtccgggtccgacgaccgcacggcgcacgtgtgggacccgcgcgcgccctcgtgcggctgggccacggcgcgcgccggcgccgccgtgctgtgcgtggagttcgacccctcgggggcgccccacctggccgtgggctccgcggaccgccgcgcccacgtgtacgacgtgcgcgcgctgggccgcggcgcggtgcacgtggcgcgcatggagggacacgcccgcgccgtgacgtacgtgcggtgggcggggccggggccggcggagaggaggagggtggtcacgtcggcggccgacgggacccaccggctgtgggagtggccgccgggcacgtcggagcagggggccgcggcgcgggaggtgcggtcgtacagcggccacgcgagcgcgcggagcttcgtggggatgggcgtgtggcgaggggccgggctggtggccagcggctccgagtccaaccacgtcttcgtctacgacctcaggtgggccaagcccatctgggtgcagcccttcgcgtctcacggcccagtcaccatcggacccgagcaagtggacgctcacgctcctgctgctggtgctggtgctggtgggttcgtcagcgcggtggcgtggcggcagggcagccacagcgacgaccccgacggcggggctctcgtcgccggcggatccgacggcgtgctcaaggtgttcacgtgccgacggcggcgcggggtcatggccatggacacggactgcaccccgccgcctgactctgacgaggcggaggacaagaattga

SEQ ID NO: 131037 - DNA, 2352 bp, Zea Mays
ccatcagacagacgcagactctctcacccgactcgtcagacgtcagccagcagttcgaaaccaaggattgatccaggagcttccggaaggcgaggcgcgcgcgcagcgtcgaggtgctggtgccggtgccgcccatggatcgggctcgcggatccgcgttcctgctcggcgtcctgctcgcaggatccttgttcgcgttttcagttgccaaagaggagaccaagaagctcgggaccgtgatcggtatcgatctcggtaccacctactcctgtgtcggtgtgtacaagaacggtcatgtcgagatcatcgccaatgaccagggtaaccgtatcacaccctcatgggttgccttcaccgatagcgagaggctcatcggtgaggctgccaagaaccaggcagccgtcaaccctgagaggaccatctttgacgtcaagcgtctcatcggaagaaagttcgcggacaaggaagtccagagggacatgaaacttgttccctacaagattattaacaaggatggcaagccctacattcaggtcaagatcaaggatggggagaacaaggtcttcagccctgaggagatcagtgccatgattcttggcaagatgaaggatactgctgaggcataccttggcaagaagatcaatgatgctgtcgtcactgttcctgcgtacttcaatgatgcgcagaggcaggcaaccaaggatgctggtgtcattgccggcctcaatgttgctaggatcatcaatgagccaactgctgctgctattgcctatggtttggacaagaagggtggcgagaagaacatccttgtctttgaccttggtggtggtacttttgatgtcagtatcttgaccattgacaacggtgtgtttgaggtgctggccaccaatggtgacactcatcttggaggtgaggactttgaccagaggatcatggagtacttcatcaagttgatcaagaagaagtacagcaaggacatcagcaaggacaaccgtgctcttggaaagctgaggagggaagccgagcgcgccaagagagccctcagcaaccagcaccaggtccgtgttgagatcgagtccctctttgacgggaccgatttctcggagccgctgacccgtgccaggtttgaggagctgaacaacgacctcttccgcaagaccatgggccctgtcaagaaggccatggaggatgctggccttgagaagagccagatccatgagatcgtcctggttggtggaagcaccaggattcccaaggtccagcagctcctgcgggactacttcgacggcaaggagcccaacaagggtgtcaaccctgatgaggctgttgcctttggtgccgctgtgcagggaagcatcttgagcggcgagggtggtgacgagaccaaagatatcctcctccttgatgtggctcccctcaccctgggtatcgagaccgtcggtggagtcatgaccaagttgatcccgaggaacactgtcatcccgaccaagaagtcgcaggtgttcaccacctaccaggaccagcagaccactgtctccatccaggtctttgagggtgagcgcagtatgaccaaggactgccgtcttctcggcaagttcgacctcaacggcattgcgccagctccaaggggcacaccccagatcgaggtgaccttcgaggtggacgccaacggtatcctaaacgtgaaggcggaggacaagggcacgggcaagtcggagaagatcacgatcacgaacgagaaggggcggctgagccaggaggagatcgaccgcatggtgcgggaggcggaggagttcgcggaggaggacaagaaggtgaaggagcggatcgacgcccgcaaccagctggagacgtacgtgtacaacatgaagaacacggtgggcgacaaggacaagctcgcggacaagctggaggcggaggagaaggagaaggtggaggaggccctcaaggaggcgctggagtggctggacgacaaccagtcggccgagaaggaggactacgaggagaagctcaaggaggtggaggccgtgtgcaaccccatcgtgtcggccgtgtaccagcggtcgggcggcgcccctggcggtgacgctgacggcggtgttgacgacgaccacgacgagctgtagatggttgtagatggtggtggtgacgtggagtgccgggagccgagccaaattttgtaacggtgtttagcggcggacaatacttattactaatcttggtgctgctctgccaatagccgtgctgagcgtagtaactgtttgtttgtaattttttttcttctacttccttggttgttcaggattcgcattcgaattttatgtgaaaaaaagaaggcgcgcttttaaaatc

SEQ ID NO: 131038 - DNA, 1148 bp, Zea Mays
agggcagcgtccagggggcactctgcaaagcgcgcgaccggacggcccggttcgttctcgacctctcgtctcgctcatccgcccgcccccgaggaaggaaccctagcctagccttgctccgaccggtcgccgcggcgactgcgacgatgatggactgcgctggaggccgagaccccgtggaggacttcctcctcggcggcgccggcgccggcgacgacggagatctcgtcgccgtcttctgcgacgacggaggacttgggattgagggtatccatggagatgcttgtggatttgagcaatctaatttggggaaaaggggtagagatgaaccatgttcatctggcccaacatccaaagcttgccgtgaaaaaatgaggagggacaagctgaatgacaggttcctggaattaagttcaattatgaatcctggtaaggaagcaaagttagataaagcaaatatattgagtgatgcagcccgtatggtggcacaacttagaggtgaggcagaaaagcttaaggaatcaaatgagaagttgcgggagaatatcaaggatctgaaggaggagaagaacgagctccgtgaagagaaagtgagactaaaggtagaaaaggataggctggagcagcaagtcaaagctatgagtgtagctcctacaggatatgtcccccatctccctcatccagcttcataccatcctgctgcgttcactccatttgcgccgccacagcaagctccagccaacaaaagtgctccaatcccagcaccgttccctgggatggcgatgtggcagtggttgcctccgaccatcgtggacacaactcaagatccaaagctctggcccccaaatgcttaggggcagctaccttggaatgttgactcattgtgccttttcatgcatttggtgggcaaatcagtgtcagttaggtccctggagactggagaggaatcaagttcgcaactcgcgccatgtttatgctgtaacagctggtttccagcactacttatgaacttactttgttctactgaagggtggtgcctgtaattaatatatggatcttaaccctctagttggcatgtatatcatttgttctattcgagagctgaattttaaggaccattattgaagtcatgagtgcagtaaaaaaaa

SEQ ID NO: 131039 - DNA, 465 bp, Zea Mays
atgctgtacactgacttcgacctgctgaccgacttcccggagccgacgctggacttcctcgcggacatccctgaggagaagctgctgctgccgttccccgcggggagccccgaggagtgcccgtttgacacggaggtggcgttgccgacgaggtggcagaaggtggacgacttcttccaggacatcaccgagctgttccagatcgacccgctgcccgtcgtccagcctggacccagaggaggagcacgccattccggctccatgcccgtggagtcagagaccgagaacaacaacctcgatatggaaagcaagttgccactgcctccatcgcagtcgcagcgaccaccactaactgcttctgtgagaggtagtagcagcaactatgtttcaacaggaaacaagagaagagaaagtgaaagctctatgggtgtgccaattggtcaatcgtcatcttcagcaccataa

SEQ ID NO: 131040 - DNA, 98 bp, Zea Mays
gactaagatacaaaaaatcggttaatccggcttctacaatattttgtctctatggattgcaattgcagcagtccaaacagctgcagggtagccgatgg

SEQ ID NO: 131041 - DNA, 228 bp, Zea Mays
atggagaagtactgctatcgggcgggagtcagaccgaggaccaacagggatgtgcaggaactagtccgagaagacagcttttgctccgaatcaactgctaagagcccgagaaacagccggggacggccgccattggcagctggaggcgcggggattcgctcggccggctccacgaacacaatggtggacagaggaggaggtgtgctagctcagaaacagcaagagtga

SEQ ID NO: 131042 - DNA, 1902 bp, Zea Mays
aaataaaaggagaaaaaataaataaaaatagcggttcctccgcgggtaacgggcatcccgccatcgctctgcacttctgcagtctgctctggcttataataaccggcaccttctccttcctccgatctcctcgcctccctcctctctcccagatccgtctcccggcgtcagacgcgcatctccagcaatggcggacgagaagcttgccaagctgcgcgaagccaccgccggcctcacgcagatcagcgagaacgagaagtccggcttcctcagcctcgtcggccgctacctcagcggcgacgaggagcacatcgagtgggccaagatccacacgcccaccgacgaggtggtggtgccgtacgacaccctggagtccccgccagaaggcactgaggcgaccaagaagctgctcgacaagctcgccgtgctcaagctcaacggcggcctggggaccaccatgggatgcaccggacccaaatcggtcatcgaagtgcgcaacggatttactttcctcgacctgattgtcatccagatcgagtcactcaacaagaagtacggcagcaatgtgccgctgcttctgatgaactccttcaacacccatgacgacaccttgaaaattgttgagaaatacacgaattcgagcattgaaatccacacattcaaccagagccagtaccctcgtgtggtagctgacgagttcttgccatggccgtccaagggaaagactgataaggatggctggtaccctcctggccatggtgatatcttcccatcattgatgaacagtggaaagctcgatttactactctcacagggaaaagagtatgtgttcattgcaaactcggataacttgggtgctattgttgacatgaagatactgaaccatttgatccacaagcagaatgaatattgcatggaggtcaccccaaaaactttggctgatgtaaaaggtggcacactgatctcctacgaaggaagggttcagcttctggagattgcacaagtgcctgatgcacatgtgaatgagttcaaatcaattgagaaattcaagatattcaacaccaacaatctgtaaggatcacatttttaaatttcattcttctaaagaaaattgctgatgttacttaatgctactactggtttttcaggtgggtgaacttgaaggccatcaaacgccttgttgaagctgatgcactcaagatggagatcattccgaatcctaaggaagtcgatggtgtgaaagttcttcagctggaaacagcagctggtgcagcaattaggttctttgaccatgccattggtatcaacgttccaaggtcccgcttcctaccagttaaggcgacatcagatttgcagctagtacagtctgatctatataccttggttgatggcttcgttacacgtaattcagccagaacaaatccatcaaatccatcaattgaacttggtcctgagttcaagaaggttgggagcttccttggtcgcttcaagtcgatacctagcattgttgagcttgacagcttgaaggtttccggtgatgtttggttcggttctggaattgtactgaaggggaaagtgaccatcactgcaaaacctggcgtcaagctagaaatcccagacggagcagtgattgggaataaggatatcagtggccctgaggacctttagataagaatcagcgaatcagcaaggaggctcacttcgccaagtggcggatcatttttcgtgtttttttcctgtatattcaaacaggttccatgatattatggagaatattaattgccagtataatccagaaattttacatgtattttactttgagggaaatgttttacacactccagttctgcttattgtccaaaaggaaatttctgtgtcttgaacagaaaaatatcttgcccc

SEQ ID NO: 131043 - DNA, 1760 bp, Zea Mays
tatcttatcttaaggctatctgttcgtatgataaaaaaaagtattccttttgaaacaaaaaagaagacaaaatgaatggatcaaataaaaggagaaaaaataaataaaaatagcggttcctccgcgggtaacgggcatcccgccatcgctctgcacttctgcagtctgctctggcttataataaccggcaccttctccttcctccgatctcctcgcctccctcctctctcccagatccgtctcccggcgtcagacgcgcatctccagcaatggcggacgagaagcttgccaagctgcgcgaagccaccgccggcctcacgcagatcagcgagaacgagaagtccggcttcctcagcctcgtcggccgctacctcagcggcgacgaggagcacatcgagtgggccaagatccacacgcccaccgacgaggtggtggtgccgtacgacaccctggagtccccgccagaaggcactgaggcgaccaagaagctgctcgacaagctcgccgtgctcaagctcaacggcggcctggggaccaccatgggatgcaccggacccaaatcggtcatcgaagtgcgcaacggatttactttcctcgacctgattgtcatccagatcgagtcactcaacaagaagtacggcagcaatgtgccgctgcttctgatgaactccttcaacacccatgacgacaccttgaaaattgttgagaaatacacgaattcgagcattgaaatccacacattcaaccagagccagtaccctcgtgtggtagctgacgagttcttgccatggccgtccaagggaaagactgataaggatggctggtaccctcctggccatggtgatatcttcccatcattgatgaacagtggaaagctcgatttactactctcacagggaaaagagtatgtgttcattgcaaactcggataacttgggtgctattgttgacatgaagatactgaaccatttgatccacaagcagaatgaatattgcatggaggtcaccccaaaaactttggctgatgtaaaaggtggcacactgatctcctacgaaggaagggttcagcttctggagattgcacaagtgcctgatgcacatgtgaatgagttcaaatcaattgagaaattcaagatattcaacaccaacaatctgtgggtgaacttgaaggccatcaaacgccttgttgaagctgatgcactcaagatggagatcattccgaatcctaaggaagtcgatggtgtgaaagttcttcagctggaaacagcagctggtgcagcaattaggttctttgaccatgccattggtatcaacgttccaaggtcccgcttcctaccagttaaggcgacatcagatttgcagctagtacagtctgatctatataccttggttgatggcttcgttacacgtaattcagccagaacaaatccatcaaatccatcaattgaacttggtcctgagttcaagaaggttgggagcttccttggtcgcttcaagtcgatacctagcattgttgagcttgacagcttgaaggtttccggtgatgtttggttcggttctggaattgtactgaaggggaaagtgaccatcactgcaaaacctggcgtcaagctagaaatcccagacggagcagtgattgggaataaggatatcagtggccctgaggacctttagataagaatcagcgaatcagcaaggaggctcacttcgccaagtggcggatcatttttcgtgtttttttcctgtatattcaaacaggtt

SEQ ID NO: 131044 - DNA, 964 bp, Zea Mays
aaataaaaggagaaaaaataaataaaaatagcggttcctccgcgggtaacgggcatcccgccatcgctctgcacttctgcagtctgctctggcttataataaccggcaccttctccttcctccgatctcctcgcctccctcctctctcccagatccgtctcccggcgtcagacgcgcatctccagcaatggcggacgagaagcttgccaagctgcgcgaagccaccgccggcctcacgcagatcagcgagaacgagaagtccggcttcctcagcctcgtcggccgctacctcagcggcgacgaggagcacatcgagtgggccaagatccacacgcccaccgacgaggtggtggtgccgtacgacaccctggagtccccgccagaaggcactgaggcgaccaagaagctgctcgacaagctcgccgtgctcaagctcaacggcggcctggggaccaccatgggatgcaccggacccaaatcggtcatcgaagtgcgcaacggatttactttcctcgacctgattgtcatccagatcgagtcactcaacaagaagtacggcagcaatgtgccgctgcttctgatgaactccttcaacacccatgacgacaccttgaaaattgttgagaaatacacgaattcgagcattgaaatccacacattcaaccagagccagtaccctcgtgtggtagctgacgagttcttgccatggccgtccaagggaaagactgataaggatggctggtaccctcctggccatggtgatatcttcccatcattgatgaacagtggaaagctcgatttactactctcacagggaaaagagtatgtgttcattgcaaactcggataacttgggtgctattgttgacatgagtatccttatgtaaattaacattaccatttacttttacaagttttctggttaatgaagagcacatgctactttcaatgtacttaaccgttga

SEQ ID NO: 131045 - DNA, 1609 bp, Zea Mays
gactggtggaccagacccagcgaccgaacccgactcgatttcccaactccaaacctccttgcccctccgtgactcgccttcctctcctgactcctccgccttggcccgccgtctctcgccgccccggccccaacccctctcggactaggtgagggggccggctgcccagcgtcgtcgccggcgagatcttcccaccgccgctggcaatggctgccccgcacgacgaggccgcggcgtgggcggaggaggcggcgcgccgggtctgggccggcgccgtgccgctccaggtccacctccacgacgccgacgtcaccgcgctacccccgccgccgcccttcctgactttgggaccaagaattgggtatttgcccctcttgatacctgttataagggctcatttcagcaatgcactcccacctggtgttgacactgtttggtttgaatataaagggctgcctttgaaatggtatgtaccaattggtgttctttttgatcttctatgtgcagatccagaaagaccatggaatctaatagtccattttaggggatatccctcagaaatcttgtcaccatgcgagggtgaagatagtgtgaagtggagctacatgaattccctgaaagagcattctctctctctattcaggccaccttcatcattactgggaacagtaagagtgtgatgaatatgtcgcatgctgatcaagtcgctctgtgggaatctgtaatgaaaggtaacttagatgggtataaaaatatctccaccaggcttaagcttggaccatttgaagatgatgtgttagtacggacagcctccgtggagcggcaacgtcaacaaaattctgatgaacctgaatctcctggatctagcaaaccgtggtccctgttcgattatacgtacgcaatgttcaagaagaccttgagtacatagaacatgcagttcctgtcagtgactgggaaaacgtgtcctacataaatcggccatttgagactcgcaaggctgaaggtagaagctacatcaccctggaacatgcgttgcaaacattgcttccggagttcttcagctcaaagcccccaggcagcgctgacggctcccaacacgcaggcgcaatggacgcagccgcagacagttcagatgccaccaactcttcaagtcgttctcaggaggcagagcaagccctggcaagtccagcagaggcgggttctgccaagagagcgaaagtgaagctggtgagggtgcaaggtgttgagctcgacatggacatcccgttcctgtgggtcgccgaccacctcaagaaccccgaatactacgtccacatctgtgtatacgtcggcactagaaaacaatagagataagagtacatggggaaattgttagatactgcgttaggagtgtgtcccagaaatcattttctttgttctttggttattacatgtgctatcctgtgtgcagatacagacgctgaaatttgtaacccttttggatgcacagtcatggaaggatggaattggatggtgaaccattttgtgtgtgtgtgtgtgtgtgtatccgatcgacgtattgcaatatatatcctgcctggagcatagcagaattctttcgttgtagaac

SEQ ID NO: 131046 - DNA, 1588 bp, Zea Mays
gactggtggaccagacccagcgaccgaacccgactcgatttcccaactccaaacctccttgcccctccgtgactcgccttcctctcctgactcctccgccttggcccgccgtctctcgccgccccggccccaacccctctcggactaggtgagggggccggctgcccagcgtcgtcgccggcgagatcttcccaccgccgctggcaatggctgccccgcacgacgaggccgcggcgtgggcggaggaggcggcgcgccgggtctgggccggcgccgtgccgctccaggtccacctccacgacgccgacgtcaccgcgctacccccgccgccgcccttcctgactttgggaccaagaattgggtatttgcccctcttgatacctgttataagggctcatttcagcaatgcactcccacctggtgttgacactgtttggtttgaatataaagggctgcctttgaaatggtatgtaccaattggtgttctttttgatcttctatgtgcagatccagaaagaccatggaatctaatagtccattttaggggatatccctcagaaatcttgtcaccatgcgagggtgaagatagtgtgaagtggagctacatgaattccctgaaagaggccaccttcatcattactgggaacagtaagagtgtgatgaatatgtcgcatgctgatcaagtcgctctgtgggaatctgtaatgaaaggtaacttagatgggtataaaaatatctccaccaggcttaagcttggaccatttgaagatgatgtgttagtacggacagcctccgtggagcggcaacgtcaacaaaattctgatgaacctgaatctcctggatctagcaaaccgtgcagggtccctgttcgattatacgtacgcaatgttcaagaagaccttgagtacatagaacatgcagttcctgtcagtgactgggaaaacgtgtcctacataaatcggccatttgagactcgcaaggctgaaggtagaagctacatcaccctggaacatgcgttgcaaacattgcttccggagttcttcagctcaaagcccccaggcagcgctgacggctcccaacacgcaggcgcaatggacgcagccgcagacagttcagatgccaccaactcttcaagtcgttctcaggaggcagagcaagccctggcaagtccagcagaggcgggttctgccaagagagcgaaagtgaagctggtgagggtgcaaggtgttgagctcgacatggacatcccgttcctgtgggtcgccgaccacctcaagaaccccgaatactacgtccacatctgtgtatacgtcggcactagaaaacaatagagataagagtacatggggaaattgttagatactgcgttaggagtgtgtcccagaaatcattttctttgttctttggttattacatgtgctatcctgtgtgcagatacagacgctgaaatttgtaacccttttggatgcacagtcatggaaggatggaattggatggtgaaccattttgtgtgtgtgtgtgtgtgtgtatccgatcgacgtattgcaatatatatcctgcctggagcatagcagaattctttcgttgt

SEQ ID NO: 131047 - DNA, 1472 bp, Zea Mays
ccgaacccgactcgatttcccaactccaaacctccttgcccctccgtgactcgccttcctctcctgactcctccgccttggcccgccgtctctcgccgccccggccccaacccctctcggactaggtgagggggccggctgcccagcgtcgtcgccggcgagatcttcccaccgccgctggcaatggctgccccgcacgacgaggccgcggcgtgggcggaggaggcggcgcgccgggtctgggccggcgccgtgccgctccaggtccacctccacgacgccgacgtcaccgcgctacccccgccgccgcccttcctgactttgggaccaagaattgggtatttgcccctcttgatacctgttataagggctcatttcagcaatgcactcccacctggtgttgacactgtttggtttgaatataaagggctgcctttgaaatggtatgtaccaattggtgttctttttgatcttctatgtgcagatccagaaagaccatggaatctaatagtccattttaggggatatccctcagaaatcttgtcaccatgcgagggtgaagatagtgtgaagtggagctacatgaattccctgaaagaggccaccttcatcattactgggaacagtaagagtgtgatgaatatgtcgcatgctgatcaagtcgctctgtgggaatctgtaatgaaaggtaacttagatgggtataaaaatatctccaccaggcttaagcttggaccatttgaagatgatgtgttagtacggacagcctccgtggagcggcaacgtcaacaaaattctgatgaacctgaatctcctggatctagcaaaccgtggtccctgttcgattatacgtacgcaatgttcaagaagaccttgagtacatagaacatgcagttcctgtcagtgactgggaaaacgtgtcctacataaatcggccatttgagactcgcaaggctgaaggtagaagctacatcaccctggaacatgcgttgcaaacattgcttccggagttcttcagctcaaagcccccaggcagcgctgacggctcccaacacgcaggcgcaatggacgcagccgcagacagttcagatgccaccaactcttcaagtcgttctcaggaggcagagcaagccctggcaagtccagcagaggcgggttctgccaagagagcgaaagtgaagctggtgagggtgcaaggtgttgagctcgacatggacatcccgttcctgtgggtcgccgaccacctcaagaaccccgaatactacgtccacatctgtgtatacgtcggcactagaaaacaatagagataagagtacatggggaaattgttagatactgcgttaggagtgtgtcccagaaatcattttctttgttctttggttattacatgtgctatcctgtgtgcagatacagacgctgaaatttgtaacccttttggatgcacagtcatggaaggatggaattggatggtg

SEQ ID NO: 131048 - DNA, 1184 bp, Zea Mays
gactggtggaccagacccagcgaccgaacccgactcgatttcccaactccaaacctccttgcccctccgtgactcgccttcctctcctgactcctccgccttggcccgccgtctctcgccgccccggccccaacccctctcggactaggtgagggggccggctgcccagcgtcgtcgccggcgagatcttcccaccgccgctggcaatggctgccccgcacgacgaggccgcggcgtgggcggaggaggcggcgcgccgggtctgggccggcgccgtgccgctccaggtccacctccacgacgccgacgtcaccgcgctacccccgccgccgcccttcctggtatgcatggtcgcttagctgttaattaagaccacagctgctcaatttctagggtgctacagcctacagcagcgcacattacctaccggccgcccgtgggagattcagttgctggcttgctgctgtaggatttgcctgtcttttgtggctgatacccaactacgggtccaattaatattttgaagttgaatatcattgggtcgtcatgactcctgagccaatttctcggggcttacaaggtcctttctgctctatatctagaactagaacctacccccttccatttatatgaggaactggatttttttccttccgatccctgcaaagttttatgcagtgcccagtggtaggtttagtacacaaggctagctccgttgctgctacaattataacgcaggagaatccgtggtgcctgtctcgttaacttctgactgagcgtgattttcagtcttataatcatgtgtgcgctctaatttgtattttcttggcttgtttagtttgcatcttatgtgcactcagatggagtatactttataccagtgtttctacggaattcattgaaaattcatatatttatcctttcctaccctcaagtacaacaagagtgcaaagctactattcatcttttgtttctgtgcaaaggcctatctttccctttacaggattgttgctcgttgagaaaacttgggagttttggcgtatgcttttagtcctccatgatcttatctgtttcatttggaccatccttttgtcttgaacagactttgggaccaagaattgggtatttgcccctcttgatacctgttataagggctcatttcagcaatgcactcccacctggtg

SEQ ID NO: 131049 - DNA, 1269 bp, Zea Mays
atgaggaggaagcgggcaacgtccgtatcgccgacggcgtccgcgagcgcaacgcggcggctccgcctgctgcgcctccctctcctcgccttcgccctcctggcgatcgccgccgtgctgcgccgccacgtctccgctcccgcgcggcgctccgtctctgagccggacccgctgccctgcggcgcggcgccgtcggacctgacggcggggcggtgggtggcgacgccgcggcccgtgccggcgccgctctactccgcgacctgcccgttccacagcggctcctacaactgcctccgcaacgggcggccgccgctggcggcgctgtcctgggcgccggcgcgctgcggcgtcgtcccgcggatcgacccctccgcgttcctcgccgccgccgccggccgccgcgtcggcctcgtcggcgactcgctgtccgagaacctcgccatcgcgctgctctgcgcgctccgctctgccgaccccaacgcgcgccggtggaagcgccgcggcgcctggcgcggcggctacttcccccgccacgacgtcaccgtcgccttccaccgcgccgtgctgctcgccaagtacacgtggcagccagtggaggatccggagcaggttcacaaggatgggataaaggggatttacagagtggatgttgacatccccgctgacgattggataagcgtcaccaagttctacgacgtgctgatcttcaacacagggcactggtgggggacatacaaattcccgagagagacgccccttgtgttctacgaaggaggaagaccgatcgagcctccgctcagcattcccgacggcctgaaacgagtcatcaaatccatggccgcctacatcgacgcggaggccccgagcacgacgctgaagctctggcgcacgcagtcgcctcgccacttccacggcggcgagtgggatcgcaacggcagctgcgtgactgacaaactccttaaagaggatgagctggacgcttggttcgatccgcaattcgggggtgtgaacaaggacgcgaggacggtgaacgcggtgacggaggaggcgttggcagggtcgtcgggcatccgactggtgaacctgacctacatgagcgagttccgagccgacgcacacccggcggcctggctggggaagaagggcgtggtggccgcgtacgggcaggactgcatgcactggtgccttcccggcgtgccggacacctgggtcgacgtcatggccgtgcagatcctgcatcacttcaagcggctagaaaaaggaaaatga

SEQ ID NO: 131050 - DNA, 99 bp, Zea Mays
ggtcgaaactagtgtactttatgaatttaattatattttgatgattttatgtaggaagaaattaataatgcacaaatagcctcagaaaatcatgaaatt

SEQ ID NO: 131051 - DNA, 758 bp, Zea Mays
ggtgatcgacaagcagcaaaaacacaggctacctcgatctctagctatagctaccagtgtcttcttcagttccttgagaggaggagagaacccaagaatataatggaggggaagaagagcagcctcgcctgctgctgcctgctcatgttcctgctgctgtcagcgcagcagcagcaggtggcgggcctgtccaagttctgccgctgctaccggaactgctacaccgactgcaggaagtccacgggccgctacccctgcaacgccaactgctttcaggactgcatcaacgggatgctgccgccggctccggcggaggtcgtcgtccccgccgactgccgcgacatctgcctcatgggcttctgcggctccatggagatcgccggtgacgccgtggctggggatgccgaggcgtgtgtggctgactgcaccaagaacctcggtgcctttgcaccaagtgcagccaagacgatcaactgaagcatgcattagggcccgttcgcttgtacaggattaaaccggaattcgttccagctcatcaaaatctatataaattaaagaagtaatccggttaggaattaattcgaagctccaatccctaaaaaccgaatagggccttatgcatctgagagagtggcttgagatcgagttgagagcaacagatagagttccatcagtgtaatgcaataattggatgtttaagcgatcctatatataatgtactccctccgttccaatttataattaatttgcgctaagtt

SEQ ID NO: 131052 - DNA, 269 bp, Zea Mays
tacaatcaagatggtgaggacaaatgtaacaatgaagatgcagaagaagatcctagttctgctaatgctcatcatccttgctgcctctcaggaggtagaggtgggcgccgaggattcatgcgttcaagggaatccattcccaaagtgcttcgtaagctgcttgcgtccaggtgcttgtgacaactgttgcaaggataggggctacaccagtggcaagtgcgtgctacttggctgcatttgctgcaaataaagacgtggggttttagttt

SEQ ID NO: 131053 - DNA, 1373 bp, Zea Mays
aacttctgatccaggtgtacgagtctttggagcaccggttggccgtggcagaggcagcacagaggcttaggctcccactgctctctcaggacggggaggtccatgagcaggagatcgaaaagctgagcacctattcaagaagttcattcgatagcaccctcacaagcgcgacacccagctcaagttcaatctcgacgagttacaacaattatagcagcagcgctagtgcggtgactgttgctgctccacattggagtggtagttctgatgcagttgaacctggagttggtggtgttcctgaccgttttcttgggatcacttctgattatctctaccaagtgcaacaagagcagccagccatgtctgttgacatggttgattatcagagaactttggctagggagattgaagcccggttagaagccaagtgtgatgctttggctgatctatttgctatggatgaaagggattcgtcatccctcagtcaaatttcaagtgctaggcttccagaaagggtaaaattaatcatcgaagagatagagaaggaagaggcacatctcctggaggaccttgcttcaatggacagaaaatttgctgaacattataatgtcttggagcaaattcttgctgtgcttatacagtttgttaaagacaagaaattggagcatcagcaccaatttgatgatctgaagaagacctggcttatcaaaaggtgtcggacaatgaatgctaaactaagctatctggagcatcatctattgcgtgacacttacaccaaggacacagtaccagcactgcacaggatcaggaagtatcttgtagaggccacaaaagaagcatccaattcttataatgaagcggtttcgcggttgcgtgagtaccagggtgtagatccacggttcgatgtgattgcgaggcagtaccacgagattgtaaagaaactggagggcatgcagtggacaattcaccaggtggagatggacctgaaacctcaccatgaccacgcagctgtttaagtccacatctgttggaggccatgtttattacctgaatgcagcgggtgcgagttaggggggttgcagtggatttgatttgagtcagagggtttctgtttgtgcatgtttttttttgtgtatatccatgttggataatagcaccatcaatgcttgcttagttatacggtcatgtattcggtttgtttgatgacgagaaacactagaagagagcgagacatggaaaacaccagaacaattatcattgtactacgcatccactgccatgtcatacaaaacaaggcaagtctagatgacttttattaggaatcctaatggctataatggaacgtagtagccgagaagaaggcttcgtccgga

SEQ ID NO: 131054 - DNA, 717 bp, Zea Mays
atgtcgctcgcgccagccaccgacttcgactccatcgtcgaagccttcgggtacaacgagttggcgattgcgcgatgcctgggagctccaaccgcgcgcccacggatttcaactcccctgctgctgggggaatacaatgggaagcggtgcagatcgaccaagtgcggtggcatggaggacaacccgagaatggtggaaagaagcaggggaaggacagcgcaacgaagccccctagctgcccaaggactacatccatgtctgggcaaggtgtggcgagcaaggcatggcgaggcgatggactgtcacaacctcgtggagaggggagaagatcagctagcggatgaagccgctgcaggatctcgtgctgggttgcaacaaggaaatcgagttccctacagctggactacaaaccgtaccagcatctcaggagctatacccgcagccctcgagaacgccaagtccctaaagttcctgcgtttggatcacaatcgcctgaaggggccgatcccaagggagcttgctgggctgcccaatcttggaattgtagatttctccaacaacgacctttgtggcgcgatcccgacagacggagcattccaaaacattccccgtagcagggagccagctcctcgaaattctagggtgcccggtgccgctggaaaccgagtgaagccggcagccgtcgtcgaggagggtgccgctgccgctgcgtcgtag

SEQ ID NO: 131055 - DNA, 1872 bp, Zea Mays
atggtgcgcccgtccgcgggcacgctggccatcgtggccgggtccttcacgtccacctccagccccaggtggtggagcccctgccgggccttgatggccgcgcgctccgccgccggcagcgcgtcccactcgggccgccacgtgcacaccgtcgctggcccgtacgtctccgtcagcccgtacgagtggatcaccaggaacccgagctcctccatccggaacagcacctgcggcgccggcggcgcgccgcccgtcatcacagtcaccggcctcttcctccccgcgcccagcggcgccctctcctccgccgtggcgttcaccaccatgctcagcaccgtcggcgcgccgcccatgtgcgtcaccccgtgcgccgccacggccgcgaagatggcgcccgagttcaccttgcgcaggcacacgttggtgccgccctgcgccgccacgccccacaccaggcaccacccgttgcagtggaacatgggcaccgtccacaggtacaccggcagcgccgtcatgtcgttgaggagcaccgacgacagcgagttcaggtacgcgccgcggtgggtgtacaccacgcccttgggccgcgacgtcgtccccgacgtgtagttcagcgcgatcggctcgttctcgtcgtccggccaccggatcaagaactctggatcgccgcctctgctgctgctgaggaggagggcctcgtactcgtagcaccgatcgacgcctgggatcttgtcgtttcctgtcgccgctgacggcggctcgtcgagcgcctcgttgattagtaccacggcgggcaccctgctcgctccgccggcctgctgggagatgaggcggagcgcctcccgggcgacgcccagtagcgcggcgtccacgaacacgaccttggcctccgagtgctgcagcagcacggacgccatgccggcgtcgagccgcgagttgagcgcgcagatcacggcgcccgccatgggaatgccgaagtggagctcgcagaaggccgggatgttctgcgcgaacaccgcaacctgcacgggggcagcaacggctgcggttaggaccggccggccagttcgattcgattcggtactagaagcagcagcaaattcagcccgtccactgccgatgagaacaacactatctacctactcgggcaaatcgagagagacagacaggggatggagaacagcaagagcagtaaaagtgaatgcttggacggcggcaggtagataacgcccgaatctaccgctccgtacttatcgcacggaagaggaggcaaggcaacggctggacagagacttaccacgtcacggcgcgcgacgccgagccccgcgagcgccgcggcgaggcggaggcagcggtcccgggtctgccgccaggtgcgcggcggcggcgcggcggcgtgtccggcggcgacgacggcggggcggtcggggtagacgagcgcggtgcgctcgaggaagctgatgggcgtgagcggcgcgtggttggccgcgcacagcacggtgccttccatcgctcagagttgggcggcgcgccggcgcggaacagaggggaacgaacggccacactggagtggaggaggcagtctggaacggaatggcagcggaagtgggaatataataacaacaaaatccagcgacagcagcagcgcgagacgacgacgcgtaatcgacgagttgacgcgcttggtggcttgatgccgatgccgatgctgacggtgacggacggagtggaggaagaagcaagctgctctagtgctctctgtctctaatgttgtgataacacgcgcactgtgtctgcctacgtcatggtcgattcacacgtattttcgtgacgtggagccaccagaagccactaagctgcaaaatgagcgcg

SEQ ID NO: 131056 - DNA, 1573 bp, Zea Mays
atggtgcgcccgtccgcgggcacgctggccatcgtggccgggtccttcacgtccacctccagccccaggtggtggagcccctgccgggccttgatggccgcgcgctccgccgccggcagcgcgtcccactcgggccgccacgtgcacaccgtcgctggcccgtacgtctccgtcagcccgtacgagtggatcaccaggaacccgagctcctccatccggaacagcacctgcggcgccggcggcgcgccgcccgtcatcacagtcaccggcctcttcctccccgcgcccagcggcgccctctcctccgccgtggcgttcaccaccatgctcagcaccgtcggcgcgccgcccatgtgcgtcaccccgtgcgccgccacggccgcgaagatggcgcccgagttcaccttgcgcaggcacacgttggtgccgccctgcgccgccacgccccacaccaggcaccacccgttgcagtggaacatgggcaccgtccacaggtacaccggcagcgccgtcatgtcgttgaggagcaccgacgacagcgagttcaggtacgcgccgcggtgggtgtacaccacgcccttgggccgcgacgtcgtccccgacgtgtagttcagcgcgatcggctcgttctcgtcgtccggccaccggatcaagaactctggatcgccgcctctgctgctgctgaggaggagggcctcgtactcgtagcaccgatcgacgcctgggatcttgtcgtttcctgtcgccgctgacggcggctcgtcgagcgcctcgttgattagtaccacggcgggcaccctgctcgctccgccggcctgctgggagatgaggcggagcgcctcccgggcgacgcccagtagcgcggcgtccacgaacacgaccttggcctccgagtgctgcagcagcacggacgccatgccggcgtcgagccgcgagttgagcgcgcagatcacggcgcccgccatgggaatgccgaagtggagctcgcagaaggccgggatgttctgcgcgaacaccgcaacctgcacgggggcagcaacggctgcggttaggaccggccggccagttcgattcgattcggtactagaagcagcagcaaattcagcccgtccactgccgatgagaacaacactatctacctactcgggcaaatcgagagagacagacaggggatggagaacagcaagagcagtaaaagtgaatgcttggacggcggcaggtagataacgcccgaatctaccgctccgtacttatcgcacggaagaggaggcaaggcaacggctggacagagacttaccacgtcacggcgcgcgacgccgagccccgcgagcgccgcggcgaggcggaggcagcggtcccgggtctgccgccaggtgcgcggcggcggcgcggcggcgtgtccggcggcgacgacggcggggcggtcggggtagacgagcgcggtgcgctcgaggaagctgatgggcgtgagcggcgcgtggttggccgcgcacagcacggtgccttccatcgctcagagttgggcggcgcgccggcgcggaacagaggggaacgaacggccacactggagtgg

SEQ ID NO: 131057 - DNA, 1757 bp, Zea Mays
gcgtcatcccccaaccgctccttgctcccaccacgctccctgtaccccgcagcctcttcaggcagcattcctaacaccgacggctttcgttgaccttgtttgtgtgcgcgcgcacgtgcctgttttgctttgctccagaggctgggaactccaaagaggaacagggtccatggctggaggcgcaggaaatggttcgaacgaggcggtgcaggcaaaggggagtgggggtgatagctccgccgccaagccgctgcccccttgctgcgtcaaggcgagagcggcggcgcccgagtctgaggccaagtgccatgccaccgtggtttcgggatggttcaccgagccacgatcacactgcggtaaagccagcaaggttcagtattacaataacccaatgtggccaggagaggcccattccttgaaagtggagaacatattgtaccaggggaaatcaccataccaggaagtcctggtctttgagtcgtcaacctatgggaaagtccttgtgcttgatggtattgttcaattgactgataaggatgaatgtgcgtaccaggaaatgattactcacctcccactctgttcaattccatcccctaaaaaggttttggttattggtggtggtgatggaggtgtacttcgagagatttccagacacagttcagtggagtctattgacatatgtgaaattgatcagctggttattgatatctgcaaggaattcttcccacatttgtctgttggatttgaagatcctcgtgttcaacttcatgttggtgacgctgtggagttcttgagaaatgctcctgaagggacatatgatgctatcattgttgattcatctgacccaatagggcctgctcaggaacttgtggagaagcctttttttgagaccatcgctagagctttgaggcctggtggtgttctttgtaatcaagctgagagtatgtggttgcatacacatttgattcaggacatgctttcaatttgccgtgagactttcaagggttctgtccgctatgcatgggctagtgtcccaacatacccgagtggggtgattgggtttctgttatgcgccaaggatggcccaccggtcaactttctgactcctgtaaatccaattgaagaagtggaaggagctactaaagcgggaagggagatcaggttttataattcagagatgcatatggcagcgtttgttcttccgacatttgccaagagggagctagaagcatactgtgcttccacggaaacggagcaggcggaggaagtagcggccacggcaccacaaaagctaactgcggcgcccaagcgtggaattaccaccgcatcctagctgttggatacacacatagccatgtactattattatcacgcacgtaatctaagcatcgaagtcgagtgcgtgcgtgttgggtgggggtacgcgcatcgcggtttgacgcgcgatgtatttgataataattcgtgctccgaggtaccaacaagcaacgatgagagaagcattccacctttacactccccttttaggtctggatactcattattgatctcaatccacatgagttgaggtggattgggggtgtttaacagggctttttggtttgaaagagattagagaggattaaatttctttctatacaaatttgtatatgagatttaatttttctcaatacacccttaatcgaacaaacccttagtagatcagccagatgatctatgctatgatatatatataacatgctcaagtgttttgtgat

SEQ ID NO: 131058 - DNA, 1822 bp, Zea Mays
ccattttcatctcgtttcgccgccttttacttatcccatcttccctcgactgcgctctctctcccccttctctcgcgcggcaactgggccatcgccgccacccctacccaggtcttcgtcggtcgcttcgccagccgccaggtcttcgtcggcccatcccccggtcttcgtccttcaatcctccggcgacgagcacccaccagaggctgggaactccaaagaggaacagggtccatggctggaggcgcaggaaatggttcgaacgaggcggtgcaggcaaaggggagtgggggtgatagctccgccgccaagccgctgcccccttgctgcgtcaaggcgagagcggcggcgcccgagtctgaggccaagtgccatgccaccgtggtttcgggatggttcaccgagccacgatcacactgcggtaaagccagcaaggttcagtattacaataacccaatgtggccaggagaggcccattccttgaaagtggagaacatattgtaccaggggaaatcaccataccaggaagtcctggtctttgagtcgtcaacctatgggaaagtccttgtgcttgatggtattgttcaattgactgataaggatgaatgtgcgtaccaggaaatgattactcacctcccactctgttcaattccatcccctaaaaaggttttggttattggtggtggtgatggaggtgtacttcgagagatttccagacacagttcagtggagtctattgacatatgtgaaattgatcagctggttattgatatctgcaaggaattcttcccacatttgtctgttggatttgaagatcctcgtgttcaacttcatgttggtgacgctgtggagttcttgagaaatgctcctgaagggacatatgatgctatcattgttgattcatctgacccaatagggcctgctcaggaacttgtggagaagcctttttttgagaccatcgctagagctttgaggcctggtggtgttctttgtaatcaagctgagagtatgtggttgcatacacatttgattcaggacatgctttcaatttgccgtgagactttcaagggttctgtccgctatgcatgggctagtgtcccaacatacccgagtggggtgattgggtttctgttatgcgccaaggatggcccaccggtcaactttctgactcctgtaaatccaattgaagaagtggaaggagctactaaagcgggaagggagatcaggttttataattcagagatgcatatggcagcgtttgttcttccgacatttgccaagagggagctagaagcatactgtgcttccacggaaacggagcaggcggaggaagtagcggccacggcaccacaaaagctaactgcggcgcccaagcgtggaattaccaccgcatcctagctgttggatacacacatagccatgtactattattatcacgcacgtaatctaagcatcgaagtcgagtgcgtgcgtgttgggtgggggtacgcgcatcgcggtttgacgcgcgatgtatttgataataattcgtgctccgaggtaccaacaagcaacgatgagagaagcattccacctttacactccccttttaggtctggatactcattattgatctcaatccacatgagttgaggtggattgggggtgtttaacagggctttttggtttgaaagagattagagaggattaaatttctttctatacaaatttgtatatgagatttaatttttctcaatacacccttaatcgaacaaacccttagtagatcagccagatgatctatgctatgatatatatataacatgctcaagtgttttgtgat

SEQ ID NO: 131059 - DNA, 836 bp, Zea Mays
ggaatctctatttgttttgacattgtgtgcttagtaagggtttgtttttccctcctagattatataagttggattatggtggaagggtagaaaggtaaaatatcactttatgaccccaaataaactggaataagctagtattgagtagcttatttcagcttatttgtgatcataaagtgatattttagcctcctgtccttccaccataatctagcttatataatttaggagtgaaacaaacatggcctaattgtgagctgggacaaataaatgtttgtaggttttgcggttctagccagccttctagacatatgaatcttttgttgtgttcagcgtttttcccgtatggagcttaccttttttccttacagaatgtttgctcgaaattttgcagtggggtgattgggtttctgttatgcgccaaggatggcccaccggtcaactttctgactcctgtaaatccaattgaagaagtggaaggagctactaaagcgggaagggagatcaggttttataattcagaggtcagttttcttcaatcgatcgcatatgatttcttgtgccaatattttttttttgattcagcctgtgctgccctttgtcctagcatgcagaagtttatcttaacgccatgattaacagcttttatgactccgtccgtagtaaccccgagtctgtgtttcatttcatcatttgtgatatgggaatgttcgttactgttctctctctctcttttggctcaccggctgaagcccgttcaactgcaaccctcatgtgagatttctcgcatcaaagctcctttgcctaactttcgttgttgaacagatgcatatggc

SEQ ID NO: 131060 - DNA, 1791 bp, Zea Mays
atgggtgaaagccctaattttaagaatatgattcaacgtgctttctgtccacaataccaacctatcagtagaactactataaaatctgatttgatgtcgcaataccgtaaacatcttgttgttcttaaagaaagttttaaaaaagttcagttttcatttgctttaacttcagatatttggacttcattacatcaaaaaactagctacatttctgttgttgcacactatttggataattcatattgtcttcataagcttgttataggttttagagtgatgaatgattcacatactggttctgcaattgctaagcatattcttggggtagttaatgcttttggtataagcaataagattatgtctattactcttgataatgcttcctcaaatacaaatgcaattgaatccctatcccctcatctgcattcatatatagatggttatgttgtccaccaaagatgtgtgtgccacattattaatttggttgttcaggatggcataacagttgttagcaaacatttggataatgttcgtgctactgttcgtttcataacaagtacccctcaaatgattacaaaatttggtgagtattgcaaggcaaataatatgaaacaaaggaaatttggccttgatatgaagataagatggaattctacataccttatgcttaagaaactagaaggttatgagaaaattataactgtatttgtgaatgctaatgctcttgatattgatttggtgctaactgaggctgattggtatatggttaaacattttagagagtttttgatgcctttttatgtagccacaaatgttctatcaggtgtttactatcctacatcctgcttagtcattgattacatttggttaattgctgagtcatttgctaagcacagatctgattctcttctttgcactgttgttgctccaatggagttaaaatttctaaaatacttcgataacatatcccatatatattgctttgcaactattttggatcctagaaaaaaacttgatgggttacaaactgctttagaaggaattggcgacttgctagatatggactattcagatgctttcaatcatgtgaaagatgaattatttcgtgtttttggtttttattataacaaatatggtgaaagtgatgttacaggaacaatggctgaacatgacatagaacattcagatagttctttgacatctcacttatggaagagatctaaggggaaagaatctgctaactctacaacaaatcaaaggtggaatcctaatgctgaattgaatcattatctgtctactaactttgcagcgactgatcgcaccttgaagggtgataaggtaaaattacttgaatggtggagggaacacaagtacagttttccagtattatctcattttgctagagatattcttcttgttcctgtttctacggtttcctctgaagcaacatttagcacagtgggtagaattattgaagaaaggaggtcctctctttcacctgagacagtggaggccatcacctgccttaaggactggaaaagagcagatgatagaaagcaacatcaacttgaagatcctgaggttgaacaagcttttgctgatttcagccaagattagtgttacttttatctagttcatgtggactgttattgtaatatggactgttattgtaatatggactgtggacattaaaactttatccgatctgtactcttttccttacagagggagccccacactggggtgtaagatttttaacgaggcagatcgaggaataaaaacattttccct

SEQ ID NO: 131061 - DNA, 1714 bp, Zea Mays
ctcacggtctcacggtctcacctcatccacatctaccaggcatcagctcgaaagctcagcacatcacaggccagcccaagcagcgatgccagcggtggcgtccctttgggcgccgcccgcggctgcccggcggcggaggttctcccccgtggtctcgtcctcgctgcgccgggtcgcgtcgggcggcgggtctagctggcggagcgagcggcggctcatgtcggagctggagcgcacagtgacagcgggcgcgaccgagcgcgtcatccgcagctacgtcggcaccaagtcggagcgcgccgcgctcgccgcgctctccaggctactcatggactccgaccccctcgccatcccgttctacgaggcggtcacacaggcacggtggttcaaatggagctcgatccacgcagctgcagtcgccgccttgctcgaagccaacggacgcgccggagaatccaggtccctgatcgccgactccgtctcgcagcacctccagcagtcgaccgacgaggtagccctcttctactgcgacctcatagcggcgttctcctcgcgcgggctcaaggaccgggcgacggagttccacatggagctacggtccatgccgccgctctccgggcgcaaggcctacgcggcgatggtcaagtccctgtgcctgctgggcatgccggccgaggccgaggcagcgctcagggagatggtctcgcgagggcaccggcccgaggcggcccagttcggggccgtcgcgaggtgctacggcagggccggctcaccggccgacatggagcgggtcatcgcgtccatggcggacgccggcggcatccgcctcggcgccggcgcggcggatgccgtgctgtcgtgctacagcgcctgccgcgaccacgccaggactctggcgtggctgaagaggatgcggaagctgcgcgtcgcggtgaccgcgaaaggctacaacttggtgctcaactcgtgtccgtcgctcgcttcggtggtgcgggagctgggccctgagcttccgctgtcgacggccgggctggtcgggtggctcaggtctgcgtcgacaacaccggcaccggcagcggaagtggaggtggtgcgggagctcctggcgtcgtcggcgtcggttctggacagggcgatggagtggtcggaggccgaggcgaagctgaacctgcacgggttcagcacggttgcagcctacgtgctggtgctgcagtgggtggacgcggtgaggggccgcgcccgcgcgttgccgttggaggtgtcggtggtgtgcggcgttgggaagcacagtgacgtccgaggcgagtccagagtgcgggagctggcgcaggaggtgctgggacggatggggagtcccctgaagctgtcggcgagaaacagagggcggctcgtggcgaagcgagaccgggtggagcagtggctggccagcttgccggtgcctgaggacggcacagacccatcgcctgatgcagcaaacgaagaaccatttgtatttgcacttttcagaaaacttgggcagtttttttccaaccttatgtagatagatgttgctgcccccatcacaccagcatcgatcgaaagagctggcctggtgaatgaatctgtctcgaacgaactgactgatggcctagtgtgtttgcttggctttggcgccgtatgcaaatctggtgaatgaagcaggcagcgcatttgcctgcctttggcacaggatagc

SEQ ID NO: 131062 - DNA, 1701 bp, Zea Mays
ctcacggtctcacggtctcacctcatccacatctaccaggcatcagctcgaaagctcagcacatcacaggccagcccaagcagcgatgccagcggtggcgtccctttgggcgccgcccgcggctgcccggcggcggaggttctcccccgtggtctcgtcctcgctgcgccgggtcgcgtcgggcggcgggtctagctggcggagcgagcggcggctcatgtcggagctggagcgcacagtgacagcgggcgcgaccgagcgcgtcatccgcagctacgtcggcaccaagtcggagcgcgccgcgctcgccgcgctctccaggctactcatggactccgaccccctcgccatcccggtgcgccccctctcacagtctcacctctcccggaggaggagttctacgaggcggtcacacaggcacggtggttcaaatggagctcgatccacgcagctgcagtcgccgccttgctcgaagccaacggacgcgccggagaatccaggtccctgatcgccgactccgtctcgcagcacctccagcagtcgaccgacgaggtagccctcttctactgcgacctcatagcggcgttctcctcgcgcgggctcaaggaccgggcgacggagttccacatggagctacggtccatgccgccgctctccgggcgcaaggcctacgcggcgatggtcaagtccctgtgcctgctgggcatgccggccgaggccgaggcagcgctcagggagatggtctcgcgagggcaccggcccgaggcggcccagttcggggccgtcgcgaggtgctacggcagggccggctcaccggccgacatggagcgggtcatcgcgtccatggcggacgccggcggcatccgcctcggcgccggcgcggcggatgccgtgctgtcgtgctacagcgcctgccgcgaccacgccaggactctggcgtggctgaagaggatgcggaagctgcgcgtcgcggtgaccgcgaaaggctacaacttggtgctcaactcgtgtccgtcgctcgcttcggtggtgcgggagctgggccctgagcttccgctgtcgacggccgggctggtcgggtggctcaggtctgcgtcgacaacaccggcaccggcagcggaagtggaggtggtgcgggagctcctggcgtcgtcggcgtcggttctggacagggcgatggagtggtcggaggccgaggcgaagctgaacctgcacgggttcagcacggttgcagcctacgtgctggtgctgcagtgggtggacgcggtgaggggccgcgcccgcgcgttgccgttggaggtgtcggtggtgtgcggcgttgggaagcacagtgacgtccgaggcgagtccagagtgcgggagctggcgcaggaggtgctgggacggatggggagtcccctgaagctgtcggcgagaaacagagggcggctcgtggcgaagcgagaccgggtggagcagtggctggccagcttgccggtgcctgaggacggcacagacccatcgcctgatgcagcaaacgaagaaccatttgtatttgcacttttcagaaaacttgggcagtttttttccaaccttatgtagatagatgttgctgcccccatcacaccagcatcgatcgaaagagctggcctggtgaatgaatctgtctcgaacgaactgactgatggcctagtgtgtttgcttggctttggcgccgtatgc

SEQ ID NO: 131063 - DNA, 1073 bp, Zea Mays
cattcatcagtcatcacctttgagcttcctgaccttgtcgaggaatgcttgacggccggggaaaggattggcgccctttccgcctttccccggcgtcctcttctcgtcgagcgtctcgccggcgcggctactctggcccagccccagaatctccttgctggccatcctgatctgagcctgcttcctggccgacgacgatcccaggacgccgccgtccgccacgccagcatgcaccccgagcatgtccatcttggccgtcctcacctgctcctccctcctcgtccgcacccgctccctcctcttgtcgcgcttccccacggcgccgcccgggtcagccccggcggcggcgccgaacagggagccgcccttcttggcgccgccgggggagctgttgctattgctgttgctttgcttcgtccgggcgcccttccttggaatgcggccgccgtaggatgtgccgaggaggcggaggtcgaggcggccccacccttcctcgtcggagaggtcccacccgaagcgctcggccatctcctggagcggcccgtcgccgtcggcgtcgtaggcgtagtcgtagccgtcggcgtcgccgcggaggaagcggtgcgcgtgctcccactcgacgcggtcgacgtacacggggtcgtcgaggacggcgcgcgcgaggcctgcccagggcgcggtgtccccgtagtcgagctcggccgcgacccaccggaggtacgacggcggcagcgtgcccagcatctggcccctgtacttgccgaactcgatcacgcggtccctcgccggccgagacgacggcgccggcgcaggaggaggcgtgggcgccggtcccgctctcgccggcctggcgcggcaccggcaccggcgcgcgcgcggtggtgggtggtgaggggagggaggcggatgaggtgaggaggcgccgtcgtggacgtgggtgtcggcggagccggggaggagaggcagggtccggcagcggtcggggccagcatcgtcgcctgccgcggcggtcggcagccgaggcagggtctctggtggggactggggagtgatgagcctccgcagcgcacaga

SEQ ID NO: 131064 - DNA, 2082 bp, Zea Mays
atggccgtggatagtcccccgccggcgtcaccgcagcgacggcagtccgaggccggcgcgggcgggcggcggacggacaggcacggccgacgcctcgaggtgtacaacgaggtgctcgtccgcctgcgctcctccgccgcggtctctccggccttcgaggacgcgctctgggcccacttccaccgcctccccgcccggtacgcgctggatgtgaacgcggagagggcggacgatgtggtcacccaccagcggctgctccaggaggcgcgcgatccggaacgccggcccgccttgtccgtgcgcgtcgtgcaggtttctaggattatcgatactgatgtgggcgatccatatgatcctgacatggaggcagttgcttcgaatcgtcctgaggctaatgaaacggttcacccacctccagcatttggttcttcctccaatctagaggcgcttgcgcttgaaacaagtgagagtgatgtaaggagcactggtgatactgatcacagtgtacatctaatttccaggccgatgcacgagataacttttgcaacgattgataagccaaagctccttagtcagctgacttgtttgcttgctgagctcggtcttgacatccaagaagcacatgcattttcaacaattgatggctactcattggatgtatttgttgtcactggatggcatcttgggagtactgagcagctacaaggagatttgcttcagaaatttcacaaaatcgagacacaagcttggcctttatccagctcattatcaccgtcatcagaaggtcagcaaggtggagaaagtatgtcatctgcaagtgttgaaattccaacagatggtgtagatgtttgggaacttgaccttaagctgctcaagtttggaagcaaagttgcttccggatcaaatggtgacctgtaccgtggaacatactgcaatcaggatgtggccatcaaagtagtgaggcctgagcgcatcagtgcagatatgtaccgagattttgcacaagaagtgtacatcatgagaaaggtccgtcacaagaatgtagtgcagtttatcggtgcatgcacaagacaaccaacactgtatattgtaacagatttcatgccaggagggagtgtctatgattacctccataaaaataataatgctttcaagcttcctgaaatactgaaagtggcgaccgacatcactaaaggaatgaactacctgcaccagaacaacataattcaccgcgatctcaagactgcaaatcttctcatggatgaaaacaaggttgtaaaggttgcagactttggtgttgcacgagtgaaagaccaatctggagtgatgactgcagaaactggaacttaccgttggatggcacctgaggtcatagaacataagccctacgatcacaaagcggatgtttttagctttgctattgttctttgggaactgctaaccggcaagatcccttacgagtaccttacaccactgcaagcagcaataggtgttgttcagaagggtattaggccaacaattccaaaagacacacatcccaagctcatcgagcttcttcagaaatgttggcatcgagatccagctgagaggcccgacttctccgagatactggagatccttcagaaactctccaaagaggtgagaactgacactgagggtcgccacaaaacgaagtcagggttcctttcagcgctgaagagaagccactgaagggcactgggcacccagccacctatgatagtttactccaatgtaatgttggtgattgatgcacgctgtaatcacaatcacagcatgattctgaagttctgatgcaagttgaatagtgcgctgtagttgtacagtcacgattttctcgtgtaattgcagttgtctctctctttttggctcaatttgcccttttgttttgttgctttgccctcatgtaatcgtagatgatatttgttggatgttctaacgactggcatagattgaagtgtgctgaaataaattcctgctggtgagaaacagcgcgcttcgtgtcagttaactcggagatttatcatagatgagatgaatttactgatgcagttgactacttgt

SEQ ID NO: 131065 - DNA, 2332 bp, Zea Mays
acgtgcgcgccaccacctcccatgcaagggcagtcgtagcagcacggccgtctcgtgcccgtgcccgtgcccgccgcgccgcttttcgatcgacgcgatacgcccacccgcagcgccgttctctttggcagatccatggccgtggatagtcccccgccggcgtcaccgcagcgacggcagtccgaggccggcgcgggcgggcggcggacggacaggcacggccgacgcctcgaggtgtacaacgaggtgctcgtccgcctgcgctcctccgccgcggtctctccggccttcgaggacgcgctctgggcccacttccaccgcctccccgcccggtcagccgctcgatcgctgcgcttcggggccgccgccgccgccgcctggggatcgttttttttctcctgagtcctgacggcacgcatgcattcgcttgcgcaggtacgcgctggatgtgaacgcggagagggcggacgatgtggtcacccaccagcggctgctccaggaggcgcgcgatccggaacgccggcccgccttgtccgtgcgcgtcgtgcaggtttctaggattatcgatactgatgtgggcgatccatatgatcctgacatggaggcagttgcttcgaatcgtcctgaggctaatgaaacggttcacccacctccagcatttggttcttcctccaatctagaggcgcttgcgcttgaaacaagtgagagtgatgtaaggagcactggtgatactgatcacagtgtacatctaatttccaggccgatgcacgagataacttttgcaacgattgataagccaaagctccttagtcagctgacttgtttgcttgctgagctcggtcttgacatccaagaagcacatgcattttcaacaattgatggctactcattggatgtatttgttgtcactggatggcatcttgggagtactgagcagctacaaggagatttgcttcagaaatttcacaaaatcgagctttctgtacagacacaagcttggcctttatccagctcattatcaccgtcatcagaaggtcagcaaggtggagaaagtatgtcatctgcaagtgttgaaattccaacagatggtgtagatgtttgggaacttgaccttaagctgctcaagtttggaagcaaagttgcttccggatcaaatggtgacctgtaccgtggaacatactgcaatcaggatgtggccatcaaagtagtgaggcctgagcgcatcagtgcagatatgtaccgagattttgcacaagaagtgtacatcatgagaaaggtccgtcacaagaatgtagtgcagtttatcggtgcatgcacaagacaaccaacactgtatattgtaacagatttcatgccaggagggagtgtctatgattacctccataaaaataataatgctttcaagcttcctgaaatactgaaagtggcgaccgacatcactaaaggaatgaactacctgcaccagaacaacataattcaccgcgatctcaagactgcaaatcttctcatggatgaaaacaaggttgtaaaggttgcagactttggtgttgcacgagtgaaagaccaatctggagtgatgactgcagaaactggaacttaccgttggatggcacctgaggtcatagaacataagccctacgatcacaaagcggatgtttttagctttgctattgttctttgggaactgctaaccggcaagatcccttacgagtaccttacaccactgcaagcagcaataggtgttgttcagaagggtattaggccaacaattccaaaagacacacatcccaagctcatcgagcttcttcagaaatgttggcatcgagatccagctgagaggcccgacttctccgagatactggagatccttcagaaactctccaaagaggtgagaactgacactgagggtcgccacaaaacgaagtcagggttcctttcagcgctgaagagaagccactgaagggcactgggcacccagccacctatgatagtttactccaatgtaatgttggtgattgatgcacgctgtaatcacaatcacagcatgattctgaagttctgatgcaagttgaatagtgcgctgtagttgtacagtcacgattttctcgtgtaattgcagttgtctctctctttttggctcaatttgcccttttgttttgttgctttgccctcatgtaatcgtagatgatatttgttggatgttctaacgactggcatagattgaagtgtgctgaaataaattcctgctggtgagaaacagcgcgcttcgtgtcagttaactcggagatttatcatagatgagatgaatttactgatgcagttgactacttgt

SEQ ID NO: 131066 - DNA, 1686 bp, Zea Mays
atggccgtggatagtcccccgccggcgtcaccgcagcgacggcagtccgaggccggcgcgggcgggcggcggacggacaggcacggccgacgcctcgaggtgtacaacgaggtgctcgtccgcctgcgctcctccgccgcggtctctccggccttcgaggacgcgctctgggcccacttccaccgcctccccgcccggtacgcgctggatgtgaacgcggagagggcggacgatgtggtcacccaccagcggctgctccaggaggcgcgcgatccggaacgccggcccgccttgtccgtgcgcgtcgtgcaggtttctaggattatcgatactgatgtgggcgatccatatgatcctgacatggaggcagttgcttcgaatcgtcctgaggctaatgaaacggttcacccacctccagcatttggttcttcctccaatctagaggcgcttgcgcttgaaacaagtgagagtgatgtaaggagcactggtgatactgatcacagtgtacatctaatttccaggccgatgcacgagataacttttgcaacgattgataagccaaagctccttagtcagctgacttgtttgcttgctgagctcggtcttgacatccaagaagcacatgcattttcaacaattgatggctactcattggatgtatttgttgtcactggatggcatcttgggagtactgagcagctacaaggagatttgcttcagaaatttcacaaaatcgagacacaagcttggcctttatccagctcattatcaccgtcatcagaaggtcagcaaggtggagaaagtatgtcatctgcaagtgttgaaattccaacagatggtgtagatgtttgggaacttgaccttaagctgctcaagtttggaagcaaagttgcttccggatcaaatggtgacctgtaccgtggaacatactgcaatcaggatgtggccatcaaagtagtgaggcctgagcgcatcagtgcagatatgtaccgagattttgcacaagaagtgtacatcatgagaaaggtccgtcacaagaatgtagtgcagtttatcggtgcatgcacaagacaaccaacactgtatattgtaacagatttcatgccaggagggagtgtctatgattacctccataaaaataataatgctttcaagcttcctgaaatactgaaagtggcgaccgacatcactaaaggaatgaactacctgcaccagaacaacataattcaccgcgatctcaagactgcaaatcttctcatggatgaaaacaaggttgtaaaggttgcagactttggtgttgcacgagtgaaagaccaatctggagtgatgactgcagaaactggaacttaccgttggatggcacctgaggtcatagaacataagccctacgatcacaaagcggatgtttttagctttgctattgttctttgggaactgctaaccggcaagatcccttacgagtaccttacaccactgcaagcagcaataggtgttgttcagaagggtattaggccaacaattccaaaagacacacatcccaagctcatcgagcttcttcagaaatgttggcatcgagatccagctgagaggcccgacttctccgagatactggagatccttcagaaactctccaaagaggccagtcctgcatttccagttctcgctgctagtttaccacatgtctaa

SEQ ID NO: 131067 - DNA, 1553 bp, Zea Mays
ctctctctctctctctctctctctctctctctctctctctccacctccaccaccagcccccaccatcccggctcggagaccgcttccctccctccacccccgcaaccctctcccgccgcgcacgcgccaccctccattcctccgctccccgcttcctcccgatcttaaccacccgccgcgccccctcccgccacccggcttcctctccccctcttcttcctccctcaaaccagacgctcgccccccatttccccatctctcttcttcttcttcttcttccccatccagaggaggaaggaagaagaataagcaggaggcctctcccccccagcccagccaccccgtagcgacgacggagggcggaagaggatgagcgcgtccaggttcataaagtgcgtcacggtcggggacggcgccgtcggcaagacctgcatgctcatttcctacacctccaacaccttccccaccgactatgttccgacggtgtttgacaacttcagtgctaacgttgtggttgatggtaacactgtcaacctcggcctctgggacactgcaggtcaagaggattacaacagactgagaccactgagctatcgtggagctgatgtttttcttctggctttctcactgatcagtaaagccagctatgagaatgtttcgaagaagtggatacctgaactgaagcattatgcacctggtgtgccaataattctcgtagggacaaagcttgatcttcgagatgacaagcagttctttgtggaccatcctggtgctgttcctatcactactgctcagggagaggagctaagaaagcaaataggcgcgccatactacatcgagtgcagctcaaagacccaactagtattgccatctgctcattcatccgctaacacgcggtatcacgtgagaggcactgacggactttacttattgtttcccacgtgaatttgcagaacgtgaagggtgtcttcgatgcggcgataaaggttgtgctgcagccgcctaaggcgaagaagaagaaaaaggcgcagaggggggcgtgctccattttgtgatctaataatgatcagtagacaaaagaaacaagggcgaaggtgccatggttctattatcgccgcgtcttgcttcagcgaaacagcaatggatgatcccaccccctcccccccctagattttactggcggctgcagcgagtcgaggcattcgagagcgatatgtttgtttcatttccctccttcccgccttgtgattatctggtgtgtgtgactgacgaggtcgtggcaatttaggtaactcgcttagaaggtatttcccccgtgtttgagcccccacccccaccaaaaaaaagaaggtatcatgctatctctgttccataagtagacatgatgtaatcgtactaagtgtttatttttattttttttacttatttcacttcaatcaatggaaaattatgcttcccaattatatggtgggtcatggcagtccccctccctccttgtttgcctgtcaagttctcagtgtctttgtggcaaatggagcatgcatattgattta

SEQ ID NO: 131068 - DNA, 1373 bp, Zea Mays
ctctctctctctctctctctctctctctctctctctctctccacctccaccaccagcccccaccatcccggctcggagaccgcttccctccctccacccccgcaaccctctcccgccgcgcacgcgccaccctccattcctccgctccccgcttcctcccgatcttaaccacccgccgcgccccctcccgccacccggcttcctctccccctcttcttcctccctcaaaccagacgctcgccccccatttccccatctctcttcttcttcttcttcttccccatccagaggaggaaggaagaagaataagcaggaggcctctcccccccagcccagccaccccgtagcgacgacggagggcggaagaggatgagcgcgtccaggttcataaagtgcgtcacggtcggggacggcgccgtcggcaagacctgcatgctcatttcctacacctccaacaccttccccaccgactatgttccgacggtgtttgacaacttcagtgctaacgttgtggttgatggtaacactgtcaacctcggcctctgggacactgcaggtcaagaggattacaacagactgagaccactgagctatcgtggagctgatgtttttcttctggctttctcactgatcagtaaagccagctatgagaatgtttcgaagaagtggatacctgaactgaagcattatgcacctggtgtgccaataattctcgtagggacaaagcttgatcttcgagatgacaagcagttctttgtggaccatcctggtgctgttcctatcactactgctcagggagaggagctaagaaagcaaataggcgcgccatactacatcgagtgcagctcaaagacccaactaaacgtgaagggtgtcttcgatgcggcgataaaggttgtgctgcagccgcctaaggcgaagaagaagaaaaaggcgcagaggggggcgtgctccattttgtgatctaataatgatcagtagacaaaagaaacaagggcgaaggtgccatggttctattatcgccgcgtcttgcttcagcgaaacagcaatggatgatcccaccccctcccccccctagattttactggcggctgcagcgagtcgaggcattcgagagcgatatgtttgtttcatttccctccttcccgccttgtgattatctggtgtgtgtgactgacgaggtcgtggcaatttaggtaactcgcttagaaggtatttcccccgtgtttgagcccccacccccaccaaaaaaaagaaggtatcatgctatctctgttccataagtagacatgatgtaatcgtactaagtgtttatttttattttttttacttatttcacttcaatcaatggaaaattatgcttcccaattata

SEQ ID NO: 131069 - DNA, 677 bp, Zea Mays
ctctctctctctctctctctctctctctctctctctctctccacctccaccaccagcccccaccatcccggctcggagaccgcttccctccctccacccccgcaaccctctcccgccgcgcacgcgccaccctccattcctccgctccccgcttcctcccgatcttaaccacccgccgcgccccctcccgccacccggcttcctctccccctcttcttcctccctcaaaccagacgctcgccccccatttccccatctctcttcttcttcttcttcttccccatccagaggaggaaggaagaagaataagcaggaggcctctcccccccagcccagccaccccgtagcgacgacggagggcggaagaggatgagcgcgtccaggttcataaagtgcgtcacggtcggggacggcgccgtcggcaagacctgcatgctcatttcctacacctccaacaccttccccaccgactatgttccgacggtgtttgacaacttcagtgctaacgttgtggttgatggtaacactgtcaacctcggcctctgggacactgcaggtgactagccgtgctgttctgtcctgtcctgctacttatgatgctttttttttcctttcctttgcgcgatatcctttttctttgttcatcaaaatggttgagcttccatctttgcaactgt

SEQ ID NO: 131070 - DNA, 1671 bp, Zea Mays
cgaattcgcccttgtttcataaaggtcagttggaacttagacacgcttggtgatttcgtgattatgagaagcaatggacagcctgtgtataacttttgtgtgacagttgacgacgctaccatgcaaatatctcatgttatcagagctgaagagcatctaccaaacacattgcgacaggctttaatttacaaagctcttggattcgcaatgccttcatttgctcatgtttcgcttattctggctcctgacaggagtaaactgtctaaacggcatggagctacttctgtcgggcagtataaaaatatgggctatctacctcaggcaatggtcaattatttagcactactgggctggggtgatggcactgagaatgagttcttcactattgatgacctaggtatggtttcaaaactctgtttcctgtcattttcactgaaatattgggcctgcttggttcctggcatagtatcgctcgccttgcaacatggtgctcacttgagtgggtgagccgatttggctctcccatggaagcaagccaaatcttgctcgcatgtccccaaaacatcttagcaagagaaccaaacagacactgtggcctggtatcctcgctcagcaaggagtaacagtctcagagaaggaaccaagcaagctttttctttttttccccattttttaggaactgttactctcaactttggtgctatctcatttgcagtccagaaattcactataaaccgtgtcaataaaagtggagcagtctttgatgcaacaaaattgaaatggatgaacggacaacatctaagatcatttccccatgatgaactcatcaaagcttttgaagatcggtggacggacacaggcattctccaggaatctgaaagtggttttgctaaggaagctgccgagcttttgaaggatggtatcgatttgataacagatgcggacgcagctcttacgaatctgttgtcatatccccttcatactactctaagcagcgaggaagctaaacctgtggtgcaagacaagatctccgaggttgcttggagtcttatttccgcgtacgacagcggcgaactcggccaagcgctagctgagggccgtgatggctggcagaagtgggttaaaggtttcggcaagtctatcaaaagaaagggcaaggggctcttcatgccgctccgggtactgctgaccgggaagcttcatgggcctgacatgggtggcagcatcgccctaatacacaaggccggcgtctgctgcgctgtgactccgcagtccaacttcgtgactctagacgagcggttcaggatgctcaaggacgtcgactgggagtcgctggcgaaggagcaggaaacccctgctgtccctgccgccgcttcctagactgccaggaggaggacgacgttgcgcgcaatgtcgctcttgagtttttttttaaaaaaaaaatccattttggcgtgtttttgtcaccgttcgtttccatggagtaggagaggagctcagtggtttggtcataggtcgttggtgctgtaatgtgggcaataatattgaattattattattagatgatgatgatgatgcctgtaatctgcgtgtctacagcttctcgtttgctgaatacttcatctttttttttgacaagtgaatacacgattattacaggtgttcatacgc

SEQ ID NO: 131071 - DNA, 1392 bp, Zea Mays
cgaattcgcccttgtttcataaaggtcagttggaacttagacacgcttggtgatttcgtgattatgagaagcaatggacagcctgtgtataacttttgtgtgacagttgacgacgctaccatgcaaatatctcatgttatcagagctgaagagcatctaccaaacacattgcgacaggctttaatttacaaagctcttggattcgcaatgccttcatttgctcatgtttcgcttattctggctcctgacaggagtaaactgtctaaacggcatggagctacttctgtcgggcagtataaaaatatgggctatctacctcaggcaatggtcaattatttagcactactgggctggggtgatggcactgagaatgagttcttcactattgatgacctaggaactgttactctcaactttggtgctatctcatttgcagtccagaaattcactataaaccgtgtcaataaaagtggagcagtctttgatgcaacaaaattgaaatggatgaacggacaacatctaagatcatttccccatgatgaactcatcaaagcttttgaagatcggtggacggacacaggcattctccaggaatctgaaagtggttttgctaaggaagctgccgagcttttgaaggatggtatcgatttgataacagatgcggacgcagctcttacgaatctgttgtcatatccccttcatactactctaagcagcgaggaagctaaacctgtggtgcaagacaagatctccgaggttgcttggagtcttatttccgcgtacgacagcggcgaactcggccaagcgctagctgagggccgtgatggctggcagaagtgggttaaaggtttcggcaagtctatcaaaagaaagggcaaggggctcttcatgccgctccgggtactgctgaccgggaagcttcatgggcctgacatgggtggcagcatcgccctaatacacaaggccggcgtctgctgcgctgtgactccgcagtccaacttcgtgactctagacgagcggttcaggatgctcaaggacgtcgactgggagtcgctggcgaaggagcaggaaacccctgctgtccctgccgccgcttcctagactgccaggaggaggacgacgttgcgcgcaatgtcgctcttgagtttttttttaaaaaaaaaatccattttggcgtgtttttgtcaccgttcgtttccatggagtaggagaggagctcagtggtttggtcataggtcgttggtgctgtaatgtgggcaataatattgaattattattattagatgatgatgatgatgcctgtaatctgcgtgtctacagcttctcgtttgctgaatacttcatctttttttttgacaagtgaatacacgattattacaggtgttcatacgc

SEQ ID NO: 131072 - DNA, 462 bp, Zea Mays
atggaggctgcggcgtcgaatgtggatcacgcgcccacggaggaggaagcagcgccagcgtcggtggtggagatggatgcggaggagctcggggtggccggcattctgagcgacctgagcaggctcatccgctcacgggaccggcaggagcggcgtcgggaacggagggagaggcaccgccggcggctggtgcagcgagacgacaatccctccccagaaccagctcccgcggccgcgtcgtccgccgtccctagccccgaaacaccgctcgcgtacccgcagagcggcggggacgacgacacgccgcccaaggacaagggcgaggccgccgccactgttcgcccacgggaccaggtggcgacgaggaagaagaaggacacaccgcggatggtgccgtcgagagacctaactgacgagcgactgctagagtgggcaaaggcggcagaggatcggtacctgtag

SEQ ID NO: 131073 - DNA, 169 bp, Zea Mays
tcatggatcacaatcctatattcctatggattgaactctttatataactttgttaatgcacatgttagtgactggctagttgagcttttaaaagtatggaaacactatgacatactatgtattttggcactttgaaagttgaaactaatgatgaatggtacagaccata

SEQ ID NO: 131074 - DNA, 375 bp, Zea Mays
atgcagtggaacaagagttgtgatggtgtccagaagaagataatccatgatgaaatagagattgtgaagacggaatctaagtataatgcccacaagagagccaagcactacaacgttccaattccattctatgatgaaatagagtttatcttcacaggaaaacaaactattggagaatttagtgtgcttcaagcaccttttgacggcccaccaagacatgctgccgatcccaatggcaacgggagaaagagtaaaaaacaagtagatgtgaacaataatccatctcagtactatgattctgatactcttccagattctaacggtcctacacaggtgattctaaggagaaacctgatgatgactagaagaaaatga

SEQ ID NO: 131075 - DNA, 2716 bp, Zea Mays
gtcgtcccaaatggccacgggcgcaccgccggagacggagccggcgtcgacggcggcggcgcggaagctgcaccacctgctccgctcccgcgacctcctcccggcgctctcgtacctccgcaccctcccttcccccttcaccctgctccccaaccacgcgctcaacgcgctcctccgggccctcgccgccgctggccgcgtgcgcgccgccgcctccctgttccgcgccatccccgcgcctacgccgcactccttcaactccttcctcgccgcgctcttgcggcggggccggcgccgcgcggcgtcggcgctgctcgccgctttcctgcgctgccccggcgcctcccccgacgtggccacgctcaacaccctcatccacggcctctccactgcctcgccgcgcccgtcttcccccgcgctcctcaggctcttccgcttcctgccggaggcctacgccttcgcgcccgacgccatcacgtacaactccatgctggctgctctgtgccgagcgggggacctggccaccgcgcgcaggctgttcgatggaatgcgcgcgggcgagcaaggcggggaggctggcgccttccctaacgtggtcgcctacaccaccatgatcagggcgtgctgtgcgagtaggcttgccgatgaggcgctgtcgctcttcaagatgatgctcgcggatggcgtgcggccgaacaggatcacctacaacaccatggtgcagggcttctgccaggccggaaggatggagctggtaaaggaggtgttcgggatggactcatttaagccggacacgtgcacgttcaatacgctgatggccgcgcactgtagagaagggcggatacaggacgcgaagaaggtgtttgatcagatgatggagctccgcgtgaggcgcgactctgcgagttacagcatcgtgaccagggcgttgtgcgagaacggtgagtttggtcgagcagaggagcttgtggacagcctcttggagaaggaggttctcaagaaaagaggtggttgtgtgccactcattgcatcttacaatccagtttttaagtacctctgtgagaatggcaaggcaaagaaggccaggttgttattcgggcagctgctggatattaggagcaaggtcgatttcctagcattcaagacactaatcctaggacattgtaaggagggagattttgaagaagggtacgagctggtgctctcaatgttgaagagggatcttatgcctgacagtgagtgctatattgctgtaatagatggctttatgcagaaggggaggatgaaatctgcctgggaggctcttcacaggatgttaaacagtggtcttcgacctagcacaagtacgttccactctgttcttctggggcttttgaagaaagatggctgtgcgaaagaagccgcagatttgatagagataatgctggagaggaagatcaggcagaatgttgacctttctactaatctgattggtgtgttgttcaaaagtgatcttaatgaccgtgcatacaagattactaagcatctgtacgacaatggatattacattaagatggaaaaactaatcgcgacactttgtgaggacaagaagttcatagatgccgcggagttttctttgttcagcttgcggaagcgccatgaactgggtgtggcagttcacagccaggttctggatggcctttgctcggatcgtagaacttcagaggcattccagcttttctatgagctaaatgagaacaaaaggacttctgcggttgctgcaccccgcagcctagtctttctgcatcatgctcttgaggaagctggaatggtgcaagaagctggttttgttgctaaacagatgagacgtgcaactgccacaactaggcgaaggagctaaggttttactccatgttttttagcatctttgcggggagggaagggattcccacctggatagctgttattgctaacatggatagcctgactctaagctattttcttacataatggtgcaagaccaaggatgctggaactggatgtcaagttggttgcctttcctcagctgatcagcaagggaatggctggtcattgaacaatggttgtttgatgatggaagattgcatatggcattaaggggtctgtaaatgatttgattttcttgagctaactcctatcagcagatattcagattgcagaagctcatctgatggtcagtcctaaagacaaactaaagcctgtattttctgatactgacatactgtgtatttaagtgcaggtgagacaatagagctgctgctgctgcttcctgttcaactggagaagagttgtgaaaatcaaagtgtctcaaattaaaaagataactcgtagtaaaatgctagcgaaagaacaccacggtctgtcatgatatttagcaaccagtgacatcgtcctgtcatgatctttagcaacagcacatgtctggaccacatgacagtatatgtctaggactcagttcgaggttgagatcgaagaacttgagaagttgggcgtgaagcttcagaacctgagcaacatgccatgatgccagcgggagtcgtgttgctttctactccctctgctctgctccatattagaagacattttggttttttttatttcaactgcttttgctatgtatttagatatatactgtatcaaacggaatgtatctagaaaagtattaaaatttggaacggaagggatagtttgcgtgatg

SEQ ID NO: 131076 - DNA, 736 bp, Zea Mays
ttgctgagacatcatggcctgcctctctcaggagcctgaacgcgagtgttgcgtcgaagaggtcgtcgctgtggaggagacgcgtgcaggcgcccgtcgccatggcgccctcgatctcttcctcgaagaagtggtcgatgcagaggcgcttgaggttgtcgatggtgaccagcatctcccgcccgccgccgctcttcttctgacgctgacgcagcatccgtttgacgtccgtcgatagctacctggagatcgaagtcactccgcagcagcgtgttggacgacgatgatgccgccaaagtacggaccaagtggccgcgctggcggacttggtggtggctgtttgcagccgccgacgaagctgctgcaaggagaagaggctccacgaaggaggaggaggaggaggaagagatgacgcgtgcaggtgcagcagacatggttgctcctggtagagagtacatcgtctactactcgaactaactgaacaacaaccagctaatcaatcagaaaccaaagcaagccgctgctaatggcgatgcgccgatgtatagctgtgagcagctagctgtgcctgcttgtgagtgagtgatatgcatcgaggtgagcgcaggccctccaatttatagggcgagtttgtatgcagcttcttccgatgcttcattagggatttagggtctattctgagggcatacagaacacatcaccttcattcattcattcagtcactgtgcgcgtgtga

SEQ ID NO: 131077 - DNA, 338 bp, Zea Mays
ggtgctttaagtatactagtcgattgcctgtgcgttgcgacggcttacaacaatacccatgtaaactatccaccaaaaaaattcaatatttctttattgatcgtctccgctctcggtataatattttttttgatttggctaactgatgttattgtttactctatccaatatgtcttggtacaacacgaccaatgaagtgagcaattagaagagagttcacaacgactgtccgaacgaacagagattataaaatgacataattccaccatacagagaccaaataagagaaagtttgtgagctcaagtttctaaaataagtcacatgaactcaaacttat

SEQ ID NO: 131078 - DNA, 744 bp, Zea Mays
acaccatcccaactcttgttccactgcattgttgccctttcatgacttgtcttgttgaatgtttgaaggtgggttcgaccttcgcttacggtcatggaagaggcgacgatgccaaaactcttgcagagctcggattccagatcggtgattacttgagcgttgcaatcatgtagacggtgcccgcaccggatgtaattgctgtgatgtcaaaagggctctggttgcaacagtaaggcatgattctctgttagcactaggaactgcaaccagaattgtctgtaataccggtagtatcaaatttacctagacacttcgaacgagcaaggcgtctgtaataccggtacttacctgtggtgcctggagcttccaaatctggatagcgtgggtttttcattgagaatgttaagttggctcgggttcctatgaagtcaaacacaggaaagtttgcatcttggagccagaccagagtttgcatcttggagccagaccagttgggcaaattttgtttcgccatttctaaaatcttgtagccaggctagatttgagataacagtttagataatagttactctaaaattgaactgatggtcgaatttgcaccggagattggtctctttatgaacagtaaaagaacagtacaattataatgcatctgatagaatgcaaaagaaataaatgcatgacttgcaaccatttttcagaggcaaggtaccaacagttttaacgcgattttctcagttacgt

SEQ ID NO: 131079 - DNA, 1249 bp, Zea Mays
gcaaaatttagggtttctttgcatctctcccgtcggctcctcccctcccaagtcccacctcacctctcctcctcgcgaagtatcggcggcggcgagcgcggcaggctaggtcaactcgatccttctttccccactgaccgatctggcaaaaccttgtctacgttggttgatgtgtgtgcttcgtccaatctcgcagagcctcgttgctgaggaggggagatggcgggtatgggcgatatgccgatgaggcctgcgcggccgggcccgccgatgcagcaccgtggtccgcccccgatggcgcgcctccgccccgaaccaatcgaccgcgagaagacctgtcctctgctgctcagggttttcacaagggttgctggtcaccaccaaaatgaagagtttgcagtgagagggaaggaaccaaaggatgaagttcagatttacacatggaaggatgcgaccctccgcgagctcactgatcttgtgaaagaggttgctcttccagcaagaaaaaggaatgcaaggctttcttttgcatttgtatacccagacaagaatggtcgttttgttgtcagacaggtgggttcgaccttcgcttacggtcatggaagaggcgacgatgccaaaactcttgcagagctcggattccagatcggtgattacttgagcgttgcaatcatgtagacggtgcccgcaccggatgtaattgctgtgatgtcaaaagggctctggttgcaacagtaaggcatgattctctgttagcactaggaactgcaaccagaattgtctgtaataccggtagtatcaaatttacctagacacttcgaacgagcaaggcgtctgtaataccggtacttacctgtggtgcctggagcttccaaatctggatagcgtgggtttttcattgagaatgttaagttggctcgggttcctatgaagtcaaacacaggaaagtttgcatcttggagccagaccagagtttgcatcttggagccagaccagttgggcaaattttgtttcgccatttctaaaatcttgtagccaggctagatttgagataacagtttagataatagttactctaaaattgaactgatggtcgaatttgcaccggagattggtctctttatgaacagtaaaagaacagtacaattataatgcatctgatagaatgcaaaagaaataaatgcatgacttgcaaccatttttcagaggcaaggtaccaacagttttaacgcgattttctcagttacgt

SEQ ID NO: 131080 - DNA, 1169 bp, Zea Mays
ggaaactgcaaaatttagggtttctttgcatctctcccgtcggctcctcccctcccaagtcccacctcacctctcctcctcgcgaagtatcggcggcggcgagcgcggcaggctagagcctcgttgctgaggaggggagatggcgggtatgggcgatatgccgatgaggcctgcgcggccgggcccgccgatgcagcaccgtggtccgcccccgatggcgcgcctccgccccgaaccaatcgaccgcgagaagacctgtcctctgctgctcagggttttcacaagggttgctggtcaccaccaaaatgaagagtttgcagtgagagggaaggaaccaaaggatgaagttcagatttacacatggaaggatgcgaccctccgcgagctcactgatcttgtgaaagaggttgctcttccagcaagaaaaaggaatgcaaggctttcttttgcatttgtatacccagacaagaatggtcgttttgttgtcagacaggtgggttcgaccttcgcttacggtcatggaagaggcgacgatgccaaaactcttgcagagctcggattccagatcggtgattacttgagcgttgcaatcatgtagacggtgcccgcaccggatgtaattgctgtgatgtcaaaagggctctggttgcaacagtaaggcatgattctctgttagcactaggaactgcaaccagaattgtctgtaataccggtagtatcaaatttacctagacacttcgaacgagcaaggcgtctgtaataccggtacttacctgtggtgcctggagcttccaaatctggatagcgtgggtttttcattgagaatgttaagttggctcgggttcctatgaagtcaaacacaggaaagtttgcatcttggagccagaccagagtttgcatcttggagccagaccagttgggcaaattttgtttcgccatttctaaaatcttgtagccaggctagatttgagataacagtttagataatagttactctaaaattgaactgatggtcgaatttgcaccggagattggtctctttatgaacagtaaaagaacagtacaattataatgcatctgatagaatgcaaaagaaataaatgcatgacttgcaaccatttttcagaggcaaggtaccaacagttttaacgcgattttctcagttacgt

SEQ ID NO: 131081 - DNA, 668 bp, Zea Mays
gcaaaatttagggtttctttgcatctctcccgtcggctcctcccctcccaagtcccacctcacctctcctcctcgcgaagtatcggcggcggcgagcgcggcaggctaggtcaactcgatccttctttccccactgaccgatctggcaaaaccttgtctacgttggttgatgtgtgtgcttcgtccaatctcgcagagcctcgttgctgaggaggggagatggcgggtatgggcgatatgccgatgaggcctgcgcggccgggcccgccgatgcagcaccgtggtccgcccccgatggcgcgcctccgccccgaaccaatcgaccgcgagaagacctgtcctctgctgctcagggttttcacaagggttgctggtcaccaccaaaatgaagagtttgcagtgagagggaaggaaccaaaggatgaagttcagatttacacatggaaggatgcgaccctccgcgagctcactgatcttgtgaaagaggttgctcttccagcaagaaaaaggaatgcaaggctttcttttgcatttgtatacccagacaagaatggtcgttttgttgtcagacaggtaaggttgtaagaatttgggcatgtttggacacttggctccatctcgccttgctttgctgggcaaactagccttgccaggcaaaactggatgtt

SEQ ID NO: 131082 - DNA, 2274 bp, Zea Mays
agctcgctcccctcccgccccactcgtcggctagtcgcctagtccctttcccttccacacgattcggagcagcacgtgcgcgtcaaaccttaccaccaccgccatcgtcttgcggctaaattgccttgagacgccgcagcactgcagcagcacagggggggagaaggggcgggcgctcgagtgaaccaccactacactactccgcgtctccctcccctggctacgaggctataataacgagcgcgtaagacggccggcggcgcacgcagccatgtccgcgcacctccgcctactctcggccgcccacgtctccgcgcccacacccacctccctccaccgcctccgtggccctcctccttctcctcccgcggcccgcctccggctgctgctgcgaccgccgcggctcggggggagccaggcgcgcttcgccggcgccgtccgctgctccggctcggcgtcggcgccggcggtcgcgcgggttggcgaggacagcgacgcggcggcgggcatatgggagcaggtgcgggatatcgtcgtgttcgccggccccgcgctagggctctggatctgcggtccgctcatgagcctcatcgacaccatggtcatcggccagacctccgcactccagctcgccgcgctagggcctgggacagtgttctgcgattacctaagctacatattcatgttcctctcggtcgcaacatccaacatggtggccacctccttagccaaaaaggatgaagaacttacacaacatcaagtgtctatgttactgtttcttgctcttgcttgtggcataggaatgtttttgttcaccaaggtgtttggtactcaagtattgactgcttttactggatctgggaattatgaacttatttcttcggccaatacatatgcacagataagaggtttcgcatggcctgcagttcttgttggcttagttgctcaaagtgctagtctgggcatgaaggactcttggggtcctttgaaggcattggcagctgctagtgttataaatggtgttggtgatatatttctttgctctgtttgtgactatggaattgctggtgctgcctgggcaactatggtttcacaggttgttgcagctttcatgatgatgcaaaatctaagcaataagggttttcgagctttctcatttacgattccatcagttagagagctattgcagatatttgaaattgcagctcctgtttttgtgacaatgacgtccaaggtggcattttatgcattgctcacatattctgcgacttctatgggagcaataacgcttgcagcccatcaggttatgatcaatgtcttatgcatgtgtactgtttggggcgaacctctgtctcaaactgcacagtcattcatgcctgagctggtatatggtgctaatcggaatctgaccaaggcaaggatgctattgaagtcacttgtgatcattggagcgataactggattgaccttgggggtagtagggacacttgttccatggcttttccccagtgtctttaccaatgaccaaagggtcatccagcagatgcaccgagtactggctccatatttcagtgtattgctggtgactccttcaatacactcccttgagggaacactcttggctggaagggatttgagatatttgagtcaatcaatgggtgtctgcttttccattggaacccttctcttgatgcttctccgcagcaagggtagcttggcaggatgctggtgggttctcgtcttatttcagtggagccggttcggaagcgctttgctacgacttgtttctccgacgggcatgctgttcaacaaaaacttcaaccaggtcgagtacattgaggcaaaaacgacatgaagatgcactgtacccatcacaagaggtgggatgatgaagatgtagaaaatgaggcacagaaacctggaaagatgaatagatgcaaaaggattcgcaaaaaccatgggaagatcatttgggcaaatcacttccgtccagaaggggatcagagttggctacgatcacttccattcgtcctaggaactatatacctcacagattcatggaagctgagaactgtagtagtggctacgctttccaacacttggcagtttgcgcccgtagaatggagttaaactgagtgctaaattttgtttcttgttactaaccgttaagaatcacgagatggttaatgatggttgagcttgtccagaaaacatggataagtgaggtctcaaaaaatgtagcatcttttccaatattatcgtttcttatgccat

SEQ ID NO: 131083 - DNA, 1201 bp, Zea Mays
tcaaaagagaggaagcaccaccaggccgcgcgacggagcaaaacgaaacgcggcagccagcacaacccagcagagcgcgactcgactcgaatcgaatagtcccgtcctttcggttctacctttccctcccgcgccgccgcagccgcctccagggccgcggaaaccctagccacctcgtcagtgccgcgcgccgggtgtctcgccgccgcccgtcactgccgctgacaccgccggagcgatcggatctcgagaccgtcaggagacacgatggaggattgggattctgaagatttccagcccgttgctcctgttgtgaaagtcgagccacttaaaaatcagtgggctgatgaagatgtcgatgccgacgacgtaaaagattcatgggaggaagaagaggaagaggagaaacctaagccagcggctgtgcaaaagaacgcgacgaaacctagcgctaaggctcctgctaaaaagggaaaacagcaagcatcaacaagtgccgaggaaccagacgagcctttgagtcccacttcagagaaaattcgccaacagaggcttgtggaagaagctgacttcaagtcaactacagacctttttgcaaagaagagcggtgaacaaaagtcactagatacttttatcccaaagtccgagagcgactttgcggaatacgcggagcttattgcaaataaactgctcccctacgataaaagttttcactacatggctctcctcaagaatgtcatgagactttccatgacaccgttgaaaggctcggacgcgaaagacatatcttcctccgtgacggcgattgctaacgagaagatcaaggctgagaaagaggccgcagcaggcaaaaagaaacaaggagcgagaaagaagcagctccacatcgagaaaggagacgacgacttcatccccggacggggtggtggctacgatgacccggacgagtacgacttcatgtgatttggctggaaggaagagtaagtagggttaataggtttccgtcttgtatacatttggcaagcagagaacatatcacgagagtttgcggcatactatactatggcatggaacatgcgttatctgtttgaggatgaattttgactctgcaggacaagaagatcacaagtgcttacttaattgttattgaatctctgtggtatttttttagcatacattgcattttcatttattttttgtc

SEQ ID NO: 131084 - DNA, 1437 bp, Zea Mays
atgttgtcgtacttatttgttggatgccttgctaagagattcaaaggagaagcatatctaagtgccacgacatcatgtacatggtacttcaacccagacaatcctgaagcccagatgtactacaacaagttgctaaacactaagttccaaatgttacgcccccaagcaaccgcggaagaattacaggcttctcaaacactcaacatcgaagacaagaccattgaagaactacttcagctagatccagatatgttccctgaacaaggtttcagatgcaccgtcactatatcacgcctcatacaaaatggtagatggtggttcccatcctgtatcaagtgcaacaagtcttcatcccagacatctactgggtaccaatgcacatcatgcaatgggacagaaacagagtacaggcacgatgcaaacttacgtattctgaaactctacacgacacaaatgttgatgaacagatttcagttgaagtcaataaaaacagcctcgcgtcacctcctaagaagcgtccacatgtggccgtgttctgcctcccaggacgtcggtcgcgatattccagcgactctccatcccccgccgccatcatcgacctccacgccctccacatttcacggatcatcctccgctcctgtgggcgttcacaagtgcaccgtgcccccgctcccgtcttccccgcctcccttgcacgagatgcccgtcgctgatggacccctcccgagaatgccgcgccaagcagcctcctcgccccctcctccgcggcccccttccatcctcgcatgtgcactcggtacttccattcgcactagcctgcactctatccgcagtaaccgctctctgcctgccttcctccctgttcgggtcccacacgatggtggtttccaaaatctgagggcgacagcgctacacaaggagaaggcatgggtcgtcgtgcagaggaaggtcgaggtcatggatcatgcggagctcaccaaagcctactaccatagggacaaggggaaaatcgtgccaccccctagctcgcgcgatgctcagcgatggtacgccttcctttggtatggtgccctgataatcacctcccaccgtacccccacccctaaccccactcgcatgatgcccagggagagcctacatcctccccgcctcgctcatgatcagccgagttggccgccgttctcaagggccctctcgtcggtgccctcacgggccctcttgccggcgctgcatgcgagtaagccgtgtgcggctccatcaaagggcttcaccgaggggtttctaacgacgtgcttatatcctgctttggaatatagttccaagaagaacgccaaggggaacaaacctagaaaagaaagaaacataatttttgaaggtttcagaacgcctagagaagctattgaagttcagtatttcttttcttgtccaaccaattag

SEQ ID NO: 131085 - DNA, 1146 bp, Zea Mays
atgtgccacgaatgtttggattgttgtactctactactctgacatcatttagttcaacataaacaagggtttgcatttgtctacatggaagatgaacgcgatgctgaagatgctatcagtagacttgatggaattgattttggcagaaaaggaaggaggatcagggttgagtggacaaaggaggatcgcactgttggccgaaaaagcagctcaaggaggtctccaaccaatacaaaaccgaccaaaaccttgtttgtgatcaactttgacccgatcaacacaagaatccgagatctggagaggcacttcgataaatatggcagggtcgcaaatgtaagaatcaaaaagaactttgcctttatccagtttgagatacaggaggatgctacaagagcattggagggtactaatggaagccatttcatggacagggtgatctctgttgagtatgcacttcgtgatgacgatgaaaaaggtgaaagagggaacgggtacagcccagacaggagaggtcgtgaaagatccccaggtagaaggcgttctcctagtccctacggtagaggacgggagagaggtagcccagattacgggagaagcaaggagagggggagcccagactatggcaggggaggacgcagccctgataatggcaggggagtaagcccagctggtggtggcagaggcgatcatgccaggggtggagggcgcagtcctgactatgatcgccagcgccgggaagctagtcctccaggttatgacaggtcccccagccgctcacctgggagggaggcgagagagtagaagcagcgttccattccatgcctgtgttcaagcatcagatgaatgtgcaagttggtaatgttagccagcaggaaacttgtctactatgcgcgttagctcgtgtttgactttccacccatttcagtatgaagcgacctcagaatgtaactcatgtagtagtattttttcaatggtagctttcagcactggtttgaacctgttgttggctttattttctgagtaaaatgcaccactcgaactttacgcattgtgtcacttgggtactgaactcagaaaaccagttaaacggatcatgaaactttgttggcccatgtaaaaccattcaaagtcagttctataaaccgg

SEQ ID NO: 131086 - DNA, 2507 bp, Zea Mays
gcgtgcccccctccctccctcagtccctctctctcgctctcggcgacgactgggcgaccgccgccgccgctgcgccgcccttgtccaggtgcccaggtcttcgcaggcgccttcgccaggtcttcgacggtaacgagcaccaaccggattcagggaatataagtaaaatgaggccagttttttgtgggaaccttgactatgatgttcgcatctcagaggttgagcgcctttttgggaagtatggaagggtggaacgagtggatctaaagacaggttagtctgttactctgttcattgttatgtcctcgaatttatttatgatctataatagcaaaacaatcgttgctcctgcagctatatgctgtttttggtcaaaggcagtgctctattttattaagtgaattacatccagtgtcagcaactgcagctttgaatcattctctctccaatttagatactgaagcattactgaatgtatatatccatccataagacaatgctgctggatttgcatttaaaaaaaatcaattatctagccatccaaaaacagagcaatgcctttgtttaaattttgtttttatcaattgatctgcaatatttgttcaatcacaaatacacgattttcacatgactcctctaagaatgtgatctttgtacggaaactactatcaccatgatgtggcagagattgtcaatcttcacccatgcctggtgcaaagaagctgcaaaaggatcaagttgttacttcatccgttgtgaagccagaggagtttcaggaaaatcagattatgtttatgttttactgttataagtcattggacaagtgtatatcaggataaattagaagaaaaaagttctttcttcaaatttaggtccagtactcaattatttctttgccgcagggatatcatggagcatatgtgctcttcctggttgatggactggctctacctttactgcctctgcctgtgccccatctcatgccttgtccatctccaggagttcacaagtccaccgtggcatctgttcacatggaaacgaccacctcgtgactgatgtcttacttttacgatcaacattgcatcctcctcccccgcctcatcaccatttcctcgccaatccaaccatgccaatctcatggccggctggagagtggagagaagtggaggttgcaccaccaattctttgatgtgccacgaatgtttggattgttgtactctactactctgacatcatttagttcaacataaacaaggtctgttcctgtttattatagtgtatcagactgtagatttgtgaggtgatcttagaaaagtttaaaggagagactgcatcatggtttatcttgttgccttttctgtttatgttattggaccatactgtaatttctttgaacaagtcacttattctaccttgttcaacatgaagggtttgcatttgtctacatggaagatgaacgcgatgctgaagatgctatcagtagacttgatggaattgattttggcagaaaaggaaggaggatcagggttgagtggacaaaggaggatcgcactgttggccgaaaaagcagctcaaggaggtctccaaccaatacaaaaccgaccaaaaccttgtttgtgatcaactttgacccgatcaacacaagaatccgagatctggagaggcacttcgataaatatggcagggtcgcaaatgtaagaatcaaaaagaactttgcctttatccagtttgagatacaggaggatgctacaagagcattggagggtactaatggaagccatttcatggacagggtgatctctgttgagtatgcacttcgtgatgacgatgaaaaaggtgaaagagggaacgggtacagcccagacaggagaggtcgtgaaagatccccaggtagaaggcgttctcctagtccctacggtagaggacgggagagaggtagcccagattacgggagaagcaaggagagggggagcccagactatggcaggggaggacgcagccctgataatggcaggggagtaagcccagctggtggtggcagaggcgatcatgccaggggtggagggcgcagtcctgactatgatcgccagcgccgggaagctagtcctccaggttatgacaggtcccccagccgctcacctgggagggaggcgagagagtagaagcagcgttccattccatgcctgtgttcaagcatcagatgaatgtgcaagttggtaatgttagccagcaggaaacttgtctactatgcgcgttagctcgtgtttgactttccacccatttcagtatgaagcgacctcagaatgtaactcatgtagtagtattttttcaatggtagctttcagcactggtttgaacctgttgttggctttattttctgagtaaaatgcaccactcgaactttacgcattgtgtcacttgggtactgaactcagaaaaccagttaaacggatcatgaaactttgttggcccatgtaaaaccattcaaagtcagttctataaaccgg

SEQ ID NO: 131087 - DNA, 1352 bp, Zea Mays
gcgtgcccccctccctccctcagtccctctctctcgctctcggcgacgactgggcgaccgccgccgccgctgcgccgcccttgtccaggtgcccaggtcttcgcaggcgccttcgccaggtcttcgacggtaacgagcaccaaccggattcagggaatataagtaaaatgaggccagttttttgtgggaaccttgactatgatgttcgcatctcagaggttgagcgcctttttgggaagtatggaagggtggaacgagtggatctaaagacagggtttgcatttgtctacatggaagatgaacgcgatgctgaagatgctatcagtagacttgatggaattgattttggcagaaaaggaaggaggatcagggttgagtggacaaaggaggatcgcactgttggccgaaaaagcagctcaaggaggtctccaaccaatacaaaaccgaccaaaaccttgtttgtgatcaactttgacccgatcaacacaagaatccgagatctggagaggcacttcgataaatatggcagggtcgcaaatgtaagaatcaaaaagaactttgcctttatccagtttgagatacaggaggatgctacaagagcattggagggtactaatggaagccatttcatggacagggtgatctctgttgagtatgcacttcgtgatgacgatgaaaaaggtgaaagagggaacgggtacagcccagacaggagaggtcgtgaaagatccccaggtagaaggcgttctcctagtccctacggtagaggacgggagagaggtagcccagattacgggagaagcaaggagagggggagcccagactatggcaggggaggacgcagccctgataatggcaggggagtaagcccagctggtggtggcagaggcgatcatgccaggggtggagggcgcagtcctgactatgatcgccagcgccgggaagctagtcctccaggttatgacaggtcccccagccgctcacctgggagggaggcgagagagtagaagcagcgttccattccatgcctgtgttcaagcatcagatgaatgtgcaagttggtaatgttagccagcaggaaacttgtctactatgcgcgttagctcgtgtttgactttccacccatttcagtatgaagcgacctcagaatgtaactcatgtagtagtattttttcaatggtagctttcagcactggtttgaacctgttgttggctttattttctgagtaaaatgcaccactcgaactttacgcattgtgtcacttgggtactgaactcagaaaaccagttaaacggatcatgaaactttgttggcccatgtaaaaccattcaaagtcagttctataaaccgg

SEQ ID NO: 131088 - DNA, 2433 bp, Zea Mays
atggcgacaccgccgccgcgaccgggaccggccgccgcatccgcggcggtctccctcctcgaccacctcgagcacgcgaatttcgctccaccccctccccctccgccgccgccctcccccaccaccgtcctcaccgcgtggtcgcgcctccgcgaccctaactccacctcccccgctgacgcactcgccgcgctagagacgctccaccaccaccgtcgcgcgctccgcctctcgtccgcgcacgcctcgctcctgctcccactgctcccgctacacccccgcctcgtggccacgctgctcgccgctgccccgcacctcggccccgcctccgtcccggcctccctccccttcgcccctcgcctcctcctcctcggcgcccgcgcctccgccaaggatctcccgggccgtgccagcttcggggaacccgcttccaccgcgaagaatcccgccggcagcggtgagcctgccgatggccaggacgacgaccctgttgtagctgtgggccgcattcttgaagatgtggagcggggcggtcagagcatcgatgatgtcgaccacctcgcccttgcaggggttggttacgcgctggcgtctgctgacgaggtgcagttcagaaggatcattgtgcccttgcttaggatctgtggcaggactgggaatctgtctgtcggtgttcgggtgcttaagctgatggaatggctggtaatgggattcatcgagtccaggaagatgaggaatgctcaggtgctctttgagatgacttcaccggaggagtgtgagggcgagaactattgtgtgctgttaccagcggtgatgttggcctgcggtgggttgcgggcactgagggttgcttcggctaggtaccggttggactttgatccacggctgaagcaggcgcctgagcggacaattcagtttgcagctgagcgggctgttttagaagggaggccggccgatgaccagcatatccttgttcagtgtgtcgcattggggctgtcacggtgtgggcaggtcgcgtttcacgaatcggtgttacggtgtgtctgtatgggattgctaaaggagctcctcccacttcctgattttcttaggaggtcggtccaaaacgcaggagggaactcaaatgaggttatcaaggctcaggtcaataaacaccttgatagtgttcttttcaaagaggcaggcccagtgactggggttctttgcaaccagtattcatatgccaatgacaaggctaaaagctttgtcgaaacttgtgtatgggagtacgcacaggagatttatcgtcatcttcgtgcagcagtgttgctgcaccgggggaagcaggatggcttgattacggcgattgacaagaatgctgaggcctcatttcttatggttgtagtctttgcagccgaggtcgctaaacacaggctaaatgctaagtcctccgaggggttccaacctgaggttgctgctagaatcttggtggcgttctcttgtgtggaacatcttaggcgactgcgtctccctgagtacactgaggcagtccggagtgctgtgcttgccaatcaagagaatgtagcagctactgctttgttcatcgagtcaataccttcatatactgaactgacaagtgaaccagatttactggccttggatagaccaacaacatataactggtacagagatgaggttcagacatcacgcatgctgttttacttgcgggttgtgccaacttgtgttagcctcattccagttcatacgatgcaggataaactggcctcaatcatgttcttatatctacaacatccaaatgagaaagttacaagtgcttcacactctgtgatggtatcgttcctgtcatctggcagtgatgctgatcaggatgatcgagcagctttgaaagagcgacttgccttttactacatcaagagatctttggaggcttatcctgggttaacaccgtttgacggattagcatcaggagttgcagcacttgtacggcatcttcccgcaggcagtgctgccattcttttttgtatccatagccttgctgtcaaggctaaagatctttgtgagactgcaaatgttcagaacaaatccttgtggaggtcatgggaagagagcacagatccatgtaagaaaacattggatctgttgctgagactaatcttccttgtggatattcagtcattcccttacctgttgaaggagctggcacagttggtgaccctgctaccaaaggaaggccaggatgcggtccttgatgacatgcacacccatgtcgcggagtctgacgatgtcactcggaagccggtactcgtgtcgtggctgcagtccctctcctacctaagctcacagtcgagccgtgaatctcacagcaaggccaagagtgctactgcatccgtagcaagcgatgagctgctggacagagccgtggcacgcttgtga

SEQ ID NO: 131089 - DNA, 1310 bp, Zea Mays
gaaaaaaactcacagttgggttcgaccttgccgtctcccactctcccttctcgcgccgttggaggcaaatcgccgcgccgccccctccgcccccgttgtccgccttggttccctcctcgcacctccctcttctgccccctccctcgttgcccgccctccagcgacaactgctcccctcccacacgcgcgactcctcccagcaccgtttagggtctcgcgactcggcggcgaggcggcctttgtcggcaaactcgggcacgacgagttcggaagaatgcacgcggccatcctccacaacaacggcatcgactactatgtcgtcgtcttcgatgtgggcgcgcgcactgcactcgtcttcgtcaccctatgcgccgatggggagcgtgaaccccagtgccgacatggtcctcaatgccaacgagctcattatgaggatatttgttggtaagggacataacacttcacatgcccatatgactttagaagctcatggatccttttagtgtctcctgaaattgaggtatatgaagggatgatagtttgatgccatccacgtgacagtgaccttgaggccattgacaccaatatagatcatgttgagcctgagcacaaagaccttctgagagtccatgaagtgggaggtggctctacaatgtgttgcatccactcagttggatctaatcttactcgtactagggagctactagagttgtagtagaatgtgttcatgcagagcgggcaagaagctttcacagtgggtaaggattcaaacaggactccaacaagtgtgcatgagctggttgtacctatttgttccctggaaactggagtgcttggaaagagaatcaaaaggtctctaactggtgggcatgagatgcagtctacccaggacaagtgatcagggaggctagcatggtgaaggaagcaatactccaacatgtcaagttacaaaaccttcaagttcagtgagatggggtgacaggagtagctaaccacagttgaggcgacaaaaatacatatccaagtttaggtccttgtgcagatagacagataaacaagtatgacagtcacttcagaagtagcttccactccctatgttttgcaaggtagagagctccacgatgtagattccagacccaatgttgcgcaaggtagtaaaagttgtacacatctgttagcctgttgctgttgttgatctggtgatgaacattctcttctacaaaatcaaaagatgttttatttacatagaaattggacatatgaagcttctgttgagtgcatgataattcaatatattatgggttatattc

SEQ ID NO: 131090 - DNA, 1902 bp, Zea Mays
aatcctcgccagaggccgtaaagcccccctccttcctccctccctccatccctccccctaccctgcccccacacacacaccgccgcgtccgaccccctacgccgtcgactgctcggccggtcggctccgatggggtacgtgctgtcggcggtgggcagggtgctggagcagcccacggcgtggggggcggcctgggagatggcgctcctcgcggggcccctgtgggcggcggccctcctcggcctgctgctcggctgggcctggcgcccgcgctgggcagccggcctcgtcgtcgccaccgcggacgacggcggcagcgccaccaccgccgccgccgccgcgcagccgcccttcgccacgctcgacttctggaaggcccagctccccgcccgcctccgcgccccgctcggcaccgccgtgcagcagagggagggtgacaaggacgccgtgcaacggaaccgcggaacggtggcgcttggcaggtcgtcggagacggagacggcgacggcgagagaggagccggtggcggtggcggtggggatggccgacctggtgaacctctggaggctggtggagggcgcggacggtggcccggcctggaccaagatgatggagaagtcgctgcccaccatgacgtaccgggcgtggaggagggacgcccagaccgggcctccgcagtaccagagcagcagcatcttcgagaacgccagtccagaggaggtgagggacttcttcggggacgacgagttccggatgtccaacaggtgggacgacatgctcatctaccacaagaccctggaggagtgccggaccactgggacgatgaaagtgcattgggtccggaagttccccttcttctgcagcgacagggagtacataatcgcccggcggatatggaagctggggggcgcctattattgcgtcacaaagggcataccatgctcatccattccacggcgtagcagacctcggagagtcgatctgtattactcaagctggtgcatccgcgcagtggagtccaggagagggaacggaggaggaaggggggcgacggcctgtgaggttctgctgttccaccacgaggacatgggcatcccgtacgagatcgccaagctgggcattaggcaagggatgtgggggtgcgtgaagaggatcgagccggggctccgggcctaccagcaggcgcgggccgcgggggcgccgccgtcgcggagcgccctgatggcccggatcaacaccaaggtcagcgccgacggtttcgctcgccggtcgatggagtcgttgtccagctccagcggcggcgacgggccggagaccgcggacgacgcgcaggagacagagaacaagaagcccgcgacgaggagccacgcggcggcgaggctcctcgtgctcggcggcgcggtcgctctggcctgctgcacccttgaccaggggctcctgaccaaggctctcatcttcggcgtcgcgcggaggttcgttgggcagaggaagacgttgtagcgtcctacacaccttgtcgctcgtacggtcgtgccgtgtgctgatcgccgacgtcgagaagcgggggaaggaggtggtttgtgtgggctttgtggatgtggttaattggtgctgatgccattgtggctgaaagagagcggacgaagagcgttttggtgtctacgtgtgtatacgctgccggctgtcggatcacgagggagaggggtttcctactatatacatgtgtaaaaatttgtttcatgtaatcttgtatctgagtgaccagatcaggtgattatgcagatgagaagaacagagttttttttcggtctaccttagctgttcttggtaaggatgagaacgaaccgggggcagtatcgtcagacagattgttttaatccatattctaggcgctgtttcttt

SEQ ID NO: 131091 - DNA, 1732 bp, Zea Mays
ctccctccctccatccctccccctaccctgcccccacacacacaccgccgcgtccgaccccctacgccgtcgactgctcggccggtcggctccgatggggtacgtgctgtcggcggtgggcagggtgctggagcagcccacggcgtggggggcggcctgggagatggcgctcctcgcggggcccctgtgggcggcggccctcctcggcctgctgctcggctgggcctggcgcccgcgctgggcagccggcctcgtcgtcgccaccgcggacgacggcggcagcgccaccaccgccgccgccgccgcgcagccgcccttcgccacgctcgacttctggaaggcccagctccccgcccgcctccgcgccccgctcggcaccgccgtgcagcagagggagggtgacaaggacgccgtgcaacggaaccgcggaacggagccggtggcggtggcggtggggatggccgacctggtgaacctctggaggctggtggagggcgcggacggtggcccggcctggaccaagatgatggagaagtcgctgcccaccatgacgtaccgggcgtggaggagggacgcccagaccgggcctccgcagtaccagagcagcagcatcttcgagaacgccagtccagaggaggtgagggacttcttcggggacgacgagttccggatgtccaacaggtgggacgacatgctcatctaccacaagaccctggaggagtgccggaccactgggacgatgaaagtgcattgggtccggaagttccccttcttctgcagcgacagggagtacataatcgcccggcggatatggaagctggggggcgcctattattgcgtcacaaagggcataccatgctcatccattccacggcgtagcagacctcggagagtcgatctgtattactcaagctggtgcatccgcgcagtggagtccaggagagggaacggaggaggaaggggggcgacggcctgtgaggttctgctgttccaccacgaggacatgggcatcccgtacgagatcgccaagctgggcattaggcaagggatgtgggggtgcgtgaagaggatcgagccggggctccgggcctaccagcaggcgcgggccgcgggggcgccgccgtcgcggagcgccctgatggcccggatcaacaccaaggtcagcgccgacggtttcgctcgccggtcgatggagtcgttgtccagctccagcggcggcgacgggccggagaccgcggacgacgcgcaggagacagagaacaagaagcccgcgacgaggagccacgcggcggcgaggctcctcgtgctcggcggcgcggtcgctctggcctgctgcacccttgaccaggggctcctgaccaaggctctcatcttcggcgtcgcgcggaggttcgttgggcagaggaagacgttgtagcgtcctacacaccttgtcgctcgtacggtcgtgccgtgtgctgatcgccgacgtcgagaagcgggggaaggaggtggtttgtgtgggctttgtggatgtggttaattggtgctgatgccattgtggctgaaagagagcggacgaagagcgttttggtgtctacgtgtgtatacgctgccggctgtcggatcacgagggagaggggtttcctactatatacatgtgtaaaaatttgtttcatgtaatcttgtatctgagtgaccagatcaggtgattatgcagatgagaagaacagagttttttttcggtctacct

SEQ ID NO: 131092 - DNA, 2027 bp, Zea Mays
caccaaactcagacccacacactgaaattcccctaaaatcactacggaccacttcaccggcggctcgccgtactccgccgccgtaaaccgatgaccctttcattaggcttgttgcggtcaggcctcctcaaccggcgcatcaaccaaccggcgaatcaagtccttcgcctccacctcgcattctcctccgcctcgccgtccccgtccgacccctccgccgccgccgccggcccccagaccaccatcagggaagggaaagtggaaatatttttggacgagtccaactcagtcttctacaacaagacccaggttaacaatagagatatttccattgctgtattgagatcatttattttgaaaagacatgaagaatatgctgcccgatcaagaaaagcaggaccaggagacactacattgagtgcgcaagctaagtataaagagccgaaagttcttgaggcattagctgcatcagggctaagagccattaggtatgctgttgaggtagatggaattggtgaagttactgctgttgacaataatgaagccgctgtagaagcctgcaagaaaaatatacagcacaatggcagtcttgcatcttcgaaggtggtaccacatcacgctgatgcacgtgtctacatgctcacacacccaaaagaatttgatgtggttgaccttgatccttatgggtcaccagctgcattccttgattcagcggttcaatgtgtagcagatgggggcatcttgatgtgctcagctacagacatggcagtgcttgctggtggaaatgcagaagtttgtttttctaagtatggttcttatccattaagaggtaaacactgccatgaaatggcgctgaggattcttcttgcctgcattgagtcacatgcaatccgtcacaagcgctacatagttcctataatatcagtacacatggatttctacattagggtttttctcggctagcacagtaaaaagctcaccactcaaattggcacatgtttaccaatgcactgggtgcaattcattttacctgcaaaatattggaagaattcattcaaaggtagtctttcttatcttctttcattgtcttgcatgttcttaatgttacaataatttgatccaggataaggaaaacatagctgtaccaaattttcgccttactctgcctgaagtatgttctgaatgtggccatcaatttgttatggggggacctctttggagttatccaatacatgacaaggtatgggctgcttcaatattatcagatattcatgctatgagagaagcatatccagcttatccaaaaatttcggctatactatcttcagtctcagaggaattgctggaggcacctttatttgtgagtcttcacaatctgtgtgcaatactgaagtgcactactccaaccatggttatgttacaatgtgctatcagaaatgctgggtatcaagtatcaggaagtcatgtggacccgctagctcttaaaacagatgccccgatgtcagtgatctgggacatcatgcgatgctgggtcaagcttcacccagttaaacatcgacctggaaatcatcctggcaatgtgatactttcccaagagcctaaatttcaggcaaaattttccagagtactgggggcctcggtcacccggaagcgcgcaagattcatgccaaatcctgagaagtattggggtcctgggacgaaggctggcaggaatccgagaacatttcagatggataaccgtaactgacgcgatctccgcgccagagcccagaagacggataatttagtttattgctttgtcaattgatatagtttgtgcgattgcaatatttgaatgatgtttgtgagtttgttccttaagttcacccttcctaaaattttaggttgagtccaccggtgaccggcagcatggctccaacactagacaggacatacgttaggtatttttggtcgaagatcgttatggacagtcttcattatcatcaaagatacatctatgattttttgaagagaaaaacgacttctac

SEQ ID NO: 131093 - DNA, 1961 bp, Zea Mays
caccaaactcagacccacacactgaaattcccctaaaatcactacggaccacttcaccggcggctcgccgtactccgccgccgtaaaccgatgaccctttcattaggcttgttgcggtcaggcctcctcaaccggcgcatcaaccaaccggcgaatcaagtccttcgcctccacctcgcattctcctccgcctcgccgtccccgtccgacccctccgccgccgccgccggcccccagaccaccatcagggaagggaaagtggaaatatttttggacgagtccaactcagtcttctacaacaagacccaggttaacaatagagatatttccattgctgtattgagatcatttattttgaaaagacatgaagaatatgctgcccgatcaagaaaaggaccaggagacactacattgagtgcgcaagctaagtataaagagccgaaagttcttgaggcattagctgcatcagggctaagagccattaggtatgctgttgaggtagatggaattggtgaagttactgctgttgacaataatgaagccgctgtagaagcctgcaagaaaaatatacagcacaatggcagtcttgcatcttcgaaggtggtaccacatcacgctgatgcacgtgtctacatgctcacacacccaaaagaatttgatgtggttgaccttgatccttatgggtcaccagctgcattccttgattcagcggttcaatgtgtagcagatgggggcatcttgatgtgctcagctacagacatggcagtgcttgctggtggaaatgcagaagtttgtttttctaagtatggttcttatccattaagaggtaaacactgccatgaaatggcgctgaggattcttcttgcctgcattgagtcacatgcaatccgtcacaagcgctacatagttcctataatatcagtacacatggatttctacattagggtttttctcggctagcacagtaaaaagctcaccactcaaattggcacatgtttaccaatgcactgggtgcaattcattttacctgcaaaatattggaagaattcattcaaaggataaggaaaacatagctgtaccaaattttcgccttactctgcctgaagtatgttctgaatgtggccatcaatttgttatggggggacctctttggagttatccaatacatgacaaggtatgggctgcttcaatattatcagatattcatgctatgagagaagcatatccagcttatccaaaaatttcggctatactatcttcagtctcagaggaattgctggaggcacctttatttgtgagtcttcacaatctgtgtgcaatactgaagtgcactactccaaccatggttatgttacaatgtgctatcagaaatgctgggtatcaagtatcaggaagtcatgtggacccgctagctcttaaaacagatgccccgatgtcagtgatctgggacatcatgcgatgctgggtcaagcttcacccagttaaacatcgacctggaaatcatcctggcaatgtgatactttcccaagagcctaaatttcaggcaaaattttccagagtactgggggcctcggtcacccggaagcgcgcaagattcatgccaaatcctgagaagtattggggtcctgggacgaaggctggcaggaatccgagaacatttcagatggataaccgtaactgacgcgatctccgcgccagagcccagaagacggataatttagtttattgctttgtcaattgatatagtttgtgcgattgcaatatttgaatgatgtttgtgagtttgttccttaagttcacccttcctaaaattttaggttgagtccaccggtgaccggcagcatggctccaacactagacaggacatacgttaggtatttttggtcgaagatcgttatggacagtcttcattatcatcaaagatacatctatgattttttgaagagaaaaacgacttctac

SEQ ID NO: 131094 - DNA, 1922 bp, Zea Mays
ctctctcgcttgacctacccccctccgccccccgcccgagcgccgccacggcatggcttcctccatctccgccgccgctaaggcctccgcggccttcgcccacaagaaggagctggccgcgccggcgccgcaccgcgcgggctcgagccgccggaccaagccgtgccgcgtgcgcgccgtcgcgtcgcccgcgcgcaccccccgcgccccgtcgtccaccggctcggtgaagaccgcgatgacgatgacggagaagatcctggcgagggcgtcggagcgcgcggcgctggagcccggggagaacgtgtgggtggacatcgacgtgctcatgacgcacgacgtctgcgggcccggcaccatcggcatcttcaagaaggagttcggggaggatgccaaggtctgggaccgcgagaaggtcgtcatcatccccgaccactacatcttcaccagcgacgagcgcgccaaccgcaacgtcgatatcctcagggacttctgtctggagcagaacatcaagtacttctatgatatcaaggacctcagcgatttcagggctaatccagactacaagggtgtctgccacattgcacttgctcaggaaggccactgccgaccaggcgaggttctcctgggtactgattctcatacgtgcaatgctggagcctttggtcaatttgcaaccggaattggaaacactgatgcaggttttgtgatgggcactggaaaggctcttctcaaggtgccacctactatcaggtttgtattagatggagaaatgccgccttatttacttgcgaaggatctgattttgcaaattattggtgagatttcagtatctggtgcaacctacaaatcgatggagtttgttggatcaactgtagaaagtctaaccatggaagaacgtatgacactatgcaacatggttgttgaagctggtggaaagaacggtgtcgtgcctgctgatgaaactacatttaaataccttgagggtaggacatcagttgattatcaacctgtctacagtgatgctgaggccagattttttagtgactaccggtttgatgtatcgaaactggagccagtagttgccaagccacattcgcctgacaaccgtgccctagcaagagaatgcaaagatgtcaagatcgaccgagtctatattggttcctgcactggtggcaagactgaggacttccttgctgccgcaaaggtgttcttagcctcgggaaagaaggttaaagttcccacattccttgtccctgccacacaaaaggtgtggatggacgtatatagccttcctgtaccaggatctggcggcaaaacttgcgcccagatattcgaggaggctggttgtgatacaccagcaagtcctaattgcggcgcttgtctgggtggccctcgcgatacgtatgcacggatgaatgaacctacggtctgcgtgtccaccacgaacaggaacttcccgggcaggatggggcacaaggaagggcagatctacctggcgtccccctacaccgctgcagcctcggccctgacggggtacgtcacggaccccagggacttcctcatgtgaacgatcttgaaacagccacagagtgcctgcaccgctgttttttgtgttgaaccttagtttaggcgtgtgcccttcgttgagaaataaactcccatgtcgggaggctgccattgccatttatgttttttgcgttatatttattacagtgactgccgataacgtagttgagcgttacaagggaaatacattcattctttccagtatcgatggcagtcactagactccgttcttacaaaaaaaaggcatgtcgagagatcttgtagttcatacacttgttaaaacacttttttgtacaatgtatgggaaagaagctcagtcgatctttcttgttttgaatgctctacgacacgtc

SEQ ID NO: 131095 - DNA, 2041 bp, Zea Mays
cgacactccccgagcacacacgccgcaacagcaccacccccagacccaagtcctgtcaaggcctcaacacacacacacactctctcgcttgacctacccccctccgccccccgccgggcctgcagggtgttcgacgcttcgcccgcccgcccgcccgagcgccgccacggcatggcttcctccatctccgccgccgctaaggcctccgcggccttcgcccacaagaaggagctggccgcgccggcgccgcaccgcgcgggctcgagccgccggaccaagccgtgccgcgtgcgcgccgtcgcgtcgcccgcgcgcaccccccgcgccccgtcgtccaccggctcggtgaagaccgcgatgacgatgacggagaagatcctggcgagggcgtcggagcgcgcggcgctggagcccggggagaacgtgtgggtggacatcgacgtgctcatgacgcacgacgtctgcgggcccggcaccatcggcatcttcaagaaggagttcggggaggatgccaaggtctgggaccgcgagaaggtcgtcatcatccccgaccactacatcttcaccagcgacgagcgcgccaaccgcaacgtcgatatcctcagggacttctgtctggagcagaacatcaagtacttctatgatatcaaggacctcagcgatttcagggctaatccagactacaagggtgtctgccacattgcacttgctcaggaaggccactgccgaccaggcgaggttctcctgggtactgattctcatacgtgcaatgctggagcctttggtcaatttgcaaccggaattggaaacactgatgcaggttttgtgatgggcactggaaaggctcttctcaaggtgccacctactatcaggtttgtattagatggagaaatgccgccttatttacttgcgaaggatctgattttgcaaattattggtgagatttcagtatctggtgcaacctacaaatcgatggagtttgttggatcaactgtagaaagtctaaccatggaagaacgtatgacactatgcaacatggttgttgaagctggtggaaagaacggtgtcgtgcctgctgatgaaactacatttaaataccttgagggtaggacatcagttgattatcaacctgtctacagtgatgctgaggccagattttttagtgactaccggtttgatgtatcgaaactggagccagtagttgccaagccacattcgcctgacaaccgtgccctagcaagagaatgcaaagatgtcaagatcgaccgagtctatattggttcctgcactggtggcaagactgaggacttccttgctgccgcaaaggtgttcttagcctcgggaaagaaggttaaagttcccacattccttgtccctgccacacaaaaggtgtggatggacgtatatagccttcctgtaccaggatctggcggcaaaacttgcgcccagatattcgaggaggctggttgtgatacaccagcaagtcctaattgcggcgcttgtctgggtggccctcgcgatacgtatgcacggatgaatgaacctacggtctgcgtgtccaccacgaacaggaacttcccgggcaggatggggcacaaggaagggcagatctacctggcgtccccctacaccgctgcagcctcggccctgacggggtacgtcacggaccccagggacttcctcatgtgaacgatcttgaaacagccacagagtgcctgcaccgctgttttttgtgttgaaccttagtttaggcgtgtgcccttcgttgagaaataaactcccatgtcgggaggctgccattgccatttatgttttttgcgttatatttattacagtgactgccgataacgtagttgagcgttacaagggaaatacattcattctttccagtatcgatggcagtcactagactccgttcttacaaaaaaaaggcatgtcgagagatcttgtagttcatacacttgttaaaacacttttttgtacaatgtatgggaaagaagctcagtcgatctttcttgttttgaatgctctacgacacgtc

SEQ ID NO: 131096 - DNA, 2041 bp, Zea Mays
cgacactccccgagcacacacgccgcaacagcaccacccccagacccaagtcctgtcaaggcctcaacacacacacacactctctcgcttgacctacccccctccgccccccgccgggcctgcagggtgttcgacgcttcgcccgcccgcccgcccgagcgccgccacggcatggcttcctccatctccgccgccgctaaggcctccgcggccttcgcccacaagaaggagctggccgcgccggcgccgcaccgcgcgggctcgagccgccggaccaagccgtgccgcgtgcgcgccgtcgcgtcgcccgcgcgcaccccccgcgccccgtcgtccaccggctcggtgaagaccgcgatgacgatgacggagaagatcctggcgagggcgtcggagcgcgcggcgctggagcccggggagaacgtgtgggtggacatcgacgtgctcatgacgcacgacgtctgcgggcccggcaccatcggcatcttcaagaaggagttcggggaggatgccaaggtctgggaccgcgagaaggtcgtcatcatccccgaccactacatcttcaccagcgacgagcgcgccaaccgcaacgtcgatatcctcagggacttctgtctggagcagaacatcaagtacttctatgatatcaaggacctcagcgatttcagggctaatccagactacaagggtgtctgccacattgcacttgctcaggaaggccactgccgaccaggcgaggttctcctgggtactgattctcatacgtgcaatgctggagcctttggtcaatttgcaaccggaattggaaacactgatgcaggttttgtgatgggcactggaaaggctcttcttcaggtgccacctactatcaggtttgtattagatggagaaatgccgccttatttacttgcgaaggatctgattttgcaaattattggtgagatttcagtatctggtgcaacctacaaatcgatggagtttgttggatcaactgtagaaagtctaaccatggaagaacgtatgacactatgcaacatggttgttgaagctggtggaaagaacggtgtcgtgcctgctgatgaaactacatttaaataccttgagggtaggacatcagttgattatcaacctgtctacagtgatgctgaggccagattttttagtgactaccggtttgatgtatcgaaactggagccagtagttgccaagccacattcgcctgacaaccgtgccctagcaagagaatgcaaagatgtcaagatcgaccgagtctatattggttcctgcactggtggcaagactgaggacttccttgctgccgcaaaggtgttcttagcctcgggaaagaaggttaaagttcccacattccttgtccctgccacacaaaaggtgtggatggacgtatatagccttcctgtaccaggatctggcggcaaaacttgcgcccagatattcgaggaggctggttgtgatacaccagcaagtcctaattgcggcgcttgtctgggtggccctcgcgatacgtatgcacggatgaatgaacctacggtctgcgtgtccaccacgaacaggaacttcccgggcaggatggggcacaaggaagggcagatctacctggcgtccccctacaccgctgcagcctcggccctgacggggtacgtcacggaccccagggacttcctcatgtgaacgatcttgaaacagccacagagtgcctgcaccgctgttttttgtgttgaaccttagtttaggcgtgtgcccttcgttgagaaataaactcccatgtcgggaggctgccattgccatttatgttttttgcgttatatttattacagtgactgccgataacgtagttgagcgttacaagggaaatacattcattctttccagtatcgatggcagtcactagactccgttcttacaaaaaaaaggcatgtcgagagatcttgtagttcatacacttgttaaaacacttttttgtacaatgtatgggaaagaagctcagtcgatctttcttgttttgaatgctctacgacacgtc

SEQ ID NO: 131097 - DNA, 849 bp, Zea Mays
atgtcttccacgaggaccgaagccgcgcgcctccactggcgcgcccactccgcccccgcccgccgctcccgccccttgtctcgtcgaaccagtcgagcaagccaacgcagacccagcgatcctcgtcgtgcgtcctcctcccccacgggagggaaggatggcggagcccaaagcggcgacagcgggggggggggggggtggtggaagactcgggtgggcccgtacgaggtcggcaagaccatcggcgagggcagcttcgccaaggtcaagcacacgcgcgactcccacaccggcgccgtccgggccatcaaggtgcttgaccgcaatcacgtcctccaccacaagatggtcgagcagatcaagcgggggatttcaactgtgaaactgatcaaacatcccaatgtggtccagctgcatgaggttatggcgagcagaacgaaaatatacatggttcttgaatttgttgatggaggcgagctattcaataagatcccagagaatttgcttctggattcaaatggagctcttaaagtttcagacttcggcctaagtgcatttgcaccacaaacaaatgaggatgggcttctgcatactacctgtggaactccaaactatgtagcacctgagaggataacaattgcagaaattttggaagacgaatggttcaaaaaagacaataaaccaccacgttttgaacaaggtgaagatgttagccttgacgacattgatgctgcattcaatgattcagagactgcacgatctgtagtcatacgagttagaacaactcacatagtactggatgatgagatgtgtcttattatgactatggatgagacttttgtgatgtaa

SEQ ID NO: 131098 - DNA, 981 bp, Zea Mays
agacaaaaaaaaaaaacctccaatcccggatcgaaattgaagggatcttacggcgagatttctcaggattgaggaacacgaggcgtgaggaaggaaggaaaggacggaggacgggaggaggacgtaccgagtggcccgagcggcgagtgcagcgcgggcgtcggcgcggacacgaccaccgccggggtgggcgcggcggccgtcaccgccatcgatatcggcgtggcgcggctgacgaacccgaccgggcggcccctgccccgcttcatgacggcgccgacggccgccgcgggcgtgtaccggcccgctcccgcgtcgtccggcgccgacgctgagatcggcgtcgcgttcagcggccgcagcagcggggtcccgtccggcccgtacttccgcggcctcccccgcttcctcttcccgtctcccctccccgccgctaccgtcgccaaggaaagcgcagccgccggagccgctggcgcaggctgagagctcgccggcaccggcgttgtctccggcatcggcgccggggccggggccggggccggcgaggcctccgtgatctccatcgtgggctccagactataacgctaccgccacgtccctgttcgggccgtgaccatcagaggctgcagctctgcctgttcacagacacgggcgcgatcacgagacgcaggaactcggaattgttcacacccacagcccggaactcagcacgaacaactcatgaaaaggcgagcggccggtacggttctccggcgaccttcgcgctcgcccgccggccgtgttccggcgaggaattcaaggacacagaagcgacgaggggaggaaggagacgaggagaaatgaaaatactacatcgacgaaattaaagccatcgattggttttaatttaagcaagggcagaaagtgttttttttatataaaaatatctcgcaaatggacagacagacacataacgcttaaaaaattgcgagtttgttcgat

SEQ ID NO: 131099 - DNA, 249 bp, Zea Mays
atgagttcttgccagcgctcctccacaagatccagtatcgcttcagcctgctctccggtagccaacgacgacagaatcgcgatgaagttgcctaggcagaaccagcggaaatccatcctcgcgggactaacgttgccaatgaagtacccaccacggctaggcatgaagtcaaatatccagtcaggtatcgattcgggcatcacgttgaacttgttcagagctgtctgtgagtactcttcggtcttgtag

SEQ ID NO: 131100 - DNA, 962 bp, Zea Mays
atctactaaaaaaactctccaactgcggcaattgccaaccgccagcaccagcgccgccgccctggctcccccgccggcgcctcggagaattggattggctgggcgcgtgacccgccgccgccgtccgcgagcagcagcgacccccctcgccggccatggcctctgctcattccaagctttactcagatgacatcagcctcgtcgtggtcgtcctcgatacgaaccctttcttctgggccgccgctacgctccccttcgctgacttcttcgcgcacgtatgcaaccctaacctgtcacgacccttggccagcggtggagatcaccgcgacgtgagacaccagaacaagcagagaagaacagaggtgtttctgtcataagaagactatccacatgggatacgtctgttcagtttgtttgtcaatattctgcaggaatcagaagacgtgttcaacatgtggatatgttttatttgcaagtgtgttccttttttgtgggggtaccttttgatgataataaatctgtgttctgttcttgtttctagactcagtccagagcttcttgaattgaatcagatgcttaccaagtttactcttaattttgatttcctaacccaatagttttgctttgacttgcactgccattcacccctctaatctctaccaaccttatgcaaaatcgtaatcatctcaatgtttagttaggttatgctgttgccacaaaagcatgtcttgcccagtagtttgtacacctaatttagttttttttttgtagctgttgtctttatactagtgatctttcctgttgcttgcaaaacgatcgtccaaaaatacttgccaagttattgttttttctctggtacgatgaaatgaaatctcgtcattggatgtaatttattcagtcgtgtcatgcctgacttgaattccatgccagatcaaagcaagtagtagtacgtgaaaagttaa

SEQ ID NO: 131101 - DNA, 356 bp, Zea Mays
gatctacttgtgcggatatcttcactttagtctggcaataccagtatactagagaatttgttatttgtgtattatattatttgataatatcttccattgtttgtgtaaataactttgtgtgggcttatttctcttttagttgcttcttgcttaagctcattgacacgtttcgacgataacgcagtctgtatttgcaactgatctgcactctagagcatttctgtgccttccaaaaactcttggagtggactttcgtgctccgtgtttctgtcataagaagactatccacatgggatacgtctgttcagtttgtttgtcaatattctgcaggaatcagaagacgtgttcaacatgtg

SEQ ID NO: 131102 - DNA, 1801 bp, Zea Mays
gcatggggccaggagcgcgcgacggcggagcccaatgccctccctgaagctgaggcccatcctgttccccttccagatggagccccggcgcgaggagctgctgcatgagctgggggacatgtgggacgagatcggggaggcggaggaggaccggcggggggcgctgtcggcgctggaggaggagtgcctcagtctgtaccgcgccaaggtggagcaggtccggcagcaccgggcgcagctcaagcgggagatctccgactccgtcgccgaggtcgccgccatctgcgccaccatcggcgagcctccctccaccgtgcacacggcctgctcctcgctccagggcacagggagcctgaaggaggagttgggcatgatcgcgccggagctggcggagatgaggcggaggagggacgagaggcggcgcgagttcgcagacgtcacccagcgggtcgccaggatccaggaggagttggacctgcagctaggtggcgggcaaggccagtctgaagctcacgccgccgccgtcatcgtcgacgtcgacggctccgacctgacgacgaccaagctcgacgagctccgagcctatctgcagcacctgcagctggaaaaggaaagtcgcaccaagaaggtggcggagctcgtggctcagctgcactcgtcatccttggttctcggcatggatcccacagaggcgaacagtgtcgtccatgttggcgccgacggcgcgcaggtgcagcccggcgacatcagcgacggcgccatcgcggggctggctgcgggcatcgagaggctgagggagatcaaacggagccggatggagaagctgcaagacctgctgggcagcatgctggagctgtggaacctgatggacacgccggcggaggagcagcggcagttccagggcgtggcctgcaacatcgccgcgtccgaggacgagatcacggagcccggcgccctctccatggccttcataagcaacgtagaggcggaggtggtgaggctggagaacctcaaggagtgccggatgaaagacctcgtcgtgaagaagcacgaggagctcaaggagatccgccgccgcgcgcgcctgcccgaggacgacgacgctaccgtcgtcatggtgttcgacgccatggacagcgatgccgaccgggctgcgatcctggagtggctggaggtgcagatctcggaggccaaggacctggagttcaaccggaaggacgtgctggagaagatggacaggtggcaggcggcgctggaggaggagtcctggctcgaggagtacagcagaaacgagaacagatacaacgttggcaaagggacgcatctcgtgctaaagcgcgccgagaaagcccgcgccctggtcagcaaaatgccggtgatggcggaagctctgatggcgaaggtagtcgcgtgggagaaggagagaggcgccaagttcgagtacgacggtgaggtgctgctggacgtgctggatgactacggaaacgcgaggaaggagaaggagcaggagcggaagcggcagcgggaccagcggcggctgctgcagcaggtgcagggcgccgcggcggcggcggacagggacgtgtcgtcgccggtggcgcacccgccgcccaagaacatcaagaacgtcacgaggacgctgtccatggggggcaacaacacctccggcggcggcagcgccaggaaggccgcgccggcggcggccaggcccggcactcccagcttcctcaagtcgcccttgtcggcgcgccgcggcgggagcgacgaggggcatatgatggcgtcggagtccttcgagtga

SEQ ID NO: 131103 - DNA, 435 bp, Zea Mays
atgaagaaagtggcatcatcgtcagccgttctcttcgtgctagccctgacgctagtttgtgccccgctgatagcagaggcaaagaagaagagagtcgccgccgccgccgccgaggagaagaaggtgcaggacaacttctgctcgacgctgtgcgagggcaggaaggggatggacctggtggtgtgcaaggagtcctgcgacctctcacagcgctccaacctggtgctgtacggccggatccagtgcaagggcaagtgcaccgagcagaagggcatcaccgcgccgcagatgaaggtgtgccaagaggcgtgcgacaaggactacgtggtcaaggcggctgaggtcaccaaggcctgcaacaccacctgcgccaaggagaagcagcctctgctcagcgagaactgcaggaggtcctgcacccctcctccttcctga

SEQ ID NO: 131104 - DNA, 528 bp, Zea Mays
atggctaatgacgctgttgtggaagtcaaaggcggtgaccgtcgcaaactagtccacgacaaggtcgagaagaaagccgacacgacaaacttgcaggtgcgggagcatgaccaaaatagggacatgggtgtggccacgatcatcggcgccgggaaccgaaggcaggggaaaacgacctatcgggatcaccggaacgacaaacggaaccaagccgacgaggtggagcacatacgcgctcagctcagtttgacagggaggcaggcagctgagcaagcgcttgaacatggtcgacggcgaggtccgccgggagggaacgtgcagaacaaatgtagaagagacctggcgcatccatggtggaagcagacttgggcgccatatggaggaagagatgggacggcgctggggcgcggctcaatgcgagctgggcgagctccagggtgcgactatggaggagcgaaggggccgggggcgagctcggctgggcgcagggaaattccacggcgagggagcacggccggctgggcgtga

SEQ ID NO: 131105 - DNA, 1398 bp, Zea Mays
ctttcccagcgccgcgctgccgtttctgagatcgattccaagctgcagtgtgcccaactgcttcttcctcttcccatggcgtccatcttcctgtgctcgccccttctcctgcttctccctctctgctcggattttgccaggtccgcgcagctcccatggcgcctggctggatttctcctcggcgcgtctgctccctggaactcgccactgcgcgcgcgccccttcctctgcgcgcgtcgcgcccaagctccctgctcacgccgtcgtcgagcttcctgatacgcgcgcccagctgttcctcctccctgctcggcttaaccatcagcctccctcccctcggtgcccagcgcgtccctctgtccctgcgcgccgtgctctcttccatggatgccgcggctgctgctctggtgttttccctgcgcacgacgctcctccagtgccgcgtccgactcactggctttccccgagctcgcgctcaacctgctcgccggatcctctgcaagctgtcgcgccgtcgccttgctgtgcgcctctgattcgcccttgctcggatctgccgtcgcgtcctgttccctggtggccgagcatagcccttgcgctcgtgcattctctgttcaatttctagaacacctaggtctatccatggtcgctcccttcgtcgttggcgctcgactccttgtttcagtttgccgtgtcgcgccgttattgtttctgtcgcgagctcgatcccgttgtcatcacttcgccgtattcgccggtagccacctcgtcgtgctcgtctccagtcctcgcgcggctttctgcttgccagcgcgccctctcagctcgctcggccttaattcctaccgcgtcatcgacctcaccgcgacttagttcgtccgttgtgctggtcgctgtcccatgctgtgcctattagctcggatcctgccctagctcgtcgttgcgtcgttcacagtcgagtcgtcaaacccgtcatcccctgctcaacccccacctcaccagctcgctcccgactttaactgaaggtcgtcgttgttccgcaagtcatcaagaaatctcaagaatcaggtgaagacgaagctagcagcgtggtattcaccaagtgcgcgacaaaaagctcgaacatcctgcgcgactcaagttcgattcgtcaaaattatttagtcgaggaaaatgtcttcagcaattgattaccgaagaaaagaaggcccctggatgacgttaaccggaacccgtagtcgtgcttccgactatctcgtcaaattagtcagggtaagcaaatttgttattcgtgcgagtggattaatgaatgatctgactaggtctaatatttattagattacctgagtcgctttggtaaattggtcgatgacgtaggataaaagaggtctcaatagg

SEQ ID NO: 131106 - DNA, 1533 bp, Zea Mays
acgtagtaagctgggattcttcgtatagaccggattaaaaccctaggccctagccaccgcccaccgtcgcctcagcaaatcctcctcccgtttcaccatgccgccctgctgctcccccaccacctccgccgtcaccgctgcggcggcatctcccggcgcctcgcgcagcgggggcctcctgcgccgctcgcgcccagcccccgccgccgtgaattgtaaaaagattgattctctgaggtcaatcaatggagcaccaccttgcattccggtgtccaacaggtcgttattgactcctgtaaccttgccagttttccgggatccaaacatgaggaacgacacgaggctgcgcatcttctcaggcacagccaatccttccctttcccaggagatagcaagttacttggggctagaacttgggaagataaccataaagaggtttgctgatggtgaaatatatgttcagttgcaagaaagtgtacggggctgtgatgttttccttgtgcaaccgtcgtgtcctccagcaaatgaaaatcttatggagcttctgatcatgattgatgcctgtaggagagcatctgctaagaatatcactgcagttatcccttattttggttatgcaagggctgacaggaagtcccagggcagggaatctatagctgcaaaacttgtagctaatatgattaccgaagctggtgccaaccgtgtccttgtttgtgatcttcattctagtcaagcaatgggatactttgacatcccagtagatcacgtttatggccagcctgttattcttgattatctcgccagcaagacaatatgttcagatgacttggtagttgtatctcctgatgttggaggtgttgccagggcacgtgcctttgccaaaaagctgtcagatgcacctctagctattgtagataaaagaaggcaaggacataatgtcgctgaggtgatgaatcttattggagacgtgagaggaaaagtggctgttatgatggatgatatgatcgacacagcaggtaccatttccaaaggagctgagctactgcaccaggaaggcgcccgagaagtatatgcttgctgcacacatggtgtttttagcccacccgccatcgaaaggctatcaagtggattgttccaagaagtaatcatcacaaacaccatccctctgaaggaggagaagagttttccgcagctgactattctttcggttgctaacctcttgggggaaacaatctggcgcgttcacgatgattgctcggttggtcatgagccatactccagcttggatattgactgatgcttaaggaatagttgtggcagctcgcaaccttctctttcttttcttttggcctcggtttttgtctgtgcgtgtaataagcaatgtttttgtggaattctgttagcgcagaacctcagccttgtatttgagtgacagcacataagatgacattccagattgtagtgcagtgtttcagctatcctcaatcacagcacataatatgtgtttgcttgcagtattattaggctttatat

SEQ ID NO: 131107 - DNA, 1436 bp, Zea Mays
acgtagtaagctgggattcttcgtatagaccggattaaaaccctaggccctagccaccgcccaccgtcgcctcagcaaatcctcctcccgtttcaccatgccgccctgctgctcccccaccacctccgccgtcaccgctgcggcggcatctcccggcgcctcgcgcagcgggggcctcctgcgccgctcgcgcccagcccccgccgccgtgttttccgggatccaaacatgaggaacgacacgaggctgcgcatcttctcaggcacagccaatccttccctttcccaggagatagcaagttacttggggctagaacttgggaagataaccataaagaggtttgctgatggtgaaatatatgttcagttgcaagaaagtgtacggggctgtgatgttttccttgtgcaaccgtcgtgtcctccagcaaatgaaaatcttatggagcttctgatcatgattgatgcctgtaggagagcatctgctaagaatatcactgcagttatcccttattttggttatgcaagggctgacaggaagtcccagggcagggaatctatagctgcaaaacttgtagctaatatgattaccgaagctggtgccaaccgtgtccttgtttgtgatcttcattctagtcaagcaatgggatactttgacatcccagtagatcacgtttatggccagcctgttattcttgattatctcgccagcaagacaatatgttcagatgacttggtagttgtatctcctgatgttggaggtgttgccagggcacgtgcctttgccaaaaagctgtcagatgcacctctagctattgtagataaaagaaggcaaggacataatgtcgctgaggtgatgaatcttattggagacgtgagaggaaaagtggctgttatgatggatgatatgatcgacacagcaggtaccatttccaaaggagctgagctactgcaccaggaaggcgcccgagaagtatatgcttgctgcacacatggtgtttttagcccacccgccatcgaaaggctatcaagtggattgttccaagaagtaatcatcacaaacaccatccctctgaaggaggagaagagttttccgcagctgactattctttcggttgctaacctcttgggggaaacaatctggcgcgttcacgatgattgctcggttggtcatgagccatactccagcttggatattgactgatgcttaaggaatagttgtggcagctcgcaaccttctctttcttttcttttggcctcggtttttgtctgtgcgtgtaataagcaatgtttttgtggaattctgttagcgcagaacctcagccttgtatttgagtgacagcacataagatgacattccagattgtagtgcagtgtttcagctatcctcaatcacagcacataatatgtgtttgcttgcagtattattaggctttatat

SEQ ID NO: 131108 - DNA, 1359 bp, Zea Mays
acgtagtaagctgggattcttcgtatagaccggattaaaaccctaggccctagccaccgcccaccgtcgcctcagcaaatcctcctcccgtttcaccatgccgccctgctgctcccccaccacctccgccgtcaccgctgcggcggcatctcccggcgcctcgcgcagcgggggcctcctgcgccgctcgcgcccagcccccgccgccgtggagatagcaagttacttggggctagaacttgggaagataaccataaagaggtttgctgatggtgaaatatatgttcagttgcaagaaagtgtacggggctgtgatgttttccttgtgcaaccgtcgtgtcctccagcaaatgaaaatcttatggagcttctgatcatgattgatgcctgtaggagagcatctgctaagaatatcactgcagttatcccttattttggttatgcaagggctgacaggaagtcccagggcagggaatctatagctgcaaaacttgtagctaatatgattaccgaagctggtgccaaccgtgtccttgtttgtgatcttcattctagtcaagcaatgggatactttgacatcccagtagatcacgtttatggccagcctgttattcttgattatctcgccagcaagacaatatgttcagatgacttggtagttgtatctcctgatgttggaggtgttgccagggcacgtgcctttgccaaaaagctgtcagatgcacctctagctattgtagataaaagaaggcaaggacataatgtcgctgaggtgatgaatcttattggagacgtgagaggaaaagtggctgttatgatggatgatatgatcgacacagcaggtaccatttccaaaggagctgagctactgcaccaggaaggcgcccgagaagtatatgcttgctgcacacatggtgtttttagcccacccgccatcgaaaggctatcaagtggattgttccaagaagtaatcatcacaaacaccatccctctgaaggaggagaagagttttccgcagctgactattctttcggttgctaacctcttgggggaaacaatctggcgcgttcacgatgattgctcggttggtcatgagccatactccagcttggatattgactgatgcttaaggaatagttgtggcagctcgcaaccttctctttcttttcttttggcctcggtttttgtctgtgcgtgtaataagcaatgtttttgtggaattctgttagcgcagaacctcagccttgtatttgagtgacagcacataagatgacattccagattgtagtgcagtgtttcagctatcctcaatcacagcacataatatgtgtttgcttgcagtattattaggctttatat

SEQ ID NO: 131109 - DNA, 1469 bp, Zea Mays
acgtagtaagctgggattcttcgtatagaccggattaaaaccctaggccctagccaccgcccaccgtcgcctcagcaaatcctcctcccgtttcaccatgccgccctgctgctcccccaccacctccgccgtcaccgctgcggcggcatctcccggcgcctcgcgcagcgggggcctcctgcgccgctcgcgcccagcccccgccgccgtggagatagcaagttacttggggctagaacttgggaagataaccataaagaggtttgctgatggtgaaatatatgttcagttgcaagaaagtgtacggggctgtgatgttttccttgtgcaaccgtcgtgtcctccagcaaatgaaaatcttatggagcttctgatcatgattgatgcctgtaggagagcatctgctaagaatatcactgcagttatcccttattttggttatgcaagggctgacaggaagtcccagggcagggaatctatagctgcaaaacttgtagctaatatgattaccgaagctggtgccaaccgtgtccttgtttgtgatcttcattctagtcaagcaatgggatactttgacatcccagtagatcacgtttatggccagcctgttattcttgattatctcgccagcaagacaatatgttcagatgacttggtagttgtatctcctgatgttggaggtgttgccagggcacgtgcctttgccaaaaagctgtcagatgcacctctagctattgtagataaaagaaggcaaggacataatgtcgctgaggtgatgaatcttattggagacgtgagaggaaaagtggctgttatgatggatgatatgatcgacacagcaggtaccatttccaaaggagctgagctactgcaccaggaaggcgcccgagaagtatatgcttgctgcacacatggtgtttttagcccacccgccatcgaaaggctatcaagtggattgttccaagaagtaatcatcacaaacaccatccctctgaaggaggagaagagttttccgcagctgactattctttcggttgctaacctcttgggggaaacaatctggcgcgttcacgatgattgctcggttggtcatgagccatactccagcttggatattgactgatgcttaaggtgagaacggctttttaaagttggtgtctggtctccacacgacagaacagctatttctctacaagttgattccatcgtgtgcaacgtttcaccagctgtacattttccgtctgtgacatgttcaccattgctgaagctgtttttcttgtgcaggaatagttgtggcagctcgcaaccttctctttcttttcttttggcctcggtttttgtctgtgcgtgtaataagcaatgtttttgtggaattctgttagcgcagaacctcagccttgtatttgagtgacagcacataagatgacattccagattgtagtgcagtgtttcagctatcctcaatcaca

SEQ ID NO: 131110 - DNA, 788 bp, Zea Mays
acgtagtaagctgggattcttcgtatagaccggattaaaaccctaggccctagccaccgcccaccgtcgcctcagcaaatcctcctcccgtttcaccatgccgccctgctgctcccccaccacctccgccgtcaccgctgcggcggcatctcccggcgcctcgcgcagcgggggcctcctgcgccgctcgcgcccagcccccgccgccgtgaattgtaaaaagattgattctctgaggtcaatcaatggagcaccaccttgcattccggtgtccaacaggtcgttattgactcctgtaaccttgccagttttccgggatccaaacatgaggaacgacacgaggctgcgcatcttctcaggcacagccaatccttccctttcccaggagatagcaagttacttggggctagaacttgggaagataaccataaagaggtttgctgatggtgaaatatatgttcagttgcaagaaagtgtacggggctgtgatgttttccttgtgcaaccgtcgtgtcctccagcaaatgaaaatcttatggagcttctgatcatgattgatgcctgtaggagagcatctgctaagaatatcactgcagttatcccttattttggttatgcaagggctgacaggaaggtaatgttgctttattgtagcttttcaaattgttttaatggtttcaaggttgttttttatggaaaaaatactgcttgtcacatgcttgtaccactccgtatttacgagtctttagccatggaaggtgcataggcaaaatttcaacagttttgtt

SEQ ID NO: 131111 - DNA, 294 bp, Zea Mays
atgtgcgcgcctgcctctgcccaacctgcactttcatatgggctcaacagactcggtcacacccaccgcagttgcccttggtgttccaagctatggcggatctcgccatcgacagcaatgacatgcttcctcaatgctagagcagttcgtttcgtgttatatttcacttggaaccttccgactgggcttttggcgttgttgactgagctttctgggataatttcatccaagaactcatcagccacgtcgccgtcttcatccatactaagctgccttgtataccacctaaaaccc

SEQ ID NO: 131112 - DNA, 1931 bp, Zea Mays
aacacgtcttccacaagagtgagtgtgagaccagtcgtcaccgtcctccactcccaaatttgttgccttgaggcggcggccggcgggagagagcagctctagagagaacagagagcgcataactagcggcggcggcgatgaggatagaggaggtgcaatcgacctcgaagaagcagcgcatcgccacccacactcacatcaagggcctcggcctcgaccaggccaatggaatgtcgatgccgttggcggcggggttcgtgggccaggcggcggcgcgcgaggcggccgggctggcggtcgacatgatccgccagaagaagatggccggtcgcgcgctgctccttgcgggcccgcccgccacgggcaaaacggcgctagcgctcggcatagcgcaggagctcggcagcaaggtcccattctgtcctatggtaggatcagaagtgtactcctcagaggtcaagaaaactgaggtgctgatggaaaatttccgtagagctataggtttgcgtataaaggaaaacaaagaggtttatgaaggagaggttattgaactttccccagaagaggctgagagcacaactggtggatatgcgaaaagcattagccacgtaatcattggcttaaagactgtcaaagggactaagcaattgaaattagacccttcaatttatgatgctttgatcaaggaaaaggtggcagtgggtgatgttatatacattgaagcaaatagtggagcagtgaaaagagttggtagatgtgattcttttgctacagaatatgatcttgaagctgaagagtatgttcctatccccaaaggtgaagtccataagaaaaaggaaatagtgcaggatgtcacactccatgaccttgatgcagcaaatgcccagccacaaggtggccaagatattttgtcccttatgggccagatgatgaagccacggaagactgaaatcaccgaaaagctacgccaagaaatcaataaggtggtaaacagatatatcgacgaaggaatcgcagagcttgtacctggtgttttgttcattgatgaggtccacatgttggatattgaatgcttttcttatcttaaccgtgcattggagagcccattatcaccaattgtgatactcgctacgaatagaggaatatgtaatgtgagaggaaccgatatgacgagtccacatggtataccagtggaccttctagataggttggtgattattcggacagaaacatatggccctactgagatgatacagatactggctatccgagcacaagtggaagagattgatatcgatgaagaaagtcttgcttatttaggcgagatcggacagcagacatctttgagacatgctattcagttgctatcacctgccagcgtggtcgcaaagaccaacgggagagaaaagatgtgcaaggctgacctcgaggaagtcagcgggctctatttggatgccaaatcctcggctcgcctgctccaggagcaacaagaaagatacatcacctagacttgcatctcctgctgtggaaggaaaagcctcgaagagaaatgcattctgcaaagtgcgtcgatctgcttcagtatgtcgtagtctacaagtcttggagagagcacgtttctgcggggaaggaaaactgtttgaattttgtagtacctgttttttgttagcctccagcgaagacttgattccggcatattgcttgttcacgcaccgttaacaccgattaagattggcccagccgtgcaggaattgccgggtgtgttttcaccccctcgctaatcgatgtccagaatctgtgtgcccacgggtgttgtattgaccctagctttgtaaccatgcacatgatttcttttttaacgctgatggatggcacctggatctctgtccatggccatcgtaatcccactgtctggagcagggtttcatgaa

SEQ ID NO: 131113 - DNA, 1928 bp, Zea Mays
aacacgtcttccacaagagtgagtgtgagaccagtcgtcaccgtcctccactcccaaatttgttgccttgaggcggcggccggcgggagagagcagctctagagagaacagagagcgcataactagcggcggcggcgatgaggatagaggaggtgcaatcgacctcgaagaagcagcgcatcgccacccacactcacatcaagggcctcggcctcgacgccaatggaatgtcgatgccgttggcggcggggttcgtgggccaggcggcggcgcgcgaggcggccgggctggcggtcgacatgatccgccagaagaagatggccggtcgcgcgctgctccttgcgggcccgcccgccacgggcaaaacggcgctagcgctcggcatagcgcaggagctcggcagcaaggtcccattctgtcctatggtaggatcagaagtgtactcctcagaggtcaagaaaactgaggtgctgatggaaaatttccgtagagctataggtttgcgtataaaggaaaacaaagaggtttatgaaggagaggttattgaactttccccagaagaggctgagagcacaactggtggatatgcgaaaagcattagccacgtaatcattggcttaaagactgtcaaagggactaagcaattgaaattagacccttcaatttatgatgctttgatcaaggaaaaggtggcagtgggtgatgttatatacattgaagcaaatagtggagcagtgaaaagagttggtagatgtgattcttttgctacagaatatgatcttgaagctgaagagtatgttcctatccccaaaggtgaagtccataagaaaaaggaaatagtgcaggatgtcacactccatgaccttgatgcagcaaatgcccagccacaaggtggccaagatattttgtcccttatgggccagatgatgaagccacggaagactgaaatcaccgaaaagctacgccaagaaatcaataaggtggtaaacagatatatcgacgaaggaatcgcagagcttgtacctggtgttttgttcattgatgaggtccacatgttggatattgaatgcttttcttatcttaaccgtgcattggagagcccattatcaccaattgtgatactcgctacgaatagaggaatatgtaatgtgagaggaaccgatatgacgagtccacatggtataccagtggaccttctagataggttggtgattattcggacagaaacatatggccctactgagatgatacagatactggctatccgagcacaagtggaagagattgatatcgatgaagaaagtcttgcttatttaggcgagatcggacagcagacatctttgagacatgctattcagttgctatcacctgccagcgtggtcgcaaagaccaacgggagagaaaagatgtgcaaggctgacctcgaggaagtcagcgggctctatttggatgccaaatcctcggctcgcctgctccaggagcaacaagaaagatacatcacctagacttgcatctcctgctgtggaaggaaaagcctcgaagagaaatgcattctgcaaagtgcgtcgatctgcttcagtatgtcgtagtctacaagtcttggagagagcacgtttctgcggggaaggaaaactgtttgaattttgtagtacctgttttttgttagcctccagcgaagacttgattccggcatattgcttgttcacgcaccgttaacaccgattaagattggcccagccgtgcaggaattgccgggtgtgttttcaccccctcgctaatcgatgtccagaatctgtgtgcccacgggtgttgtattgaccctagctttgtaaccatgcacatgatttcttttttaacgctgatggatggcacctggatctctgtccatggccatcgtaatcccactgtctggagcagggtttcatgaa

SEQ ID NO: 131114 - DNA, 549 bp, Zea Mays
ttttcctttttattttttccccatctttctcaggcaatattttttccccctccatgccaaaaaggaatctgaaaaatcacctattgtactccgttgcgacctcaccgacgcacgaggaatttccaggagaaaacaactgccatgtgtcataaaaccgtacgacaaaagcttgtaatcaccagaaccgcagacgatctcttttttattgtaaaaaaaagtagacaaaacaaccacgtgcaccaccagcacacaagatcaacatcgccggcattgcatccgttcaacaatttacaaacaatctcaggagagaaaaaaaagtacgcgagtccctgccggatgaacaactggctcatatgataccaacacggcaacaccgaccgaaggaactccaccaccaccagcgggcagccacacccaccaaaggaatgcgctcgcgctggagcatattcttgtgggcttgctgtcagttggctgaggcactgagctcactgcataaaaacacaacgggcattttcagaacgggttcagccggtggatgagaactggaag

SEQ ID NO: 131115 - DNA, 1578 bp, Zea Mays
atacactactgcacgtctacactagtactgactactgaggtggcccgaacaacctttatccgattatccccccgcattatctctctcggtagttcccccgtccccctcgcgtgcgctctgtggcgacgactgctcggccgccgccgccctacgcgcaggcgcccaggtttccaccttcgccggcgacgagcgcccacaaggaaaacaatggagtggtgggctgctgatggtttgtactacttccggacctgaaaggagctttttacaatggcaccgggaagcagcattgtgactgtagtccccgagtcggactgtggagatgacgatgggctttctgaatcacttgggggtatcatgcttgacgtagactctgcaagtaaaccgtggtctacatcggcatcgctagccaatgttgcattgtcgtcgctgtgtggcttgaatgatttgctcgaatgcccagtgtgtaccaactcgatgcgcccacctatactccagtgcccaaatggccacacgatctgctctagttgcaagcacagggtagagaaccattgcccaacctgtcgccaggaactgggaaacatcaggtgcctagctctcgagaaggtggcagagcaactccagcttccgtgcaagtaccagagcacgggatgcaccgagatccacccatacaagagcaaactgaagcacgaggagctctgcaggttcaggccgtacagctgcccgtacgcaggttccgagtgcctgatcgcaggcgacgtcccgttcctggtgtcccatctcatcaacgaccataaggtggacttgcacgagggctgcacgttcaaccaccggtacgtgaagcccaacccgtacgaggtggagaatgccacgtggatgctcactgttttcaagtgtttcgggcagcacttctgcctgcacttcgaggcgttcgtgctggggatggcgccggtgtacatggcgttcctgcggttcatgggcgaggagagcgaggcgcaggggttcgggtacagcctggaggtgggcgggggcgggcggaagctgacgtggcagggcacgccgcggagcgtcagggacagccaccggaaggtgcgggacagcttcgacgggctcatcatccacaggaacatggcgctcttcttctcgggcggcggcaggcaggagctcaagctgcgggtcaccggccgcatctggagggagcaagggcaatgaaaagcacccccgcacacattccgttgactggtggttatggtggtacaccgctgtgttccattccatcccatcatccgggggcagccttctgctcagctcctcgccatgattcaagaccccattccgtgttcgtcctgtgcatttgctgtatgtacagatattttgcatacctagcctggaactagaccgtctgcagacatgattaacacgtggggaaagccccggcaaaacctgccagtctggtatgtgctcatgttaatgccttttgcaatgtccccctgcgaggctgtcagaacaggcgttatcgttaaagcatctccacacctataaaaataccatataatttaaaaataaatatattttataaaa

SEQ ID NO: 131116 - DNA, 513 bp, Zea Mays
gtaactggcccgctagaggatggatgaagatggagcattgaagcttattccttcttcaaatgtgaagcagtacatgcttgctggtgacgtcgcagttagaagagctcagatatctgttaatgcggtgattaaggtggcctgcagattgtacatatggccatgcaaactgtagattgcactgtttgcagagggaagtttaaagtgagagataagcaagctgctggagatagactaaaagttaaaagaagttgtgctgagcgtatggaggggaaccaggaaaccagcttaggatctttgttctcacgttggtgtggtgctagagaagaaataaaatgaccctaaggctagtttgggaactttatttttcgaataaatttctattttccaagagaaaatggcctaatttcccaaaaaaatggggtttccaaactagccctaaataaacaatacaagtacagatggaattttgtgaagtcagtggttaatggaattgattttccagattaagaaaca

SEQ ID NO: 131117 - DNA, 1977 bp, Zea Mays
atgataggaaccttccagaaccttccgcgtccgcgccgctggccccgccgcgcctcacttctcctccaccgcatctgcacccgcgcgccgcgtcatgccggcgacgtcggccgatggaactctgacatcatggcgcacttccgcgccggcagggtcggggcggcgcgccgggtgttcgacgaaatgcgcgagcggaacgtgttcacgtggaactgcatggtctcgggcctggccaggaacgggttgctcgccgacgcgcgcggggtgttcgacgcgatgccgtccaggaactccgtctcgtgggctgcgctgctgacgggctacgcgcggcgcgggagggtggccgaggccagggacctgttcgaccggatgcctcaccggaacgtggtctcgtggaacgcgatggtgtcgggctacctgcggaacgggatggtcgacagggcgcgggagctgttcgacgcgatgccggcgagggacgacgtgtcgtggctcatgatggtctctgggtatatgaggaggaagcgtttccgtgaagcgagggagatcttcgaccgcgcgccgtcgccgccgccgacttcagtatgcaacgcgttgctgtccggttacgcggggtatggttacctgaaggatgcggaggagctgtttggtcggatgcagagaccggaccgtgtttcttggaatgccatgatcacaggctacacccgggctgggatgatgcaggttgcacggagactgtttgatgagatgcccggaaaggatactgtatcatggacagccattgtgcgtgggtatttacagaacggagatgttgatgctgcgtgggaggtgttccaggacatgcctgaccgtgatgtccttgcttggaacacaatgatgggtggttttgtggtgagtgataggttggatgatgcgttaaggttgtttgctgacatgcctgatagagatctggtgtcatggaatacaatcttacaaggatacatccaacaaggggacatggatagtgcaactacatggtttaggagcatgctagagaaagacgagacatcatggaacacagtgatctctgggtacaaagatgaaggagcacttagtttgctgtccgaaatgactcgaggaggatatagaccggaccaggccacttggagcgtggttatttctgtctgcgcctcccttgctgctctcggctgtggaagaatggtgcacatttgcacgatcaaaaccggcttcgagcatgatgctttggtgatgagctcattgatctctatgtactccaagtgtgggctaattactgaagcttcccaggtttttgacctgattgtgcaaagggatacagtgacatggaacgcgatgattgcgacatatgcttatcatggtctagctgctgaagctctggcactctttgacaggatgacaaaagataggtttagcccagatcatgcaacgtttctgagtgtgttgtctgcttgtgcgcacaaagggtatctatatgaaggctgccactattttagaagtatgcagcaagattggaacttggttccaagatctgatcactattcgtgcatggtcgatctcttaggaagatcaggttttgtacatcaggcttataattttacaagaaaaatcccttccaaccttcaaataaatgcatgggagacactgtttagttcatgcaatgctcacggggatatccagcttggggaactcgtagcaaaaaatgttcttcagtcgagaccttctgatggaggaatgtatacactcttgtcaaacatatacgccgctaaagggatgtggagcagtgctgctactgtcagaggtctcatgaaagaacaggggttgaagaaggagactgggtgtagttggattgagcttaagggggacgttgtttccttctcatcaaatgataatgcacatcctttgattgagcagatatgccaagaagttgataatctttctattctgatagaagaggcaagttaa

SEQ ID NO: 131118 - DNA, 1093 bp, Zea Mays
aagcggacaggttcgcgcggagggaaggagggagaagaagcgaagccgcgccgcctcgggctcgcttggtgcagatcgggacccgccgcccggccgacgggacggatcccgccttgcaccaagtgaatcggagccggcggagcgatacagcggccggccgaccgccgcctgcttgcctgcgcgcgctgctctcgactgcggatgccgccctcgcggttatattccgctaaagccacgactgccgccgaggagaacatgttctgaaaagctgtcgaggaatataaattgcgtacctggggtcctggtcctggattgatggcttgatgaatggatgagcagaagcagagcgaggtgggagattccagctctgggttttgctgacagaggtccagctagcttgatgagaacctcacaggctgctatggcttcacactgctgaattttactcggattcgagtctgtgctcctccttttgtttttcacagtatgcatgagctgttgttatcaaacaagcatgggatctggcgtggcgggcggatggatgccggtcagctgatcgagctggtgtcagtcctttggccagcctgcatccagtgcgtcaaaagcctggccgctggccggccggcggctgctgctgctcgtgcctcgtgctcatcaggcaggcagccatggtcccctgcctctcaggcaaaggctggtcgcggataggcaaatatcccccagattcttgtacctgatgcacgtggagctgggtggcatggcatcgcagagccgactccacctccatggggttgctgcttgcttgcttgcttcttcccacagcgttcttgaatactgggaagcacgataggacgctggtgctctggactcgcagaggcgcatttgctatccacggccacagagccagccccagggggggcacacagactgggcatgaagaagaggataacaacagataactgaccagcattcatctcacatttgttaccccgtgactctttatcctaaaatgtaagacctttattaaagtccattgtaaaaaggacagcagtttaaataaatgccccatgcttgacaggtcgatgcaccgaaa

SEQ ID NO: 131119 - DNA, 1928 bp, Zea Mays
tctgcctgcgcaccgggccccacctggacccagtctctcccttcgccgcgaatccccgcctgcccaactataaaagcccgccctctcctcccaccacccacgcaagcggacaggttcgcgcggagggaaggagggagaagaagcgaagccgcgccgcctcgggctcgcttggtgcagatcgggacccgccgcccggccgacgggacggatcccgccttgcaccaagtgaatcggagccggcggagcgatacagcggccggccgaccgccgcctgcttgcctgcgcgcgctgctctcgactgcggatgccgccctcggtttgtttgtttgtttttttctttctgataaggatcgtgctgattgctgtgactccgtgtcgccgcccgtgggaattgttattaggcgccgtggggatctctgctctaggttagagtaagcagtccggatctggatctggcgcgggtccaaatttctaacctctggtgagacatctccgtttttgtggtgcggggtgcaaaatttgccggtcatgatgccactcggatggatcacggggaaaccatgcctaggtggattattggttcggcttcttttaccgctagcctaccacgggctcacattggttgtaggttttgtcttagatttggctcgcccaactgtaggacgaccgttgattggtctacttgtgtaggtagattgcttggtagaggggactcctttttttctctcaagaaactacgccggacttcccctgttacatgcggcctcctgtgtatgtgaggtgatgcgagtggagtccttgatgaacactagaggctagaaatccagtgattaggtgtccaggaatatatgctcggggatcaagtcaagaggaggtggggaagagacaaagtagccgattggccgcactagttggccctccatccatggctggcgtttgaacctgctccaggaaaagcggattccctcccctccatgctccactccactccactccatatagctgctgagctggggctgatgtgatttttttttacttttctttgtagcggttatattccgctaaagccacgactgccgccgaggagaacatgttctgaaaagctgtcgaggaatataaattgcgtacctggggtcctggtcctggattgatggcttgatgaatggatgagcagaagcagagcgaggtgggagattccagctctgggttttgctgacagaggtccagctagcttgatgagaacctcacaggctgctatggcttcacactgctgaattttactcggattcgagtctgtgctcctccttttgtttttcacagtatgcatgagctgttgttatcaaacaagcatgggatctggcgtggcgggcggatggatgccggtcagctgatcgagctggtgtcagtcctttggccagcctgcatccagtgcgtcaaaagcctggccgctggccggccggcggctgctgctgctcgtgcctcgtgctcatcaggcaggcagccatggtcccctgcctctcaggcaaaggctggtcgcggataggcaaatatcccccagattcttgtacctgatgcacgtggagctgggtggcatggcatcgcagagccgactccacctccatggggttgctgcttgcttgcttgcttcttcccacagcgttcttgaatactgggaagcacgataggacgctggtgctctggactcgcagaggcgcatttgctatccacggccacagagccagccccagggggggcacacagactgggcatgaagaagaggataacaacagataactgaccagcattcatctcacatttgttaccccgtgactctttatcctaaaatgtaagacctttattaaagtccattgtaaaaaggacagcagtttaaataaatgccccatgcttgacaggtcgatgcaccgaaa

SEQ ID NO: 131120 - DNA, 1525 bp, Zea Mays
gcaaaggactcacaaacgacgcaatacaatcctcttcctctgcctctggtcaggtgtcgcggcggcagcaacggcaatccaattccactccaatggcggcctcgtcctccttcaagccgaacccgctgtcgctgagcgtgccggaccccgcgctcgaccgctggctccgggacagcggctacctggacctcctcgactccaccaccaccaccggaaggccgtcgtcgtcagcctcgggcccctccgccccctcctccgccgcctacagccccggcgccggccaggcttcctccggcgtcgcggccgacgtcctcgccttcgcgcgcaccctcgcctcgctcctcgcgctcaaccccttcgcgcgcctctccaccgccgacctggccgcacccaccccgtcctggtcgctcgccttcgtcggcccccccggcgccgcgtcctactcctggccgcccacgcccacccaggccaggctccgcgtccaggagaacttccgccggtaccggatgccgatggctctgctgggcatgctggccagcctcgctgtctgggagggcgtgcgctactgccgggaccattgggacctcaccaccagagctccgggggttgcccaggctctgctgcactgtgcgcagattgccactgctgtgctactgtacgtctgcaacctacagttcgcgctggtgtacgccgttggggtgagctacgcactgatgctgctgcacgcctccctccggaggctgactactccgtcgagtctaccagacgctagcagcaacaagaacaggagggcgcagccgagacggagctagggtacgttacatgccgggcagtacagggcgctctacagactacaggcgagcgagatgtccatggctgtatagaaccgtgcatggttgatggtcccaaaagcgtcgccggctggtttgtttggaagtttggaacagtgcacatgctgttgaggcggcgaacatggacgggtgaagaatacggccatcaggacatatatactgtcaccgaaaactccgagaggcatacgctttgtttagtttagtttttttttctttttttggtgtgtggagaaagataaggaagccaaaggtagtttgttctgttcctgcgtggctgagtggacgccattcggtggttcactgaggctatgaaccatggcgtagagtagacgaaccccacacatggcagagagcatcgcattcgtttcacactcgactttgttctatgctctaggccgagtaaaagaagactagttttggaaacttaaattcggagttcctagatactgagaggaaaatgagctaatttcttactcatcaatctttcttggaaatctcggaggggatttaagattgtgttttgttgggagtaatggagattgaagtggctccattcctctttttttagatgtttggattccaataaaaaaggagcggatcggtttctaaagtcttcgtatagaaatttaacataaatagttgaaatgtttccgttccaaaaaaatgcaaaaaaa

SEQ ID NO: 131121 - DNA, 1635 bp, Zea Mays
attttggccagcaactgcgcagttgattcggctgggaactgggccactgggcagtggacgcaaaggactcacaaacgacgcaatacaatcctcttcctctgcctctggtcaggtgtcgcggcggcagcaacggcaatccaattccactccaatggcggcctcgtcctccttcaagccgaacccgctgtcgctgagcgtgccggaccccgcgctcgaccgctggctccgggacagcggctacctggacctcctcgactccaccaccaccaccggaaggccgtcgtcgtcagcctcgggcccctccgccccctcctccgccgcctacagccccggcgccggccaggcttcctccggcgtcgcggccgacgtcctcgccttcgcgcgcaccctcgcctcgctcctcgcgctcaaccccttcgcgcgcctctccaccgccgacctggccgcacccaccccgtcctggtcgctcgccttcgtcggcccccccggcgccgcgtcctactcctggccgcccacgcccacccaggccaggctccgcgtccaggagaacttccgccggtacgcgcgcaactacgccgcgctcgccatcctcgtcttcgcgtgctgcctgtaccggatgccgatggctctgctgggcatgctggccagcctcgctgtctgggagggcgtgcgctactgccgggaccattgggacctcaccaccagagctccgggggttgcccaggctctgctgcactgtgcgcagattgccactgctgtgctactgtacgtctgcaacctacagttcgcgctggtgtacgccgttggggtgagctacgcactgatgctgctgcacgcctccctccggaggctgactactccgtcgagtctaccagacgctagcagcaacaagaacaggagggcgcagccgagacggagctagggtacgttacatgccgggcagtacagggcgctctacagactacaggcgagcgagatgtccatggctgtatagaaccgtgcatggttgatggtcccaaaagcgtcgccggctggtttgtttggaagtttggaacagtgcacatgctgttgaggcggcgaacatggacgggtgaagaatacggccatcaggacatatatactgtcaccgaaaactccgagaggcatacgctttgtttagtttagtttttttttctttttttggtgtgtggagaaagataaggaagccaaaggtagtttgttctgttcctgcgtggctgagtggacgccattcggtggttcactgaggctatgaaccatggcgtagagtagacgaaccccacacatggcagagagcatcgcattcgtttcacactcgactttgttctatgctctaggccgagtaaaagaagactagttttggaaacttaaattcggagttcctagatactgagaggaaaatgagctaatttcttactcatcaatctttcttggaaatctcggaggggatttaagattgtgttttgttgggagtaatggagattgaagtggctccattcctctttttttagatgtttggattccaataaaaaaggagcggatcggtttctaaagtcttcgtatagaaatttaacataaatagttgaaatgtttccgttccaaaaaaatgcaaaaaaa

SEQ ID NO: 131122 - DNA, 978 bp, Zea Mays
aacaaggccacatcagcagagagcccagcaactgaaaaaaccaaccatcgcgcgggcacggttgcggttgctacctcccgatcccgtcctcccgcaagccaagctctctctctccccctccccttcagcacgatcggagtccaagtccatcccatccagacccactcgacagtcgacccgatggcgccgtccatctccgtcggcgccgcggcgccgtcccgtgcagcgggcgcgagcacgaagaagagcgcggacgaggtggagctcctgcggcggcggaacgcggagctggagcgggaggtggcggcgctgcggctggagctgggcgcggcgcggcgccgcgccgagacggcggaagaggccgaggagcggctgtgcgtgcagctcggcgacgccgaggtggaggcgctcgagctcgcgcgcgcctaccaggcccacgtccacgagctcgccagggagctcgccgccgcgcgcgcggccccggcacgcccggccagataggttctcgtgggctggtagtaggctactagtagctatagcgtgcggttcagcgggatggctgtggttcccgcgtttggttggcgtcggacggcaccccgcgccgcggtgccatttatttgctcgccgccggcatcgtcgtctttgctttttgctgtgtcgatgatgattctttaacgaacaagagtccatgatgacgcgtcctatgtgaaaacgtgtagagttgactgttgaggctaagggcatgtacaacccagatactgctgcacggtactccaagtacaaaatacaactaaaacacaatataatacagtggtcatgtctaaaacatgtgtcttacgatattcattgtgccaatcagagtattcaataaattaaagtgaccaatcagatagtctcctgtctcgaacatagagctaagacactgtgtcttcgtcaagatacgtgtcttgagtttttttacattcaccccctagacac

SEQ ID NO: 131123 - DNA, 908 bp, Zea Mays
tccactctcatccccactcagggcccaaatacgaaagggacttttaaatccgtggctctaatccgtaaccctaaacccccaccaaaacccctcctcgcctccctcccctccatccaatcctcgaaacgagcgcgcgggcgaggaggtccccctctccgagatggctagggtttttcgcgggtccctcctcctgatgtccccggcggcggcggcggcggcggcggcggcggcaggggccaagaaggcggcctccacgaagccgagggcgccggccgggatcacgaagccgatgccggtctccgaagcgttccgcaggttcgccggcggcgcgcgcgaggtcgcacgctccgaggccatcaagctcgtctggacccacatcaaggcccacggcctccagaacccgtccaacaaaaccgagatcaactgtgacgcgacgctcaagagcttgtttggtgggagggacaagatcgggatgatggaggtctcgaagctactgagccctcacttcctgaagaactagcaagcggtgcatggagccggcggcagcgcttcgcggttgatttgggaaatgtttagtctgctaatggcaaatctcagtccacgttcatcccagtctttgattcgtggtcttagcgtcatgttcgtatgcgtggggttgcgttctttccgatttgtatagtcggtctgcagcatgttatatgatatgcttgaagtttgcactcctcccttgtcatcgctggatgcctggataaacaaaaccagctgttgactgactttgtaagttgtacctctgttgcttacgaaatattacttcccttctcgaatatttgtcgtctgctatttcatttttcgaactaaaccgcgacaaaagaaaaaaaagaacggacggagtatttattattagccaa

SEQ ID NO: 131124 - DNA, 1815 bp, Zea Mays
atgggtgcggcgccggcggcgaggaggtgcgcgctgctcttggcgctggtggtgctggtcgcggccgcgggcgagcgcggtggcagtggtgccggcggtgaggcgggggcggagcaggttctgaggctgtggtcgtcggcggattcggctaggggtggtgaagccgtggacgaagaagaccgcttcttcaggtgggagtgggaggaggaggaggaggacgacgacaacaacgacgaggaggagggggaggaggaggacgaccacgccgtcgtggtgcagcggaagggcgcgtgcaggaacgtggtgaacgtcgacagcttcggcgcggcgggcgacggcgtcgccgacgacacccaggcgttcgcgagcgcgtggaagacggcgtgctcgctggacaacgcggtgttcctggtgcccgccggccgtcgctacaaggtcggcgccatccagttcgtgggtccctgcaaggacaggaggatgatcatccagatccagggcacggtcgtggcgcccgaggagccgtcggagtgggacccgcggagcccccggctgtggctgctcttctcgggcctcgccggcgcgcgcatccagggcggcggcgtcatcgacggctccggctccaagtggtgggccagctcctgcaagatcaacaggtccaacccgtgcaggccggccccgacggccgtgacgatcgactcgtgccggggcgtgcgcgtgcggggcctccgcgtgcagaacgcgcagcagatgcacgtgacggtgtcacgctcacgcggcgtgcgcgtcgccgggctgcgcatcgacgcgcccgaggacagccccaacacggacggcatccacgtggccgagtccacggcggtcaccatccagagctgccgcatcggcaccggcgacgactgcatctccatcgtcaacggcagcttcggcgtcaagatgcgggacatcgactgcgggcccgggcacggcatcagcatcgggagcctcggcaagggcggcgcgttcgcggctgtggcggacgtggcgctggacagggcgcggatcagccgcgcgcagaacggggtgcggatcaagacgtggcagggcggggccgggtacgtccgcggcgtgcgcttcgccgacgtggccgtggacggcgtcgaccaccccatcgtcatcgaccagttctactgcgacgtgacccgccggcagagggacggcggcggaggcggcgcctgcgccaaccagacctccgccgtggccgtgtccgacgtgtcctaccgcaacatcagcggcacgtcgcgccgcgccgaggccatccggttcgcctgcagcgacgccgtgccgtgcaccggcatcgttctcagcaacatcaacctgcgccgcgccgacgatgacggcgaggtgcagacggtgtgcaactgcgccgtcggcctcgactacggccgcgtccagcccgccgccgactgcctccgtagcagcacctgcggcggcacgcctgatggccaccaccaccacgacgacgacgacgaggagcaggggaaggacgacgccgtcctgcacaccgagctctgataaaagcaagcagctgcacgcctgcaagtgaaaccaatggccgccgcgctcgttcgtccgacatttaggagattgattggtctaaaatctcttattatatatttttaaatagtaagaaattataaccctcgaatcttctcccttccatttgttcacaaacagacctttactggggtaacactgaatgctaatgcttagcgagaggctctctccaacagagcgtgtaaaggctcctctaccataaatatgataatcgaacggtca

SEQ ID NO: 131125 - DNA, 1664 bp, Zea Mays
ctctcttccctgtgaactttttcttaaatcaatcgatcaatcacgcgcacaagaaccggcaataaatcgcggaattcccaacgccgcaccttcaccgccgggctccccagtccaatccaacccaaccccagtccggcgacggttccgggcagcgcgcgatcggatcgtcgcgggttcggcttctcgtcgaacggcgcggattcctgcccccgatcggagggcgtcggctgcggcgcctcggcgtctgatctgctgcggtcggcttcttcttgggagaggagtgggatggacggggaagcgatccggatgggtggcggcaacttggcgcccgcctacctctccggcgccgccaccgccaccgccatcaccatgcaggatccgaaccagaaccagaaccagaaccagaaccagaaccaaagccagttcctgttcagcgccaactccacggcgctgcagctgttcggaagcgccgcggtccccacggttggtcctgctggttatataaattacactggaaacacccaccttcctgttatgaaccaagcaagtacttcaaacatcggcgcagggaatgagaacttgctgaagcttcaggtgccattgagcgactatcaccaacagagtgctggccggttagcacgtgttggcaatccgggtgctgtatcgactggtctaaggctgtcttacgaggacgatgagcgcaattcgtccatcacatctggcagcggtagcatggcctcgttgcctgccacgatgtcctgtgtcgatggtttcatggctgaactggacaaggaaagcaaagagattaacttctacttgagactccaggcagaccaaatctgcaagcggatgaaggaggcgaaccagcggtggatggtctcgttcctggcgagcgtcaatcaggcggtggggaagaagctgcgggacaaggaactggaggtggaggcggtgaacaggaagagcaaggagctgaacgagcagatgaggcaggtcgccatggaggtgcagtcgtggcagtcagcggccatgtacaaccagtcggtcgtgaacaccctgaagaacaagctgatgcaattggtggcgcagaacaccaacctcgcgagagaaggcatgggcgacagcgaggatgtagcctccagccaaagccccgacgccggaggagacgccctgggtggtctcaggggcacggctaccgtcgggctgggggcctgcaggtgttgcggcaggaaggaggcgtcggtgctggtgatggcgtgccgccacctctgcctgtgcgccgactgcgacaaggtctccgacgtgtgccccgtctgccggttccccaagagcggcagcgtggagatcaacatgtcctgacaaggacctatgctatgcaaggacgtcgtgtcgaccaaaatcatcatcggcggggcagggcgggggtatacacagtgactagtagatggtgtacatgtcagcatactttttccttgacttgggatttcttcttcagatggtaaaggaggagatcaatatgtcctgacaaggacctatgctatcgatcgaagttggcggggcggaggtatacacagtaactagtactagatggtgtacatgtcagcgtgcttttccttgagttggcatttcttcagatggtaaaggagacgatcaggtttgcgtattgc

SEQ ID NO: 131126 - DNA, 678 bp, Zea Mays
ttttggatggaatggtacgggtaaatataagatgtcaaggaacagtatcttctccatttcatttcatttcaatctcatccaatcagtcaaagctatacacagccattccctgctgccctgaacctctctcctgttcacttccactccaccacggcaaaaaaaatacaaaaaaattctcaaataaagactaccaccatgcttagcttccttccaatgtacaccaaactattttatagtttttataccccctgtaaaaaaactgcacgcatctccttcccttccaccacgcgccactcccctctgttcttcgcttgatcggggagggcacctgcacacgaaacgctcgtcccctcactccccatcaccagtccaccaccaccaccaccaaattataaacagcccggacccgccatatattattctctagctagcttgcgttgctctcaccgttggcggcggagaagacgggcctgcctgcttgtgccctagcccctagctagcgtacgtacgagaccgggaagcacctggccagcaggtggtgcttcaccttgatcagcagccagaacaccacgtagcacggcagctgcagcgccgccaccgcgaggtaccacagaggtgccaggttcgatgtcaggtcgaggaacgggtaaggccacctgccaagaagccacaaaaggc

SEQ ID NO: 131127 - DNA, 273 bp, Zea Mays
atggacccggcgacgacgaccaccgccacgttgatgaggaacgccaccacgaacgccaggctgcactccacgaggaagtacctgcacgcggccttgatgcttttcactgaccgcggggtcttcctggagagcacaagcgccgagtgcaggaacaggttgtacggcgtgatgatggcgccgaagagcgcgatggcgttggctgccgcgcctttccctcggagcctggggacgaacatgccctcgacaacctcccccgcggacggcctcaggtag

SEQ ID NO: 131128 - DNA, 177 bp, Zea Mays
atggactccttgaggggcccgactttgttgctgctgttgcagaacttgaggagcgggatgagcgcgaatggcagctcgaacgacagcaccatctgcacgcaacaaacaatcaagcattcaaggacccgcttgcctgcggtcagaacagggcagacagctagcagctgcttgcaatga

SEQ ID NO: 131129 - DNA, 1331 bp, Zea Mays
tcctggcggaacggacggcggagaacagcgggggagcaggcacaaagcggagctcctgcgccgccccatctctcctctcctcccgtccgtatctctctcttgctcgcactcgcggagatcgaagagaagcgcaggaggccccagcactagcgccgccccgccgccgcatcagacatggcgctggccgctcgcctcgtctcgcgctcccgtcagctatattcggttcaagccactttggggaatggaggtgtcactcaagttcgctcctttgccaaggatgcagctccagctgaccgtcctcctgtcggtggggatgatctcctgaagggcatattctttgaggtaaagaagaagtttgagacagctcttggtgttcttaaaaaggaaaagatcactattgatccagatgacccagcggcagtttctcgttatgcccaagtcatgaagactgtaagggaaaaggcggatcttctctctgattctcaaaggattaaatataccattgagaccttcaccaagggcatccctgatgcacggacttacttgaatactcttcaacagctcagaataaagagtggtcttatagatcatcttggaattgagcctttgatgatggaagctcttgagaagattgagaaggacattaagaaaccacttttgaggagcgacaagaagaacatggccaccctcttggcagagtttgacaagattaacaaaaagcttggctttcggaaggaggatcttcccaagatcgaggaagagcttgaattggaaattgccaaaagtgagctgactgaacttaagaaggaatgcgttgaagcaatggagactcaactcaagagggaggagtttcaagatgaggagatgcctgatgtcaggaaattggacatcagaaacttcctgtaggcctgatcgacgataatctttgaggcccaacgcacctctggttttggtttcaagttgatcggtgctccacacctatgaatgctgctccttccctttttgtaataaaagaaactgcacggttgggtatgagttggattaaatcttgcctttctgttgttctggactcttgtggctgcagcaacaatgggatgtccttgtgttatagcatatgaactcgttacgaggcattcaggaaaatggtgatacctggtatttaacctttattttggtactcagtttggagagcaaagatccatttgttttattatgtcatttatttttgcaccttgtaaaggaatttgtttctgttgtatcaaccctccctaaagacccacatcttcgattaatgaagagtaaaatataccggctgtctctaaatttatgac

SEQ ID NO: 131130 - DNA, 1789 bp, Zea Mays
agatgagaatcaaactctaaaagaaaaggatgaagatgacatgcaagatacagaatttggagaggctaagaaagaagttcaacaagaattacctgtctcccattttctgatgaatctaatattgggaaaagagagcagtgatgcaaatgaagattcagaatctgaggctgcaaggaagcaaggtgaagcgacagaagatgacagctgcacgttcatttctgaacaagaagaaagtctggggtcacttcctacagaaaataaggtggatgacaatcccacctttgttgaacaagaaaaacatgaagttaaatgctctgaagaaacacaggaaatggtcgaagaacaaagtgatgatcagctgcacacagaaagatcaattgaaattgatgaggatatcaaaaagaacactcgtgctttagaaataccagcataccaagacaatccccaggatggaatttctggtgaattgcagacagaagaagcagctggtgtttctacaaaaatggtaactagagatattgatatttcgagtgttgtgctggacaacagaacagttggtactgtgtgtcaggaaaaaatggaggtatcaacaaaaaatgaaaatggaagcttgaggagcagcctgaatgactcaacaaacacaatggctccccaagacgatactctaggagaaggacaatcaaggctcgtgcttgaacctttacctgaagacaaaagtgttgatgtagtttctgagcaagcacctttgttgacagaatcaggaatgactgacgcgaatgacttatctagcgatactacaagtgctcaaaaccctgtgtctacaaaacccactgaatctgccagagttgaggccacatattctactgatattcaactggagaatgaagaagtagataagaaagaagaggaccagcatgcaaacacaaccaaagatgaagtttctaaagagattgtagaaagttcacatataaatctgcagaaaataacaaggcctgaagaaaaatctaatgagctagaaactcaaattaccgaaccagtttgtgacagtcaggcaattttggcccatgaaaaggaaatatctgaagaaaactttccaacagcagtcgaaattcaggctgatggtccaaacatgcagatcaaccaagataagcaagatgaagctgctgacatcgaaactgaaatgaagccagaaaaattaggggaatctaattttcaggaacaccaggacaatggtactgagcaaaagtctcctaaagagactgatgaaggagaccagcaacttgtggccaagaaagagattctgacccaagaaatggatgtgcatgagacagttgaaagacctcagcaagcagttgaaagtcctcagcaaacagtgagcataacatccaatgaagaccaggaactgtttgattcaaaggtccaggaacgtgatctcaatgtagtttcacccagagaagcttctgaggctgaagaaaactttgtggacgtaaccaagccagaattcagcacagatgaagaacaaagtccaaaggctgatgcagaagagaagatttatgacgagaagataaaggacatagagggaactaagaatttaactgatgaagcagcaataaaaactgaagcaccaggagcagcccagaagacacgtaaaaaatatagcctattgtctggcgtgggatcgaaggtaaaacaccaactcgcaaaagtgaagaaagccattgtaggcaaacctgggcacacaaaaccagtatctccgacggcataaaactccagtcaccttagaacatgt

SEQ ID NO: 131131 - DNA, 1996 bp, Zea Mays
tcagcaggttcatgaggacaaactaccagaagtggaagacaataaagcaattgaagctgaagcctccaagcaaagtaatattgccactcctgataatgcagctgaagaaaggaatgaactggaaagtgatccagatccatatgcccagccagcagaacaggtagaattatccaaagacaatgagaacagccagcttgtgaagacagaagaaacctcagaccaaagcaattttgtcgtccttagaaggactacagaagattctgttgcaagagaaattgacccacctgttgccattaaacaagagcaaccagtggaagaaatcaagggtgtcgatgccactgaagctgaagaagactttcgtacaacccaagctgttgcaatagagaaactagcttcagtcaataaaatagcaacagtagaaccgacttatgatattcagcgaatggatgacttggaagcaacagaggaaaagaagcacgctgaagccattaatgaaggagatcaatccaatattgctgtttcagaggaacaaactccaacatataatggagaaacaccagaagatcatcatgtagaatcaaatgaaggaacgatggggaatgaaactgacaatatcattttggcacacggaatcaaagatgaaatacagaagtcagcagaactaaaggacggtccatgtgatttgtctgaaactgttttaacaactcggagaagtgagaacatgattgatgaagataatgttcaaacttatggcaatgatacagtagaggcttcaaacagtatccatcaagtcaaagaagagccagatgctggaaccgaacataattcaagccaaatgataagtgaatgtagtggagagaacgaaactcatgtccaagatagagatgtagacatgtggattctcacagaaggtgtcattgcagaagcatcacaggctttattggaaaatgatcctcaggcagcacaagatactatagaaaaggatgatacaacgaaaagtagtgagccaatcagtgatcacgatagcaggcaacattgtgatgtagaagcacttcaacaacaaagttgtgagacagaggccttatccattttggaacaagatgaggctctgcaaaagattgactcagatcaaaagcagaaagaagttgaggagattgaaagtcagaatgatgaacttcaggtagatgaacagaaacatgaagacaagagggatgatttagccaaagaaccactagtggagtaccagaatttcgaaaacagagcttcaaacaacacaaaagacaatgatgcattcaaggttgaacaaacagaggcagccaatagtgagattctcaagaataaagccctacatatatccaaggaatccaccccaagcattatggctatgaaggttgaaaacattaaggaaacaagtgaaggaactgaagaagatgatgctgccaaaaatgataacaaagatgaacaggagaatgcagaaaatgttgatatagtatcaaaaacttctactaatgaacaaggccaaacaactgatgaaattagaaaagaagaggatcctgttcacatcattcaagcatcagagaaagagatcgcagatgaaatagaagaaagtaaagaaatacatgaagacaatgctatttgtcatgataaattacagacaaattctgaaaaggaagagtcacctcaaccgcattccaatgaaccatacaatgtggatgctaaaattgatgatacaacatctctatgcgaagaaataatccatgacaatacaagtataaatcctagagaaattgaagagataggagaaaacaaaggaccagacttcacttctgaaccttctgtagaatcatccatacagaacaatgttgaagactcaagcagtcatcacaaggtcagtcctaatacccttcaagaagtaacgctcttataagcctcgaaattcatgttaccagtttttctgatcaagtctgttcttggtaaaattctattccattttttt

SEQ ID NO: 131132 - DNA, 1706 bp, Zea Mays
caagaagtgctgaaccaagaatctgctgaagaaactgatggcctggtgaatgtaaagactgatgaaactgagcacaagagcaacatggtggtccctgatgacacaattccagaacatgatgcacaaacgagagagccacctgtaaatattcaagaacaaagccgggaatcagtaggagatgctgaagcagtcaatactgaagcagaaatgcaacaaaacagtgttgcttttgaggagacaactccagaaaaccatgtagcaacctcagagccatgttctgaaatccaacatgcacatcatgtggaaccagaggaaatcaatggccctgaagatggcaaagatgatgagatcaccaacatgagcagcagagaatatctagttcgagataatgttctgcagagtggaccaataatagatatacaaccagttcaggagttggaacaaattaaaacggatgaagcttctaaccagactcatgctgttatcttcaatgacctagctcaggaagatgctacagcaacaagtgaaccacaagtgactgaaacagaactaaaggacattgaagccactgaagctgaagaaatcaccaaacttgaccatgttactcattccaaggaacttgcagtagaaaatgattcaacagcagatgaaccacataagggtgaaatccatcaaactcttgaacaagatttagttgaagttaaggacactggaacttaccatgaaaaaacaatatctacttcagaggacacagtacaagataatttgacagaagatgagccaagttttggtagtcaagaagtagatgatgcagagtcaacagaagaaactaagcaaaacatagctgagaatattgcagaagtctctgatgtggcgattgttgatgacgcaattgaacagaatgtgctacagactgaggatatcgttgaaatgcataaacaggagctggaacgagaagaaacagagagaatagaacctgttgaatcagaggaagcttctgatcagaggaatgatgcaccattcgattattcagctcgagaagataatacaaaggaaagtgagatacagcagacagaatcagcaacggaaacaaatgaaattgaacccactgaaattgaagcagttcctcgagaaagcaatacctgtgtttcagaggagccttctcaagaagatcatataaaagaaagtgaaacaagttttgacaatcaagaagtgaacatcacagaatcttcagaagtaaatgatagtcacaaagatataatatctggaggaatctctgacccaagcaacacagcttctgctggggattcatctgaaggaagcaatgtccctgaaggcgagccacctgaacaggctgtgcaggaactgggatcagaggagataaagaacactcaaattgatgaagtgaatgaaacatcccttgaaatgaatgctactgtctttcagataccaagtcaagaagaaaatccagacacaaccaaattgcatgaatcaacagaggtgagcaacattgaagccacagaaatgcacggaaacccccaccaaagtgatctggctgctcagtcagaggagcaaacaacagaaggaatatcaagtggtctgaaaccagaatcaattgaaggtaatgatacagaagccaaaaaatgtcaaagtacctctcaggaaaaaacaatctctgcctctgagtctgtcccagaagatgcaac

SEQ ID NO: 131133 - DNA, 180 bp, Zea Mays
gatctaggaccagaaaatgcaatagagaacacacaacctgcaagcacggcaaacattcctgaggttgaggttataaccgaagcaccttctggatttcaaactcctgtggagatcaatctggacatctctgatgccattgcagatactactgatggaaacacaggaacagatgaactagtt

SEQ ID NO: 131134 - DNA, 506 bp, Zea Mays
tgcatgcaggtgcgcccctatatagtggcagacatggttcagtggaactagtagtccctctaacaatgttttattactcccaccacgtaccattagctggagccttcatcatttggagacatgctgtccaacccaatgccatgcataataataacgtatatggatatcaagtatagccctagccttatctcatgatggttaagggatcagcctgttgttttagtgtggcattctcccaaaaaggtattctgagtaccactttcctcgggtcatcatttcccttctttgttctatatatatacatttatttggcttgcaataacacttcttagtttattaggtagtaggtccagcaggaagcggccaattcactgtcagataagatattattagtgtgaatttgtttttcagaaagatgtttttttggcttggcagaaactaaacatgtatggtagcttgcctttggctaattatgcatgcagaaaaagacatatacagttagcaat

SEQ ID NO: 131135 - DNA, 2038 bp, Zea Mays
cgcacttttcccgcccatacgcaaggaatggccggcgccgtctccgtctccgctcaccggcggcaatggcggtacacgtgggaagccctaaaccatcttcccctcctccgcctctacctcctaccccgcgccgcgctgcccttccgcatcccctcggacctccgcgccgacctccgactccagggctctctcctccacctgtccttctcgctccccggggacggggctgccgtcgcgctcagggtccccgtcccgagggtgctcgtagacccttccgcccccgtagagtgccgcgccgccgccgcgggggaccacctcgagctccgcctcgcgctcgtcctgcccgtcgaccaccctgtcgtcgccgccgcgttccctccaccccccggcgcggagcctccggcttctctagcgctgcgcgatgatttgaagagtttatctactggagacgttcacttgtattgcaaaaattgttcgtcaaggttgacaaaacagccactaaggaaaatcatggaaatgccatctgtagattgggtagatgtggctgacaattgggttggtggatgttgcacctcatttggtggtgcaggcgagaaacttgtatctcagtttattagggcatatggtcgtttagaaggaacaagtctactggatgcaacttccattactgtagaaacagacaatcttgaaacagatttagtgtctcaggtagcttgttcagcacttagtagacattttgttgctataaaagaagatatatttaatgttagtgtagaaaaagatcataccactgggaagataaagttgaagaattcagaagagcaagcaaatatcacagctactcatgcacaaccacctattattttggaagaggggcctagtgttagttgtagtgaaacaaacggagtcactcagactaatcagcctggcatttctcagacagaagctgatactgatgcatactttgagaagtctgaaaatgactgttgtgttgagaaagtggggaaatctaagaaagaggttgatttgttgctggtagatccatgccgttgctgttgtgtcaatggatacagtgagaaagctgaagataacccttcacagttgtccttggtcaatgagaaaaagcagaatatgttggagattaaaagagattacaaattaacaaaaactatttctcttggtagtagcttcattgttaaagcatctaaccttttgaatgattttgagtgggttgaacttctctgtggtcaatgttcatcacctcttggctcatacccttctcagtgttcgcttggtccagctgatggccgcctacgactcttcaagtgctacacatctacagaaattcctgtaacagggcctcatgatgtgtttagggggcatacattggaaagagtttttgtgaatctgttgcttgaagttgcagaagacgaaatatcttttcgcacattagtcagagatttgaaaaccaaaaggcccatgctgcaattagttcttcttagttcaaaagcatggttatcttctggttgctgttatgaaaatgatatcgatggttcacatggaacaacagatctgcagccaagtgttaaactcttgtattctgattatagcaatgcttcagaagcagatttaaggatagtagaagcgtgggcatccaaatatcgggctgaagagctgtacatgatgaagcgtcagatagacgaacttactgaatgcctaagctcaggaaggaacaactttccagtttcttgttcttcccttgaagggatgcggctctcatcgcttaggcgctgacttcagaatatgacatggaaattgtgcctggactgatcatatttttgtactgatcaaaggagtctacagcatagaatcctgatggcatacctgatcatcctcggtgtcttttgagctttcagcaagctacctaataatttcttctttaaaatttaagatggcatgccttgtcctctgctctgaaaagacttggtggcatccgaaatggagcaatggcttatccaaaactttcagcttctctggt

SEQ ID NO: 131136 - DNA, 147 bp, Zea Mays
atggccggacctgccccctccatggatgcacaacccctctcccatggcgtggctgtccccatggagaagcttaagccctcacctccaaccccagctcctccctgttctccatggcgtgctcccttcacagtgcagaagttggcgtag

SEQ ID NO: 131137 - DNA, 557 bp, Zea Mays
atgaagcagcctcaggaagcaaaggacagatctgggcatggacatcgcggggctcccttccgacatcctcgtggaggtgactgcaagcatcgcgacgaggtcgccgactcccctcagcgacgtcgtcagcttcaggcggtcgtgcaaggtgttccgcgactgcactggtgggacaaggcgaggttcctgtcggtgctccggcggtgcgcggccagcggcaaccccgaggcgtcctacatctttgggctggagctgttctgcaaccggccggggagagaagccagcgggctccgccgcgccacggagcgcggccacgccgccgcggcctacatggtcgagatgctcacgctgcaccacgcgcactcgccgcctggcggcaccgagcgggcgctgcaacgcctggactactgctcgtccgccggcgctggacacggcgcagggccgcctccgtccgcagagaggccgtgtcgttcgtgcgcaggctgacgctgcgtcggtggaggatggccgagcctcccacgccctgctcgaatcgtccgtggtgcggcaaggtggag

SEQ ID NO: 131138 - DNA, 2264 bp, Zea Mays
ccatttcaaaaccgcgcaggatagtcgcgtctcttctcatccttcccgtctctcccccgctccgctccaccccgctcaaaaaccctaggcggcgcccgaatcccggatcccgcgtccggctcccccagcgcctccgcccgtgctcggcgtccatcgttgccggcctccccgatggacccagcggggccgcgcgtggccacggatcccgccggatcgggtgccgcaccgccgcgcgaggaattggacaggagaggaggggcgtgcagcggcgccgcagcggcggaggggagcgcgtcgcggctcgcgggcgctggactgggagatccgagggctggaattctggaatcttcaggtcaagcagaagcatatttgcacacatgtaccatggatgtttctcagttgactgctgaaggtgtcacccagtgtggagctagagtgtctttattaccccagattggggcacttcagtcagaaactccttgtctgaccttgggccgtgattccagtgcagaatcaatggagaagctgcatggcagtgagtccttgccatgctgtaaagagaacatcggaacagttcgccaacctaagcctgatccagaacatgttgacaataggatgagtgttgcacgtcttgggttggaccttaacacagtagatagttctgatgcagcagagcttaaccctttcttcccttacaagaagctgggacagtcgaaagtcagtgatccatcggaatgtggcagcactactgctgctacagcagaaagtgagtcacacaggaaatggagagaaatgaagcggaatggctttctttcttcgtctcatggaaatgcagtggtgcctaggccacgtggtcggcccccgaaaaggaaaaaagatgatgaattcaaaaggagcacttccacacagcatggccaggctaacaagtctgttaaggttgctgctcctagtggcctattatctgggctaaaccctggaatcattaaccatgtgagaaatagcaagcaagtttactccataataaaggctatggtacactctgagaggcttgagaatgagaagcagcctgcatttactagtcaaacaggtggaagagggagagaagccagtgagggaattcaggatgagaaatatggtgctggtttcaagaagtgccatatgttgatgaaagacaataatgcggtgtttcaccaagcactgcctaccacatcacagttccttgcacaggacggcgataggctcaaactgcaactctcatcagcagtcactatgtcttcagacagggcctgcagtacatcagctgatgatccagcaactaatcatgattacatgactgtactgtcagtaaaagcggcctctgttgcttctcagtggttggaattactgcatcaggacatcaggggacgccttgctgctttaaagcgcagcaggaagagagtcagaaatgctcttcatacagaattgccttacctaatctcgacagaattttcatctaaccaagagaatgaatcatccattgcaaatacgtgtgatgctggatgtactgaaaaagcagtttcagaagcgcatgtggcacgatggaggtctctgtttgtccagatggaccgagcacttcaggaggaagggaaacagctggagaaccggttgaagcaagtgcaagaaatgcaatcgaattgtgataaaggcctcaaacacatgagctgtgaagctcctctgctaggacctattcctgagctatggaagctgaagaacccagatatttctgagagtgagtgggcggtgcaagctgccgccgcatcaatctactcgacctgcaacatggccatgagaacggagaacgtgccttgcttctgacctcacacttgtagttgtagtttagtttcttgcttttgctgatttttacctcaaaagttaggcctcttttattaccttcagtctttgtgaattgtgaccccttgtccatacactagcggcgagtcatgtaacgaggaagaaacttgatgtatgttgtcaccgtcctacgatttcacgggcccgtgaaagaacacattctttttatacacgaacatggtagtagtagtagcgatgagatctcggaacaggtgcgaagggcacgattggttgcctgcatagattagcaacgcatagattagcaaccaggcttatatagcatactaggtggatgcccgtgcgttgcaacgggaagataaaatatcacaataactcatgtacaaatatggtataatattatagaaaaaggttac

SEQ ID NO: 131139 - DNA, 2333 bp, Zea Mays
ccatttcaaaaccgcgcaggatagtcgcgtctcttctcatccttcccgtctctcccccgctccgctccaccccgctcaaaaaccctaggcggcgcccgaatcccggatcccgcgtccggctcccccagcgcctccgcccgtgctcggcgtccatcgttgccggcctccccgatggacccagcggggccgcgcgtggccacggatcccgccggatcgggtgccgcaccgccgcgcgaggtcggtgggccccgtcgcccgccctctgctcgctcggtccttgctctggggggcttcggatgcgctgacgcggtcttggtaactgttcgtgcaggaattggacaggagaggaggggcgtgcagcggcgccgcagcggcggaggggagcgcgtcgcggctcgcgggcgctggactgggagatagctgaggtcttgctaggacttgttgcacactctgcagcacttcttaggagtccaacattatctaggaactcacatgtcacatctgttacatactagtcaagtttcaactagtaagaactcggtctacactcaaagtattggaacactgttatgcactgcccgtgtcataatatctatatccgagggctggaattctggaatcttcaggtcaagcagaagcatatttgcacacatgtaccatggatgtttctcagttgactgctgaaggtgtcacccagtgtggagctagagtgtctttattaccccagattggggcacttcagtcagaaactccttgtctgaccttgggccgtgattccagtgcagaatcaatggagaagctgcatggcagtgagtccttgccatgctgtaaagagaacatcggaacagttcgccaacctaagcctgatccagaacatgttgacaataggatgagtgttgcacgtcttgggttggaccttaacacagtagatagttctgatgcagcagagcttaaccctttcttcccttacaagaagctgggacagtcgaaagtcagtgatccatcggaatgtggcagcactactgctgctacagcagaaagtgagtcacacaggaaatggagagaaatgaagcggaatggctttctttcttcgtctcatggaaatgcagtggtgcctaggccacgtggtcggcccccgaaaaggaaaaaagatgatgaattcaaaaggagcacttccacacagcatggccaggctaacaagtctgttaaggttgctgctcctagtggcctattatctgggctaaaccctggaatcattaaccatgtgagaaatagcaagcaagtttactccataataaaggctatggtacactctgagaggcttgagaatgagaagcagcctgcatttactagtcaaacaggtggaagagggagagaagccagtgagggaattcaggatgagaaatatggtgctggtttcaagaagtgccatatgttgatgaaagacaataatgcggtgtttcaccaagcactgcctaccacatcacagttccttgcacaggacggcgataggctcaaactgcaactctcatcagcagtcactatgtcttcagacagggcctgcagtacatcagctgatgatccagcaactaatcatgattacatgactgtactgtcagtaaaagcggcctctgttgcttctcagtggttggaattactgcatcaggacatcaggggacgccttgctgctttaaagcgcagcaggaagagagtcagaaatgctcttcatacagaattgccttacctaatctcgacagaattttcatctaaccaagagaatgaatcatccattgcaaatacgtgtgatgctggatgtactgaaaaagcagtttcagaagcgcatgtggcacgatggaggtctctgtttgtccagatggaccgagcacttcaggaggaagggaaacagctggagaaccggttgaagcaagtgcaagaaatgcaatcgaattgtgataaaggcctcaaacacatgagctgtgaagctcctctgctaggacctattcctgagctatggaagctgaagaacccagatatttctgagagtgagtgggcggtgcaagctgccgccgcatcaatctactcgacctgcaacatggccatgagaacggagaacgtgccttgcttctgacctcacacttgtagttgtagtttagtttcttgcttttgctgatttttacctcaaaagttaggcctcttttattaccttcagtctttgtgaattgtgaccccttgtccatacactagcggcgagtcatgtaacgaggaagaaacttgatgtatgttgtcaccgtcctacgatttcacgggcccgtgaaagaacacattctttttat

SEQ ID NO: 131140 - DNA, 384 bp, Zea Mays
tgcacgtggttgtagggagggcgtattgtggcggctacgagggatcgatgttcttgtgtggcggtgacaacgacaccgtggagccaaggcaatgtcagcaagctgatttttcagattggaatctatggttatttttaaagatcaaatatgttctagcatcttaaaaagatttgtgagaatgtaaacatttgttctgaggtcatttaggcctcaaacagaatttcttggacttatttcgctagagggaatgagacatctcgagatctaaatgtgtatagaagatccaaatgtgtatagaacatatattttttatgggtatcaaatatgattgtgtgcaaagcacggacatagtactataacaataaaacacacatttgtacataa

SEQ ID NO: 131141 - DNA, 177 bp, Zea Mays
atggacatacttctgcgttcccttgcaacggcagggcgcaatcaagtcatcacctactccgtggcaggtttagttgtgaacttgttgactgtgaatctgacacttctgcatgatcacaatggggcacaaactgcatcgtctcttctgtttgagtgccatgagaagccaactgcatga

SEQ ID NO: 131142 - DNA, 260 bp, Zea Mays
gccgtaggactggacatgtcactgtctgtagttctgtaccacaccaatctcacactgtcatgcaccatcatcagtgtcaatgtgtcattcagttactacaagcttgcgtgtcatggaaagtaatggtagaatctctcctcttttttttctcctcttgtcacatggctgcttgcttcctggctcttgccaggctcagctttaggaactccattagtgggtctttaacccccagcaaaggcttgaatcttctcttagcgagg

SEQ ID NO: 131143 - DNA, 106 bp, Zea Mays
ggttctcttgtatgtttgcagagatataacgctggaaagaatacgagttgagaaagaatctctctcttttacttctgtaaaaaatgggttcgcaacacagatattg

SEQ ID NO: 131144 - DNA, 1868 bp, Zea Mays
ccccctggccccctccctctccttcctcacatcttccttcgtcagccgcagatgcgccagcatctctcccacgggcaggaggaggaggagcgagaggcacagtgacagacagagagagagcgcgcgcggggggagcccagcacagcacctacactagctagccaccggccaccaccaccaccaccaccgaccgaatcgggtgcgcgcggcgcgctgctcgtcagctccggccggccggccgctttataaagccacccacccagccccgcccgatcgccatcgccatacccccgcctccgtccacggacacacacccgccttgccagccggcaccctcccggcctcccccacctgtgtcctccggcctcgccgccgcaaaacccgccgcgcaggccggttgctccgattgggagtgccaatcggagccaacagcgagggaagcacatgctgccgttcgtcctagagttcctcattgatgtcgcctgtgatcagtgagatcctcctctcggggtttatgatcaactccacactccggcgccgcacccacctggtccagtccttctccgtcgtcttcctctactggttctatgtcttctcatgaactactcgcccccatcatagccacgccccttctctcccactcctcctcctcctctttcccttccatctagtagcatctaccgtcctcctcttctctccgtgtcagtctctgccttcgtcgtcgccgtttcagtcgttccctaaaccttctttagcttgcatgcacttccctactgctgctagcaaagacctttattactagtgtcaattaagttacgaaagaagaagaaagaaagaaaatttcgaggccgagaaaaaagacggctttgatctctgctagtgtggtgtggtagtgtgtgcttctagtaagtaagcgagccagggatcaagaagcagagagctgctctgtctcttttgtctcttgcaagaatggcttcctccagcgggagcgggagctcgggctccctctcggcggcaacggcggccctggccgccgcggcgggcacggaggaggagctgcgcgcgctcatggagcagcgccgcgcgaagcggatgctgtccaaccgcgagtccgcgcggcggtcgcggatgcgcaagcagcgccacctcgacgagctgaccgcgcaggcggcgcacctgcgccgcgagaacgcgcacgtggccaccgcgctcggcctcaccgcgcagggcctcctcgccgtggacgccgagaacgccgtcctccgcacccagaccgccgagctcgccgcgcgcctcggctccctcaacgacatcctcgcctgcatgaacaccaacgccgtcggcgccgtcgccgtctccctcacagccgccgccgccgccgccgcttcctccgacccctgcctcgccttcgacggcgccaccgccctggacgacctcctcagatcctgccccgagaacatgttccagtaccagctctgctagctccagaccgcgcgaagtcaccatggcagcgcaaaacaccttcttttgttttgttttgtttttgtttttttttcttcttcttcttctggtgtttcaggtttagtaatctgctagtgagatggaagaactgaggtcagatcagacgtggtggtgactagccatgaaagtgaactttactgttactgtactgtgcgatcaactggtgggggtaattagctagctagctagctgctggggctatggttaatgcatgaactgctattagttaccaggtgtaagtgtaactctcgagtcctgctcttgttactgtttgtgtactgactgtgtcactccactactatgtaagaatcagagcagtaagtttactagtgtctctgctgtcaaac

SEQ ID NO: 131145 - DNA, 1473 bp, Zea Mays
ccttcctcacatcttccttcgtcagccgcagatgcgccagcatctctcccacgggcaggaggaggaggagcgagaggcacagtgacagacagagagagagcgcgcgcggggggagcccagcacagcacctacactagctagccaccggccaccaccaccaccaccacccacctggtccagtccttctccgtcgtcttcctctactggttctatgtcttctcatgaactactcgcccccatcatagccacgccccttctctcccactcctcctcctcctctttcccttccatctagtagcatctaccgtcctcctcttctctccgtgtcagtctctgccttcgtcgtcgccgtttcagtcgttccctaaaccttctttagcttgcatgcacttccctactgctgctagcaaagacctttattactagtgtcaattaagttacgaaagaagaagaaagaaagaaaatttcgaggccgagaaaaaagacggctttgatctctgctagtgtggtgtggtagtgtgtgcttctagtaagtaagcgagccagggatcaagaagcagagagctgctctgtctcttttgtctcttgcaagaatggcttcctccagcgggagcgggagctcgggctccctctcggcggcaacggcggccctggccgccgcggcgggcacggaggaggagctgcgcgcgctcatggagcagcgccgcgcgaagcggatgctgtccaaccgcgagtccgcgcggcggtcgcggatgcgcaagcagcgccacctcgacgagctgaccgcgcaggcggcgcacctgcgccgcgagaacgcgcacgtggccaccgcgctcggcctcaccgcgcagggcctcctcgccgtggacgccgagaacgccgtcctccgcacccagaccgccgagctcgccgcgcgcctcggctccctcaacgacatcctcgcctgcatgaacaccaacgccgtcggcgccgtcgccgtctccctcacagccgccgccgccgccgccgcttcctccgacccctgcctcgccttcgacggcgccaccgccctggacgacctcctcagatcctgccccgagaacatgttccagtaccagctctgctagctccagaccgcgcgaagtcaccatggcagcgcaaaacaccttcttttgttttgttttgtttttgtttttttttcttcttcttcttctggtgtttcaggtttagtaatctgctagtgagatggaagaactgaggtcagatcagacgtggtggtgactagccatgaaagtgaactttactgttactgtactgtgcgatcaactggtgggggtaattagctagctagctagctgctggggctatggttaatgcatgaactgctattagttaccaggtgtaagtgtaactctcgagtcctgctcttgttactgtttgtgtactgactgtgtcactccactactatgtaagaatcagagcagtaagtttact

SEQ ID NO: 131146 - DNA, 319 bp, Zea Mays
aaacccgttgcgaatctagccgccccgtgaccgacttcgcgtcgaaatgcgtggaagcgggccgccgacgacgaacctcatccttgggactgttcagtggctgtggaggtgctccgggtggcctggttgtgtggagtgggttcgagggatttctgggacaatacttcgacccaagcgtggggaattgctcatcgaaacagtgttgccaccgtgagtccgccatctcgcgccggcatcctcaccacgctacgatctgagcgaggttacgagtctcttgaagaccaaagttggtgaagtacctgggaatctcaagtctaag

SEQ ID NO: 131147 - DNA, 369 bp, Zea Mays
gttatgtggagtttaaaaagatccaaaatacagaaacacttgaaactcttaaagaacataagaggcaggaggatcaattttctattagcaagtgtctggctcaattgaaaggaatggatggattaacagtcatggacaaaacatatgctttggagcttttcgtatctgcgacaaacagagacattttcttaacagcaacagagcatgatgttagacaaatttggctcaagcgtaaaattaggtatgccataacttgaatctactaagcatgcaatattgtagactacaagcatataatgtcatttttataaatgtacgttgcttcgtggcagtgatgcatggcctgaacaaatgatatgagcaaatttg

SEQ ID NO: 131148 - DNA, 1091 bp, Zea Mays
gaattttttacagtactgtgaccaattacggcaagatttaattccaatgaccagaaatatatatgttgcactcattgttgcatacgcaagacttggtaattttgatatggccaagcaggttctactcgataaagaaataccatgtaagttcctcagtgacatcaagagcgcacttgtaggagcgctggcattaaatgggcaagtgtcggatgcacttcgcttgcatgatgagataatgcaatccggcggctccctggaaccaaaagctgccattgccttgattgagcatattcgaacagaaggtgaactggatagaatgcatcaacttctcgatgggctgaatgactcaaacagctggtttgatggctgtggcagagtacttttatactgtgtccagcacaactatcctgatgctgcaattgatctacttaagcagatcagggagaaagatgaaatgagtacatatatggttgttgatcaggttttttgccaaatatgggacatggagaccacaaatttggattttggaatggtgtttcttgatgctgtcaaagagcttggacttaatgtttctcggacaagccttgactttcttctcagcgcatgtgtaaaagcaaaggatttgcgacgtgcccaacagatctggacagaatacgaatctgctggtcttccacacaacgtgctgagttccttgaggatgtatcaagcttttctttcatctgggggacgtaaggcggctaagaagttgttgaaaaagatacaaaaggaagatgctcacgtgcgctacataacatatgcttgtcgtgcgacatactgcagtaaagacttcaagccttctgctacagttaggttaagttccaaaggaagagctagatcaaaacctactaatgaggggtaagaggtctatttacttttaccacttccgttgcagtgaaatactgaaacgggatgaaatcaattcttttgttctgggaaattcgctcgtacttgttaactcctatcgctttggatcttagagactagggtgatcattgctaacatcggattatatcttaagcaattggtggagccatggagattttctgatttta

SEQ ID NO: 131149 - DNA, 1747 bp, Zea Mays
ttccaatccctccccgccgccgtcgcggcctgctttgcggccttttcccggccgccgtcgcagcccttcccggccgccgtcgcggccccatctgccgtgcgccgtcggcccctgcgctccagttcgccgtcgaggccgccgctcgtccgtactcgcggctgtcgtcgcgaattcgcagatccgcccgcaacgaatcggccgccatcggggctgccgtccgccgtcgcaactgccgtctctgtgcagatccgccgtccctgcgcagatcgcggattcgcgcacagatccgccgtcgacctgccgtccctgcgcagatcgcggattcacgcagatccgcccgccgtcgcagctgccgtccctgcgcagatcccccgttgacggcctgctgtttcctgcaccggcacctgtgcagatccgccgtccacggagtgcgcagattcgtctgctgtcagatctgtctgctgtcagatccgtcgacggcctgctgtttcctgcaccagcacctgcgcagatccgccgcacagatccgtccagggtgtgcgcagatccttctgctgtcagatctgtccgccgtcggcctgctgtgtctgccgtcctgctgtccctgtgcagactcgtctacagtcggtctgctgtcctatgtacctgcaccaacacagtcacacctcgccacggcacgtccagattctgcctgcctttgtgctgatctgcacagttttgttcaggctatctgcccggaattttggtattctctgttattcttcagtgttttcttgctctttaatatgtcgaccaacgctattattgtcaatattgtgctcgatggccagaattatcccgaatgggctttctgtgttcagactgcattaagaggccatggtttactgtttcatttgactgaagattcacccgtcttagcagccgatagaagtaatgttgctgcaatcaagacttggcagatcaatgatggcaaggtaatggctgcaatggtcaatagcactaaaccaactatgattatgagcctgtctaagttcaccactgctaaggctatctggtcacatctaaaagaccgatttgttcaggacagcggtgctcttttacatacccttatgcaacagactcatgtcattgagcaacatgatatgtccattgatgaatactattcagcctttgatcgtcttatgaatgctttgacctctatggtgcctgcttgtacaactgtgccttgcccagcccacaagttcattgagaagtttttcacatacagatttgttatgggagttcgatctgaatttgattctcttcgtgcaaggttgcttcacagttctgatactctcactatggctcaggcgttatctgaattacttgctgaagagactcgtcttaagtccatgtcttctattactggtgtgagttctcacagtgtgttggctgctgctcagaagtccagaaacacctcttttcagccttgtgaacattgcaaaaagaccactcataggtctgagaactgcttcactaagtttccagagaaactggctgattttcgtgtccgtcgtgctactcgtggtcgtggtacaggaccatctcctagaggttcagttgcggtggctgctacttcatctgctggtgctctgtcatcatcttgggttcttgattctggagcttcatttcatgtgacatctgatcagtcacggctggcgactactacacctgtgaccgagggtacttctgttcagactgctgatgg

SEQ ID NO: 131150 - DNA, 1482 bp, Zea Mays
gccgcaagcacaacaccgaaccgctaaacccactcacgcactcgcgcccgcatcactcaccgaccagcgacggcggcgggtttctccgtccgccgccctgcccggtcacccatgtggaagcgcctcctggagaccaccaagcaggtcgtctcctccaagcaggccatcccctacgcagccgtcacccccaagcccgcgacccccgccgccgccccgtcggcatccaagcgcggcgcccctgttgctgcgccgaagctatccaccctgaagagtccctcctacaggcgacgcgccgccgccggcccagccaccaccgtcacgcaggcatccctcctgcggctcaagcaggccgcggcctcgaagaagaccaacttgccgtcctcccccccactgaatgacgcccacgccctagatgaggatgacccgccagaggctctcaccaaggcgctcatgttcgtcatagatgcacctgaagaggtggaatgtacgacttccccggaagcgctaccggagggctccgaagatgttggggaggttgccaggggcaataagatattggactttgagtggttccaggccgaaccatcgagggacccgctgatgctttggaggagggaggtggccagggagaagaagaaacactacatattcaagaatgtggagagccaccactacacaaatttgatgcgtatttgcgctaataagcttgggatggaatcgacaatagaatttcttggaaacttggggcgggaaacaggggtcaaggagttcaattcgatgattaaggtttgcctaggcaaggcaaaggcttgcagggatattgactctgctgtggagtatatttatcgggcgtatcaccttttcaataccatgaaagataaggggttcacgattgagaaagatatctatgacccattcctcttgtatcttatggacacggggatgtttgaggaatttgaggtgttcagtgcattctttaaggaggcgaatccgaagtccttctctagaatagcttattatgagatgttgctttgtattagagttcaagatgaagaaaaaatccaggaactttgtcactctgttgaagactacgatgagaaagttcactatgacctagcagagagttacatgctggcctttgctgaaagcggcagaaaggaagatctggttgccttgttggatttggttgatctatccaaagtttcaggttcaaagtacataactaatattttcaaatcattgggcaagctagaactagagaattatgtggagaaacttcttgagaggatgatgtcaaaaggatgtgctgatcacgacatttcatccttgattttggagtataccgcaaatataccgaatataatggttgaagacatgctagtggcatttcataaatggcatgagaagtttgaggtagcaccctctattgatgcatatgacaagatcgtctctatctgttgcgattcatcaaaggtaatactg

SEQ ID NO: 131151 - DNA, 133 bp, Zea Mays
tttcagtctcgttatggcataattatacacatgtttcattgagattaatgtattttcactgtagtttaacaatcgcaatctgctgccactatccatcatgcagcaacaacaaagcctttgtcagtggcgaaag

SEQ ID NO: 131152 - DNA, 218 bp, Zea Mays
atgttacgtttgcagatatggacgtcgatggttttctccacattaggaaagctggaagagccttttgaactcacttttttgctaacaatggtgttacggtggaacatagttttgcgtgtatgtaccaacaactaaaatgtaaacacgacattatcatagttgagtacaggaacaattatctcttatatcttattgtaaaatctaaaacaattctcctg

SEQ ID NO: 131153 - DNA, 2607 bp, Zea Mays
cttggccctcaagctttcggtgcgtcacccgccgccaaccctcgacgagactccgattctcttttcccctaggccaaggtctggccttccggtctttcttcacgccgtttgtgcggtgcggtggcgatcgtccgcgatgggcgccgcgcggggagaggaggacggggaggggcgctgcggcgagcggtgcccgtcgtggtacgtgagccgggaggagatcgagagcggctcgccgtcgcggcgggacggcgtcagcgcggccaaggaggccgagctccgggccacctactgctccttcatccgcgacgtgtgcatcagactccgactgccgcagattacaatggccacggcgatcatgctctgccaccgtttctacctccgccagtctcatgccaagaacgagtggcagactattgcaactgtctgcatatttcttgggtcaaagatagaagacacaccttgtcaattgaaacacgtggtcattgtgtcatatgaaacaatgtaccataaaaatccggatgctgctaagagaatccaccaggagcatgaagtgcttgcgaagcaaaaggcactgattttggtgggggagacactgctgctttcaacaataaggtttgatttcaatatacatcatccttatgaacctctaaagctcgcgctgaagaagctgggcattgccgagacggaactgagacaatctgctatgagtctcattaacgatacgcttccgtcaactctagtcatccagttcaaaccacagtatattgctgcggcatcactgtggtttgctgccaaatttcacaacgttaatctttcccagaatgggacaatatggtggcatgtgttcgatgttgctccagatccgttgagagttgttgtgcagcaaatgtctgagctctttgagaaaagagccccatgctccgtgggtcctgttaccaagccagtaccagcttcaagcgcgacggataaacaccagatcaagccggccccaactcatactccaatggataagcatcagatcaagcaggttccagctccaatgaatagacatcagatcaagccggtcccaactccaactccaatggataagcatcatatcaagcagatcccagctccagctccaacgtgtagacatcatatcaagccggttccaactcccatcccaactccgatggataagcagcagaacaagctagctccaactccgatggataagcagcagaacaagctagctccaactccgatggacaaacagcagaacaagccggctgcagctccagctccgacggacagatgtcagagagtaagcaccccggttcctgcaccgagggacacgcaatcttcaaggagaagctttagcagcagcagcaacacagaagctcctagacgtgtgcctgcaggccgttcatctaacgagaagcccagagacaggtcgccaaggcatgaagggcactggtgccgaggaaaggatggagagaaccagcattgtcaaaaacacagagaccataactctgagcagaggccagaagaacggtctaatcagagagctctgaagtctggtcttgcttaccttgttcgtagtggtgggccgaaggatacaggtgcagcaacagagatcaggaacctgaccagacggaagagaaggatccaggaggttggagggctcccaactcctgtttacacgtcggatacggatgcttggaggcaagttagcgctgtagttctttttggaacgaagggacagaaaaggccgagaggagatgaaccgtaggagttgccgccttttttatttggtattttgcagagaaggtcgagagaagatgaaccgcgtaggagttgccgttttcatttggtatttggcagagaccgacggctggtctttgctggactgatgatactttgagacaaaggtgtctaatgtggacggggtctgtgaattaagttcactcgtgcgcatcagatgcacccagcttgcactgaaaatgacacgctattgtctccatggaccaggctgttccggttctgtaggcacggatggacagtgatggagagaaagctggttttgggcaccacctggtgccagccatctttgttttggactgagctgtatggctcaaaacaaattttgtagtgtgtgtccatgtgtatattaggacggtgttctaattctgtctcagatcgtccagtgctatttagttatttacaccgtgcctgtctgtccttcgagttctcagtttttagtggcttattggtgaaaatttgttatccgtttgaaatttctcatgcgaacgaggaggagatttgacagtgccttggccgtcgacacaatccgccaacacatttgatcattaccagcttctgcaatatgctctagagagcctggtttgtacaaataaagggagaacagacagatttttgtacagcctgatggcatagcgttagccattgtatcatatacaaggactggcccgagcgaatacgctcctggagtccttttgcacaacgagagcaccacaggatgcattcgtttgtgattgtctgcaatagaaattgcgatgcttccaaattttccagaccgccggtgaaatgagcttagtacggtccttg

SEQ ID NO: 131154 - DNA, 1635 bp, Zea Mays
atgggcgccgcgcggggagaggaggacggggaggggcgctgcggcgagcggtgcccgtcgtggtacgtgagccgggaggagatcgagagcggctcgccgtcgcggcgggacggcgtcagcgcggccaaggaggccgagctccgggccacctactgctccttcatccgcgacgtgtgcatcagactccgactgccgcagattacaatggccacggcgatcatgctctgccaccgtttctacctccgccagtctcatgccaagaacgagtggcagactattgcaactgtctgcatatttcttgggtcaaagatagaagacacaccttgtcaattgaaacacgtggtcattgtgtcatatgaaacaatgtaccataaaaatccggatgctgctaagagaatccaccaggagcatgaagtgcttgcgaagcaaaaggcactgattttggtgggggagacactgctgctttcaacaataaggtttgatttcaatatacatcatccttatgaacctctaaagctcgcgctgaagaagctgggcattgccgagacggaactgagacaatctgctatgagtctcattaacgatacgcttccgtcaactctagtcatccagttcaaaccacagtatattgctgcggcatcactgtggtttgctgccaaatttcacaacgttaatctttcccagaatgggacaatatggtggcatgtgttcgatgttgctccagatccgttgagagttgttgtgcagcaaatgtctgagctctttgagaaaagagccccatgctccgtgggtcctgttaccaagccagtaccagcttcaagcgcgacggataaacaccagatcaagccggccccaactcatactccaatggataagcatcagatcaagcaggttccagctccaatgaatagacatcagatcaagccggtcccaactccaactccaatggataagcatcatatcaagcagatcccagctccagctccaacgtgtagacatcatatcaagccggttccaactcccatcccaactccgatggataagcagcagaacaagctagctccaactccgatggataagcagcagaacaagctagctccaactccgatggacaaacagcagaacaagccggctgcagctccagctccgacggacagatgtcagagagtaagcaccccggttcctgcaccgagggacacgcaatcttcaaggagaagctttagcagcagcagcaacacagaagctcctagacgtgtgcctgcaggccgttcatctaacgagaagcccagagacaggtcgccaaggcatgaagggcactggtgccgaggaaaggatggagagaaccagcattgtcaaaaacacagagaccataactctgagcagaggccagaagaacggtctaatcagagagctctgaagtctggtcttgcttaccttgttcgtagtggtgggccgaaggatacaggtgcagcaacagagatcaggaacctgaccagacggaagagaaggatccaggaggttggagggctcccaactcctgtttacacgtcggatacggatgcttggaggcaagttagcgctgtagttctttttggaacgaagggacagaaaaggccgagaggagatgaaccgtag

SEQ ID NO: 131155 - DNA, 311 bp, Zea Mays
gtcagtttgagtgcatttgcattcttgttctctgagttggttcagtacaaccagactcaagttgacaacattactgagctagaacggagtttgagtgcatttgcattcttgttctctgagttggttcagtacaaccagactcaagttgacaacattactgagctagaacggaggtatgagtctatcattgctacgctttgtgaaagtctggacactttagatgaaccagaggctaaggcatccatgatttggataattggagaatatgctgaaagaattgacaatggctaaggattgtattatggtcacac

SEQ ID NO: 131156 - DNA, 2159 bp, Zea Mays
ttaccctattctttctgctcaacttggcctcacgcacgatagccgccgccgtcgaccagagcactcccccgtcgtcgccacgatgtcgtctgagcctccacccgcctcctctgccgccgccggagaggaactcgctgctgacctttccgccgctaccctcagcaagaagcagcagaagaaggacgcgaggaaggcggagaaggcagagcagcgccagcgtcagcagcagcagcagcagcagccggcggacgccgaggacccgttcgcggccaactacggcgaggtccccgtcgaggagatccagtcaaaggccatctccggccgctcgtggtcccatgtcggcgacctcgacgactccgctgcgggccgctccgtgcttatccgcggagccgcgcaggccatccgtccggtcagcaagaagatggctttcgtcgtgctgcgccagagtatgagcaccgtgcagtgcgtgctcgtcgccagcgccgacgccggcgtcagcacgcagatggtgcgcttcgccaccgccctcagcaaggagtccatcgtcgacgttgagggcgtcgtctccctcccaaaggagcccctcaaggccaccacacagcaggttgagatccaagtgaggaagatctattgcatcaatagggctattccgacccttccaattaaccttgaagatgcggctcggagtgaggcagattttgagaaggctgaattggctggagaaaagcttgttcgcgttggccaagatacccgcttgaactacagagctattgatctacgaacaccctcgaaccaagccatattccggatccagtgtcaagttgaaaacaaatttagagattttttgttgtcgaagaactttgtcgggatccacaccccaaaattgatttctggatctagtgaagggggtgcggctgtattcaagcttctgtacaatggtcaacctgcttgtttggcacaatcccctcagttatacaagcaaatggctatctctggtggttttgagcgagtatttgaggtcggccctgtgtttagagcagaaaattcaaacacacacaggcatctatgtgagttcgttggtcttgatgctgaaatggagattaaggagcattattttgaggtctgtgacattatagatggcttattcgtatcaatatttaaacacttgtctgaaaactgcaagaaagaactcgaatcaataaacaggcagtatccatttgaacctctgaagtatctagacaaaaccttgaagctcacttatgaagaaggaattcaaatgttgaaggaagccggaacagaaatcgagcctatgggtgacctcaataccgaagctgagaaaaaacttggtcggcttgtcagggaaaagtatgacacagattttttcatcctgtatcggtatcctttggctgtacgtccgttctacaccatgccttgttatgacaacccagcgtacaccaattcttttgatgtcttcattcgaggcgaggagataatatctggagcacaaaggatacacactcctgagctgctggccaagcgcgcgacagagtgtggaatcgacgtgagcactatctcggcctacattgaatccttcagctatggcgtgccgccacacggcggtttcggggtgggtttggagagggtggtgatgctgttctgtgccctgaacaacatcaggaagacctccctgttcccgcgcgacccgcagaggctcgtgccgtaagtttctgattccaagcctgagtcttcgagtggtctacggagcagatccgatgttgttaccatcagagttgacttgcaatcttagctcctgaacctggcggttaccgtggatcagagttcctgttgaatttcacaaaagcctacttgttcctaatagattgctgcaaccaacaatattacgaccctttcgggcttttcttcccgcctcacgtgttattctggtctatacttgtttttaagtgcaagtattgctcagttacatatagcgtccattacgtagcggcctagcatagtactaccttagttcacaaatatatgacacctttgattttttcgaaaactttgaccactaatcttatttaaaatatttataaaattttaagttaagcacaaactaccttaaatgataaaacaaattataacaaaataaatgataa

SEQ ID NO: 131157 - DNA, 137 bp, Zea Mays
tttttttattattcttttattcctttccaaattcaaaacttcaactctaaaagaaattctttttgtggcaaatttgtaatttggttagatattaaatcctttccaaattcaaaactgctttctctccttctattcta

SEQ ID NO: 131158 - DNA, 552 bp, Zea Mays
atggaggagtctggattcgccatcaccagcatcaatggaaggatcaacagggctgtttgggggccactaatcaggaccatcgtcactgctagggaggatgctaccattcgcatatgggactcagaggaggcccaggaggatgaggagcgagaacgggtgtgccagaagcaaggccaccagcgcgaaggcgaccatggtggcgtagttgacgcagaattggattttgggaaaaagcttccatcattcttcttcattcaaaagaggatggctttttcagatgatggaaagatgaagccaaacctttttcggacaaggggtaacaggtgtattgccatgaccaacaatggtgtagagaagaaaaacaagaggagcagcaacaggcgatgcgctaagaagtatccaaccttttttaacacaaattgcatgagctcttactttcaattagagtataaagcagaaggcttaatgaatttcgtagcacctgtacacaacttttctgaaacttatgttaaggttgactatgaacttggatacaacgtccatctccactaa

SEQ ID NO: 131159 - DNA, 2183 bp, Zea Mays
gccttgtctccgccctagctcctccgcaatctcctgatcgaggccgccgccgtctccgaggccgccggcgctagctgcagggccgcgcgctcggcagattagttccacatgtcgtccgcagccgtgtcgggcagcggcggcgccgccgccgcggcggacggcggcgtggagggcgcgccggcgctgtcggcgtcggcgtcgcgcacgtcgtcgctgcggcaccgcgcgatgagcgcgtcgtcgaagctgctgcggagctcgctgagccgcaagtcgatggggcggcgcagcagcaaggtgatgtcggtgtcgatcgaggacgtgcgcgacgcggaggatatgaagcaggtggacgcgttccggcagacgctggtgctggaggagctgctgccggcccgccacgacgactaccacatgatgctccggttcctgcgcgcgcgcaagttcgacatcgagaagtcgaagcagatgtggtcggacatgctgcagtggcgcaaggagttcggcgccgacaccatcatcgacgagttcgtgttcgaggagatggaccaggtgctggagcactacccgcagggccaccacggcgtggacaaggacggccggcccgtgtacatggagaagctggggcagatcgacaccaccaagctgctgcaggtcaccagcatggaccgctacgtgcagtaccacgtgagggagttcgagcgcgccttcgccgtcaagttccccgcctgctccatctccgccaagaagcacgtcgaccagagcaccaccatccttgacgtctccggcgtggggtacaagaacttcaacaaggccgcgagggacctcatcggacgcctccagaagatcgacggagacaactaccctgagacgctgtgccggatgttcatcatcaacgcggggcaagggttcaggcttctctggaacaccgtcaagtcgttcctggaccccaagaccacggccaagatccatgtccttggcaacaagtaccagagcaagctcctggaagtgatcgatgccagcgagctgcccgagttcttcggcggcacttgcaactgcgagggcggctgcatgcgctccgacaaagggccatggaaggaccctgagatcctcaagatggtccaatgcggcatggggagatgcgggatgaacagcggggaccctcgcgacgccgacgagaagctcatcaccgaggacgaaatagtgcccgttcccaagaagcaagactccatgcgccgcaacgccgtggattcccccaaggtggcgcgcgagaagatcgagcacccgcagatgtccccgctccacgagatgaagaccgccagcgacccggaccctgccgccaaggacagcttcgacggcggcgggctgttccccggcgtggacaggggcatggacttcaactggagcggcgaggtgagcgaggagaagctgcagatcgcgcgggacatgtacgcgcagctgccggacgcgtacaagcagggggacgcgggagaccggcaggtggtgtcggggttcatggcgctggtgatgggcgtggtggccatgttccgggtgggcaagatcgcgccgaagcgggccatggacgcggccatgggcatcgccaccatggaggccatggccaagaagacgcggcagatgcagatgcagcagcagctgcagctgggcgggcccgacgccgtcgtggtgtcggcggcgcagtaccaggcgctggtcaagcgcgtggacgacctggaggccaaggtggcggcgctggcgtcgggcccgcccgaggtgccgcccgagctggaggagtcgatcaaggccgccgccgcccgcgtcgacgcgctcgagacggagctcgacgccaccaagaagctactcgagacgtcgtccgcccagcaggaggaggtcctggcgtacatcgagaagaagaagaagaagcgagggatgaacccgttccgatggtgacgcgccagggggggaagggcgatggcgcggtgcatgatccagtgatcaggcggcccttggacccccaatacgtatgcatcctcgtgtagtcgtgagactgtgtcagtgttcttctccactcatatacctgtgtctgtctgtctctgaatatataatttcctccagatttttttcttatagaaagccaatcttttgttccaaggacattcataggaaatgagatttcaatcctctgt

SEQ ID NO: 131160 - DNA, 2122 bp, Zea Mays
gccttgtctccgccctagctcctccgcaatctcctgatcgaggccgccgccgtctccgaggccgccggcgctagctgcagggccgcgcgctcggcagattagttccacatgtcgtccgcagccgtgtcgggcagcggcggcgccgccgccgcggcggacggcggcgtggagggcgcgccggcgctgtcggcgtcggcgtcgcgcacgtcgtcgctgcggcaccgcgcgatgagcgcgtcgtcgaagctgctgcggagctcgctgagccgcaagtcgatggggcggcgcagcagcaaggtgatgtcggtgtcgatcgaggacgtgcgcgacgcggaggatatgaagcaggtggacgcgttccggcagacgctggtgctggaggagctgctgccggcccgccacgacgactaccacatgatgctccggttcctgcgcgcgcgcaagttcgacatcgagaagtcgaagcagatgtggtcggacatgctgcagtggcgcaaggagttcggcgccgacaccatcatcgacgagttcgtgttcgaggagatggaccaggtgctggagcactacccgcagggccaccacggcgtggacaaggacggccggcccgtgtacatggagaagctggggcagatcgacaccaccaagctgctgcaggtcaccagcatggaccgctacgtgcagtaccacgtgagggagttcgagcgcgccttcgccgtcaagttccccgcctgctccatctccgccaagaagcacgtcgaccagagcaccaccatccttgacgtctccggcgtggggtacaagaacttcaacaaggccgcgagggacctcatcggacgcctccagaagatcgacggagacaactaccctgagacgctgtgccggatgttcatcatcaacgcggggcaagggttcaggcttctctggaacaccgtcaagtcgttcctggaccccaagaccacggccaagatccatgtccttggcaacaagtaccagagcaagctcctggaagtgatcgatgccagcgagctgcccgagttcttcggcggcacttgcaactgcgagggcggctgcatgcgctccgacaaagggccatggaaggaccctgagatcctcaagatggtccaatgcggcatggggagatgcgggatgaacagcggggaccctcgcgacgccgacgagaagctcatcaccgaggacgaaatagtgcccgttcccaagaagcaagactccatgcgccgcaacgccgtggattcccccaaggtggcgcgcgagaagatcgagcacccgcagatgtccccgctccacgagatgaagaccgccagcgacccggaccctgccgccaaggacagcttcgacggcggcgggctgttccccggcgtggacaggggcatggacttcaactggagcggcgaggtgagcgaggagaagctgcagatcgcgcgggacatgtacgcgcagctgccggacgcgtacaagcagggggacgcgggagaccggcaggtggtgtcggggttcatggcgctggtgatgggcgtggtggccatgttccgggtgggcaagatcgcgccgaagcgggccatggacgcggccatgggcatcgccaccatggaggccatggccaagaagacgcggcagatgcagatgcagcagcagctgcagctgggcgggcccgacgccgtcgtggtgtcggcggcgcagtaccaggcgctggtcaagcgcgtggacgacctggaggccaaggtggcggcgctggcgtcgggcccgcccgaggtgccgcccgagctggaggagtcgatcaaggccgccgccgcccgcgtcgacgcgctcgagacggagctcgacgccaccaagaagctactcgagacgtcgtccgcccagcaggaggaggtcctggcgtacatcgagaagaagaagaagaagcgagggatgcagaacccgttccgatggtgacgcgccagggggggaagggcgatggcgcggtgcatgatccagtgatcaggcggcccttggacccccaatacgtatgcatcctcgtgtagtcgtgagactgtgtcagtgttcttctccactcatatacctgtgtctgtctgtctctgaatatataatttcctccagatttttt

SEQ ID NO: 131161 - DNA, 870 bp, Zea Mays
cgctactcgctagggttcaatccttgcgccgccgccacctactcgagccctcgcgctagccccctacgccacctagccgttcgccgtgcgtcgagtcctcccagccgcctcccgctcgtcgcgacctgcaggcctcggtcatccggcggtgttcttccggcctttcgtactgtcgctcatgaatcccgttctgtcgtgaatttgcatgcagtagcttgaactagaatgcctgcgaattagtctgccttctgtttttattcatcggagccaggttacgatatggtggtagtagctgtgatgagcactgctttcttctgacacctcttgtatgagcagggactttgttccctccgttgagcagattcagcaactctctgagctcctccctcgcattttttctgagctaacctggccatttgctccgtcatttagcattttattacgagtttgtgagatcgtaggtctttactttttctcagatgacgccgactgtgctgtgacgagctactccttatttctgacaccttgtgagccttgagcagattagcaactctctggatcgtcaatttcgtttgctattcttgatatgccctttgttcaattagtgaatttgcattcgtcaatctgactagtgacttacatgaatccttttcgtttggcatcagaggatgaaagcttgaaacaatcttaggacaccttctgacacagcgcgttacatcacgttgtgaatgagaaggcaattcttttctgatgatgctgtgcttcaatatgttacaaatcacatgtttttggattatttgttgtctacttttgtttgtgggttgggagcatgtgcgctatttctttcacccatatttcattttttttatg

SEQ ID NO: 131162 - DNA, 1172 bp, Zea Mays
ccagactcgtacggaaaaacagcccagtgtattcctctgcctccacccacatggcgctccaggcgcagcagcaggccaccccgtcgccgacgcgcgacagggcgggcagcggcgagtggctggccgacacggagaagctccccggcgccgccgcgtccccggaggacgtcgtcgtcgcctccacgcaccacgccgccgccgccgccaggtacgtgccgccgcgcgccacgtcgcacaccgccgaaccgaaccctggccgcggcggcggaggcgggtggtactcgtggaacggcggccgtcgcgctcgccacgatccgcccgcgccgcggcggcagcagcccgcgaagacgcccccgcccgccccgcctctgcctgcggctccccctccccctcccgctgcctctccggctccagctccaagggccccgcctcctcacgcgcaggtcaggtcggccgaccgggtcgtgcccgccattctgtcgcgcaagcgccgggccgcggtgatgcagcgcgccgcgctgctggccagggccgccgccgcggggctctgcctcgccgcgctcgccgtgctcgcctccgacactcgcaggggctgggcccgcgactcctacagcaactacgcccagttccggtactcggaggccgtcaacgtcgtcggcttcctgtactcggtgttccagttcgtcgcgctcgccgagctcatgaggaggaacaagcatttgattccccatcccaagcgtgatctcttcgacttcaccatggatcaggtggtagcataccttctgatatcgtcatcgtcatcagcaactgctcgagcaagtgatttgattgagaactgggggagcgattccttcccgagcatggcgaacggctccattgccatatctttcgtggcatttgttgttttcgccatttgctccctcatctccgcatacaatctgttccgccgagacatgtagctgatcctgacaacttcatttctgaacaaagtttttggtgcaggtttcatgtgtgtataaatgtgatgggaactctgaacttctagcgatgatgtatctacatgtcaaatggcaactcacttgtgtggtaaatgaaattcagaagttctcgcaattttttctgcatgacatcacaatggtcatcagttggtgtgcaatcagccaatcaccaca

SEQ ID NO: 131163 - DNA, 1097 bp, Zea Mays
atggactccatcgtgtttgaggttgctgaattgtatggagcaacaatgatttgtcacactaacagtaaaatgaaagggtttgttattggagatgctcttaaggaaagagtcgccaattgctgggccggcccaaacgtgggcccaacgcccgaatcaagaaagaactgtgagcaagcggtacagaggaggcaagcagcgaaagaagtccaagctacggcagccttgagtctgactcgatcccacaagcgagtgtccgagccagacgacattaacctaacaaatgtttcccttcccaggagaatgagtctccgagacgcgaggcattggattatcggatatgctgctctgctcgacgatgaacaacctcggtgggggcaggtggactgtgtcggtgtcacgaaaacaatgctgcgactgcgaccgaacctgagatgagatgctttgaattcgtaaataaaccgagacgaactataatttggaacggaccacgtgagctaggaaaaggatgaacgggaaactttttgttttttacgctccaggccggacacggacagccgaccggccgtgaaccttgacgatcggctcggcggcgaggggagctcgatccgacccgagcgcacgcgctggacgtacgacgacgagcaccgtacgctcggctcagttgtggttccacgacgggccggacggcggggtgtgagcgcggccgccgaccgtcgtactcgctgcccggtggcggtgaccgccgtcctgcgcccgcgcaacagtagcggcgccaccgttactcgccccctcgcgcaccggcctgatggcgccgccgcacggcgcgcggaggagcacgagcacgaggagcgcggcgacgagtgccacggcccgctgcggcgggacgcgcagcggcgacgacgacggcgaagaggcttccgccatggcgtacgagcgagcgacgaacggtgtgatgggccggcccggcgggtagtcgagcgaaagtaaagggtcgggaccggagctgggcggctggccgggcgccgctgccagcggtgagtgggtggagatggtcgagaggtggatggagtatggaccggttctcgggtgccctgttg

SEQ ID NO: 131164 - DNA, 112 bp, Zea Mays
gggagtttcatgatcctcgctggagtactttacatctcgatcatggcatcaaagggcgtgagttaccaataatcacaaaagggtgacttatactagtactaatttaaacaaa

SEQ ID NO: 131165 - DNA, 343 bp, Zea Mays
tgataataaggttgagagcagaggatgtgagggcgaaagaaaaaaggccggtcgatatgaattatggatgagtggtggtccgatggcgcaacctatgaggaagtttggttcgacggtgaaggagaaacttgcgtcatacgtgtttgacctagctacctcattatgctagaaaatgaaaaaagagtgtgatatacctggctatctcactgtgtgggaaagggaaaaaataatcacgctagtgtgaagaaattgacgtcaactgtatttagggagttcctaccgagttgctaaatgtggagagtaaatagagttgaatagcaactaagtaaatttagcaagtcta

SEQ ID NO: 131166 - DNA, 175 bp, Zea Mays
ttttcttatttttcttgccatttaaaattctattattattatattttttcaaggtttcaagaatttccaaaccactataataaatatatttgtttatttattttattattattattattattattattattattattattattttccttctaccaattttgggctttacaacacc

SEQ ID NO: 131167 - DNA, 1587 bp, Zea Mays
gggttttccttctcgacttttttcctgctttttttttctgcgcggacgttggtggctgttagaattttgcaagtgggcctagtcagtttagaggcccatgatcagcccattaataatcttgtcgtccttgtgacacgtgggccctgtccagacgcgtggtggcaccgcggagggggcagacagagagtaaaggaggcaagtaggcgactccggcgagagaagtgcgggtgcggccatggcggacaagccgagccgcgcgctggtcgtctacgccgccggccacgccgcggcgctcatccccccgccgggctccgcagccgcggggagccacctcgacgcgttcgcctcccgcgcctgctgcggccttctcaccctacgctccccgccgacttcccatcctacgaccggcaccgaggataatagcagcacgattttggaactggcgcagctgctcgacgtttacgatcatctctaccccggaaagaatgaggaaagtggtcaagaagttgcccaagtggatccacaggagctcgtggttcccaagctgtttgagaggtttatgggcctgagagctgccttggtcaccagttgcccccatgtcagctccttcgcagcgaatcttggtttccatgtttttaaaaccaatgattttgccccacaatctggctcgtccagcattactaaagaggatggattaatcaaaagagcatttgatctgctaggattctcggatggggatgtgcaggaaacatctgaattcgatctagtcttcatgcatgttgccatggagaacacaagcagcaagttaggaaagttaggaatgaagacagatatcaatcggctcgacaaattagttggtgcagtcttggaatctgcgcctgttggttcagctattgcttcgcgtattcatgtatctgtgattttgagctatgggtctgcttctggaaataaggatgagttttcccttttaacctcttcaaccgaaacagattcagacttgaatctactgcgtccacgccagagctacacaatgaaaacagggcgtacattagatgatgtcagacttcatcatccaattttgctggcacagtggcaggacggagtaacacgtgttgatttggctaaagggttctcttttgaggagtttatgaagcgtggtggaaaccttgctatgcttgctgagcgcttcctgcacgaggtggcatttaagctctggaaagcgcctaaatatggggcttgaggagggtatccagcgttgactgacttggcgtcgcggataaataatcgaagcaccagatgagttgtcgctttgtaacggaaatgacttgagtgatgccagacattgtggcatgtgagctttttatgtgaagtgtaacgtggacaggccctgatgcgataaactgtttggacatcgttactggttcagccaatgagaacctgtagcaaaacaatatgatgttttcttatggtagtttggaatggatggagttacatgcattgagcactgtaattttgataatataagactgtctccaacagcctctctattccactcactatttcaaactacacttgcaaatggtgtat

SEQ ID NO: 131168 - DNA, 546 bp, Zea Mays
atgcctcgatactggcgcttgtcattcagcagaatggccataaccataggcttcacacaagtgagaaagcatgtcgacggtaaaatcgaagtcgaactcctggagcctgagcgcgtggacgatgaagtcgacggacacgtcggggaacatgtgggagagacacgacacggcgccggggaggtgatgaacacccgaaccaccgcccaaacgtaccgacgagtcgggcgccgtagcagcagcggcggcggcggcctccgctctggagagagacagaggctcggcggacacgctgggctttgccagcaggctctccgcgtggaaatccagagacagcgagtccgggagatggtactcggcgtcggcggacttgtcaggagtggcctcgtcgtcggtcgtgctgccggtcttgttctgggagccggtcgtctggttgagcgtctcggatgcagctgcgaatgcgaagctgggcgtcgaggacggaacgaagggagcggcgtgtgggttcagctggaaaccccagtccggttttcgtggctcgcaggacct

SEQ ID NO: 131169 - DNA, 1097 bp, Zea Mays
ttgatatatttagaactaactcatttttcgtaaatcggtttcttgaaaattgggtgctcccaacctagttctcagatcccactgaattgacaaaaaccttgacacacaaccactcaaccagtgatgaagtcccagctgagccgagttcattcgccactcgcgccgccgccgtacggtctccacgcgtcaacgaaatgccgcagctctggaggcagccgcgccctccacgcggccgccgtcaccggcggccccgtcatcgccacccagctcccgtccacgtgcagcaccgacaccgcgccctccccgaacgccgcggccatggcccgcagcgtggcgtccttgaccgccgcgccgtcccgcccctcgtcctcggcctccacgcccgcgccgccgcagttcaccatcaccctgcccccgggcgccacgagcgctcccagccgccgccacgtgcccggctcctggagcgccggcagcacgctgccgcgggcgaacaggtcgaccgcggcgccgccgaagccgccgggcggcgcgcgggcctccagcgcgtcgccgacgtgcacggacaggcgcgccgcgtggcgcctctccaggtccgcgaggccgaagaagtcgcgcgccacggcgaccacggcggggtccagctcccagccgtgcacggagatgtccgggtagaagtgcagcagcgcgcgggcggcggcgccggcgccgaagccgagcaccgcgagcgacggccgcgggaggagcggcggcagggtggcgaaggcgtcgaggtaggtgccggtgagcgggggccggtcgccgcggcgcgggaaggtgagggagtggatgttgcccgggccgtccaggagcaggaggcgggcgccggccagcgggtggcccgcggcccgcggggagacgtcggccacgcggatgtggttgtatggggaccggatgtccgccaccagctggagctcgtcggggagagggtggacactgggggaccttgcggcggcggcggctgcagaggcgttggtgcgcttggggcagaggcggaagccgttcggcagtggattaggcttgagcgccagcagcgccatcctcgtcacggcgatttgttt

SEQ ID NO: 131170 - DNA, 2792 bp, Zea Mays
gagaggagtggtgagatttgggaagctgcggctcgacattgcgtcctgtgctttgcttgccgcgtcgtggatcgtcgtcgcatgcggagccagccaagctggacacggtgacggagatagaggccgacatggacggcgtgctccagcgattcgacgtcgacctcctcctcgacggccacggccacggcgacgacagcttatgtgaggagcggcgctctagctcctcgatccggctttcggatcgctggttgctcatggctgtttcggtgggtggatccgtgtgtgtgcgtgcaggtgggagcgagcggaggagcgcgagcggcggcggcgcgcaggacaaggcgggcatcgacggcgcggtgaaggagcggatcgcgcgggcgctgaggatctacaaggacgcggcggggctcgacggcggggcgctggtgcaggtgtgggcgccggcgcgggacgggggccggcgcgtgctggccacccggggccagcccttcgtgctgccgccgccgcggtgccaccgcctgttccagtaccggacggtgtcgctcgcgcacgccttccccgtcggcggcgctgccgtgcccggggagcggggcctgccggggcgggtgttcgacgccggggagcccgagtggacgcccaacgtgcagtactacggcaccggcgagtacgcgcgcatcagctacgcgctcatctacgacatccaggccgcgctcgcgctgcccatccttgaccccgccacgggggcttgcctcgccgtgctcgagctcgtcaccacctcgcccaggctccacttcgccgccgacgtcgacaggctctccgaggcgcttcaggctgtggcgttgaggggctccgagatctgccgccgcccagcacccgaggcatgcaacgacgatggggcggcggctcaggtggccatgtcggaggttgcagacatcttgaaccaagtaggcgaggctcacaagctgccactagcgcaggcctggaccaggtgcaggcgctgcagcaccgacacggagcacgcctccctgacggctgccggcgcaccgttctacctcaccggcgcggacccaaacccaaacctgctcggcttccacgaggcctgcgtggagcaccacctgcggctacggtccggccggggcgggctcgtggaggaagcggccgcggcgcggcggcccctcttctgcgccgacgtcaccaagtactccatggacgcgtacccgctggcgcaccacgcgcggttctgcgaactgtccggctgcctcgccgtgtgcgcgcggctgcgccgcggcggcgacgagtccatggacacggacggcggcggcggcgccggctgggacgagtgcgtgctggagttcttcctcccgccggactgcagggacggcgcggcgcagaaggcggcagcgggcgccgtcgcggctaccatcatggagcggtctggcggtggcggtctgaaggcggtcgtgataagtgggttgcaggatttggtgtttgacatcgccgcagatggcgagtgcgtgcttcggcctgatcctgtggccatggctgatgatgttcctcagcttgagctgaacggtcatggaggagacgagtgggactcggatgaggagggtctgcatctggtggtagctatgggtaccaccactacagacattgaagcatccaagatgcaccatgacgaacaccatggtggcgaggatccgagatcacaagttggcaagaaggcggcgaaaaggaaaggcgagaaaactgtcagtttggaggaactgcagcgctacttctctggaagcctgaaagatgcggccaagagtctcggtgtttgtccgacaacgatgaagcgcatctgcaggcagcacggcatctccaggtggccgttccgcaagctcgccaaggcgaaccgctccctggacaagatcaagcgcgtcttcgagtcggtgcaaggctcatcacaggccatggccgccgctcctgctcctccacctgccgccgccgctgcttcctattctcagcaagctccagccgtggccgctgctccccgcgcacctgctttatcaccatgcctatcgagtgctccgagagtggcctcctcccaagcctcatgccaagcgccgccgccgcctctgaaggaggccgcatggcacaagcctttgcgcggcggggacgccagcgtggtcactgtcaaggcgagctacagaggggacatcgtcaggttcagggtgccgagctccgcaggcgtcgcgacggtgaagggggaggtggccatgaggctggggctggcgcccggcgagttcgacgtcaagtacctggacgatgacaacgagtgggtgctcttgtcttgcgacgccgacttccaggagtgcctcgacgtcatcccggcgttgtcaggcgcgtcagcgtcgtctggctccgggacggctcagccggtggtcaggctaatggtgcacgaggtagctgaggtccatgggagctcctgtggcagctcagattagtcacaggaaatagagctgcagagctcaaccgatgtttggtacaaccatctgtagaagctttcactactggcatgtgtctgtctctagtttctctacatgtatccatgtccaaaaactgaagtcataaatacttacaaatagaaataggagcatctcacactttttgttgtctcagacagtacagatctggtctagtctagggcacagaaaagaacaaatcattgtgatctagcactggtattcgctccatttttaagtatatgacgttcaggataggttaatttattcgtcatatatttaaat

SEQ ID NO: 131171 - DNA, 159 bp, Zea Mays
ttgtttgggccacccttcaatacggattatttgatcataataataagccatccatgcttctactctaagagcacaaaacctaacacggaagaagaaacagtggccaccaaatcagctagttccacgaccacaattgtagatatttagctgcccaaaata

SEQ ID NO: 131172 - DNA, 1234 bp, Zea Mays
agtacgtgacaataggagaatggatggaggtcttgccatgcaaatttctaagcaactgtatatacgctttctttgtagaaaggcgtatctatttgagtcgcttccgagcagacgtcctccttggataaggggataggcgcgaggaagagcggcctatccgcatccgcataaatcccagtcaaattgaacgagagcgccactcccctctgctaatcccagtcaaatcgaagcaagcatggccatggcggccgtgggcgtgggcggcgcagtggcgttcctcctcccgcagcgccgccagggcgccgtcccctggagcggcgggcggcggcgggcgcccgtggcggtgcgcgcgtcgtacgaggccggggtgggcgtgatggcgaccaaggtggggatgatgacctacttcgatccggagacggggaagccggtgccggtgaccgtggtcgggttccgggagggcggcaacgtggtgacgcaggtgaagacggccgccacggacgggtacgacgccgtccaggtcgggtaccacggcgtgcgcgaggacaagctcacccgcccggagctgggccacctgggcaaggccggcgccccgccgctgcgccacctgcaggagttccggctcaccgccgtcgacgccttcgagcccggccagcccctcgacttcgccgacctcttcaaggagggcgacctcatcgacgtctccggcaactccatcggcaaggggttccaaggtggcatcaagaggcacaacttcaagcgcgggctgatgacgcacggttccaagagccaccggcagctgggttccatcggagccgggacgacgccgggccgcgtgtacaaggggaagaagatgcccgggaggatgggaggaaccaagaccaagatcaggaagctcaagatcgtcaagatcgacaacaacctccgggtgctcatgatcaagggggccgtgccagggaagcccgggaacctcctccgcataacgccggccaagatcgtcggcaagaacatccccaagaactagacttcttttttcaggggggtgaatgttgagtgtttgtgtttgttaccctgctacaaactggatgtaatcctttgccaatttccagtttttgaacacatgcaacttcagattagtaaaactataacctgtacaatttggatgcttgggtgagagagtaataggcaggtaatgcaagatgcacttctggttcctgaattccgctaaacaata

SEQ ID NO: 131173 - DNA, 947 bp, Zea Mays
ccagtcaaattgaacgagagcgccactcccctctgctaatcccagtcaaatcgaagcaagcatggccatggcggtgcgcgcgtcgtacgaggccggggtgggcgtgatggcgaccaaggtggggatgatgacctacttcgatccggagacggggaagccggtgccggtgaccgtggtcgggttccgggagggcggcaacgtggtgacgcaggtgaagacggccgccacggacgggtacgacgccgtccaggtcgggtaccacggcgtgcgcgaggacaagctcacccgcccggagctgggccacctgggcaaggccggcgccccgccgctgcgccacctgcaggagttccggctcaccgccgtcgacgccttcgagcccggccagcccctcgacttcgccgacctcttcaaggagggcgacctcatcgacgtctccggcaactccatcggcaaggggttccaaggtggcatcaagaggcacaacttcaagcgcgggctgatgacgcacggttccaagagccaccggcagctgggttccatcggagccgggacgacgccgggccgcgtgtacaaggggaagaagatgcccgggaggatgggaggaaccaagaccaagatcaggaagctcaagatcgtcaagatcgacaacaacctccgggtgctcatgatcaagggggccgtgccagggaagcccgggaacctcctccgcataacgccggccaagatcgtcggcaagaacatccccaagaactagacttcttttttcaggggggtgaatgttgagtgtttgtgtttgttaccctgctacaaactggatgtaatcctttgccaatttccagtttttgaacacatgcaacttcagattagtaaaactataacctgtacaatttggatgcttgggtgagagagtaataggcaggtaatgcaagatgcacttctggttcctg

SEQ ID NO: 131174 - DNA, 1010 bp, Zea Mays
cgacggggtccctcccgggagcgagatccaggcgccgccggcgatcttccgccgcccctgcgcacgcgcggacccaagcatggccatggcggccgtgggcgtgggcggcgcagtggcgttcctcctcccgcagcgccgccagggcgccgtcccctggagcggcgggcggcggcgggcgcccgtggcggtgcgcgcgtcgtacgaggccggggtgggcgtgatggcgaccaaggtggggatgatgacctacttcgatccggagacggggaagccggtgccggtgaccgtggtcgggttccgggagggcggcaacgtggtgacgcaggtgaagacggccgccacggacgggtacgacgccgtccaggtcgggtaccacggcgtgcgcgaggacaagctcacccgcccggagctgggccacctgggcaaggccggcgccccgccgctgcgccacctgcaggagttccggctcaccgccgtcgacgccttcgagcccggccagcccctcgacttcgccgacctcttcaaggagggcgacctcatcgacgtctccggcaactccatcggcaaggggttccaaggtggcatcaagaggcacaacttcaagcgcgggctgatgacgcacggttccaagagccaccggcagctgggttccatcggagccgggacgacgccgggccgcgtgtacaaggggaagaagatgcccgggaggatgggaggaaccaagaccaagatcaggaagctcaagatcgtcaagatcgacaacaacctccgggtgctcatgatcaagggggccgtgccagggaagcccgggaacctcctccgcataacgccggccaagatcgtcggcaagaacatccccaagaactagacttcttttttcaggggggtgaatgttgagtgtttgtgtttgttaccctgctacaaactggatgtaatcctttgccaatttccagtttttgaacacatgcaacttcagattagtaaaactataacctgtacaatttggatgc

SEQ ID NO: 131175 - DNA, 432 bp, Zea Mays
atgcacatgtcacacctcaacttcggggtgccgcccaactcgatgtgcaaggacacggccacgttcccggccgccgcgttcacgctgccggagctctgggcgctgttcctcgtcggctgcttcaagaaccccgacgtcgtggccgccttcaccctgacgccggcgtccaagctctcgtccttgcgcctgcagcagcttagcgtccgcgccaacctatcgctgtccggcgcgctgccgccgcagctggccagcatgcggtcgctccaggtgctcaccgtgttgcagaatgcgctcatccgtggcgcggtcctgaacgacattggcgcgctcgccagcctcgtgcacctcgacctcagctacaactccctcgctgaccatggcagtcattgccccaagcggccttgctcccttccccaacgctggccgccctga

SEQ ID NO: 131176 - DNA, 95 bp, Zea Mays
cttgttggaagaagagccatcatgtggagcgatttacacgtacatcacctgagcattgatatttcccaacattttgatttgacgttgtagtggag

SEQ ID NO: 131177 - DNA, 4120 bp, Zea Mays
atgcgtgtccatcaggccctaagctcatatgagcacggagcatcaatgcaagctaataaaccaccaaaggtcaattggccgcaccacgaaaacgctgtccaaggctactctagcagagacgactttctgagttcaagctttctcttctccttgccgacacagaggccgaaccctgaagctcgtgagaggatgctttcgctaaggtcttctgcctgtaaaattcaaggcccagagcgtcttcaggctccgttgatcgagaaggcctggcgttccctatgcaacactcaggctgcctgcaagagctatttaagacctggtttatctgcaaaagcgagagactgtgatagaggtcatgctcgtacctatggagaaggctcatacaacaccaacaaaatgtctactgtgccaggaaacaggattctttccatggaaagcacaggccaacccagtgaaagagtttctctgcagaacaacagcagccatcaaacagttggcatctgctcctctatgagaagtcaccagaacaaccatgttgtgcaggaagatatgagagcaacaaatcaatacaattttgcaagaacaaacgctgcattacaccaatctatggctgctgataacatgtgctcttatgataaatttgatgccatggatgatgatattctagcgactattgacgtggaccaaatagttatggaacattatcaagcaacaaatgcacccagaggatcagcatcccataacatgtcaactccaccaggaaacaagtgtagcgtcaatggcatggatgaggctaatttaccacgagaactatctgaattatgtaaccatcaatgcaaggtaggttaagtatttattatgtcactatctttgttctatactgaggggctatttccgcatgttatctcattatctactactttctgcagctagctttttgcagagaggcaatgactcatctgcaggagatgaaggatgagctgcttgcagtagccaatgagcttcttgatgatgatggtgaactcaatcctcaacattcacaagaacttcataaaagacggttccatcctttgtcacttatcaatattacttgttacttctgagtaggcacctctgctttgccacagtaatgttgatatgtgctactgttataccttgcagattgcatcttaaaaaactggttcagctacttgaggaccatatgacaaggtcagcccaagatgaggagagacaaatatcacactctatggcatccacaacatctacacagcagcatctgccacctatgaccccaggaagcacttttacaatggatagcaatagattccaatctcaggtttacgttggaaatggacctagggatagtgatttatgctattctcctgccccatattcctgttcagataatttaagcacaccattaaattctgtatggaagagctataccccaaaggttatcgatattaactacactgaaggatctggtgatagaaagtggagtagtacaaatttcccatggactaaggaacttgaggccaagaacagaaataagtttggaaaccattctttccgccccaaccaacgagaaataatcaatgccacaatgagtgggcatgatgtttttgttttgatgccaactggtggtgggaaaagtttgacatatcagcttccagcacttataagttctggcttaacattagtagtttgccctcttgtctcactgatccaagaccagatcatgcacttgtcacaggctaatattcctgcaacttatttgagtggcaacttggactggtctgaacagcaagagataatgaaagatttaatgtcatgccgctacaagttgctatacgtcactccagagaaaatagctaagagtggtgctttatcgagactattggacaatttaaattcacaagggcacctttctagaattgttattgatgaagctcattgtgtaagccagtggggtcatgacttccgtcctgattacaagagcttaggtgttctaaaacaaaacttccccaagacaccagtcctggccttgactgcaacagcaactgctagggttaaggaagatgtcgtgcaagctttagcccttgaaaactgcattgttttcaaacaaagttttaatcgtgcaaatctgaggtactacttaagacccaagacaaagaaatgcgttgaggacattgatttatttatccgcacaaatcattctaaagaatgtggcattatatattgcctttcaagaatggattgtgaaaaagtggcagaaaaactaagggactgtgggcacaaagtatcacactaccatggtagcatggatcctatggatagaacacatatacagaagctttggagcaaggataagatcaacataatctgtgctacagttgcatttgggatgggtatcaataaacctgatgttcgctttgttattcatcattcactgcccaagtcaattgaaggatatcatcaggagtgtggacgtgcgggtagagatgggcaaccttcatcttgtgtgctatattaccagtattctgactatattcgggtccgacatatgattacacaaggagttacggagcaaacaggagcaccacgtgatttatcttcacatgagcaagcactgaagacacataaggacaatctcctgaggatggtcagttactgtgaaaatgacgtggactgcagacgcctacttcaactgatccactttggagagaagtttgacccttcgctttgtgcaagaacatgtgataattgcttgaaagagtcaggatgggtcgaaaaagatgttaccaacattgccaggcaattggttgagctagtcacaaggacagggcactcacattcatctacttacattcttgaagtttacagagggtctatgagccaaaatgtcaagaagcagcgtcatgatgctttagctcttcatggagctgggaggcatctagctaaaggtgaggcagcaaggataatgcgacatttagtaactgaggaaatacttaatgaggatgtgaaaaagagcgatatgtatggatcaatatcatctgtcctcaaggtaaatcatttgaaagctagtggtcttctctctggcaagcacaacatcgtcctgaagtttcctgcttctgacaaggcctccaagatgaggaatcttgatgcctcgttgcttccgcaaaccaacaagaatgttcagcagcaaagtgaagtcgatgtgaagcttgcatcaatgctctatgaagctttacttagccttagagaacagataatggaggagtgtaacgaaggattcaatgcgtatcacatattcaaaacagacacgttgaaggaaatgagtatccgagtaccgagaacaaaagaagagcttttggatataaacggcctcggcaagacaaaggtcaagaagtacggggaccgcttgcttgcaaccatcgaggacttcctcagcaaacacccaaatccaaggagaaacagcggcggaggtggcggcggcaacgagcactccgatgcggcaaagaagcgaaggggctccaccgccatctctgcagcgagttacggcgactatgacttcgacgaacgcacgggccagcagtccaagaagcgcgcggccaagacgcgaactgtctctgcccacggcccccgctgcacggacgccgatctcgatgggcctgaggtggtggaggtggacggcgagctgcgcagcgtccggaagcccgtggcgtatggcaatggcagggttcttcccaagtgggcacccctctaacttattccaggaatttgggtacgtcaagtagagtagagtaccgctagggaataggaatgtaggcttgcacatatgtaatctcccaggttggctcgtgcacatgcagcgatgcagtgatgtcaagggttttctgtgatgcagttgtacattggaactgtggcgtcgaatgtacgtccagctggtacacgcgtcaaggacatacgagaccaggagcaagagttccgttgcttgcttccgtgggcagcatcgcgatcgcagtgtcggccacctgttgcccgaaacatcttggatgcaggtacatcttcgcacgcgtgtaccatcaagcgaccaaacttgaattaacatcatcgccatcat

SEQ ID NO: 131178 - DNA, 1808 bp, Zea Mays
gcgccgtggctagcggtgtggctccgtcagctgctccaggagctccatagttcgctgacatggagcacgctgggctactgtgatgtcagcgtcgtatatctctccatcaacctcgtctaacaccagcgcacgaagcatgtcgagctcgatctccacttcatgcgtgagcgtgtcgccattggagatgtgcgagttcatgtaccaaccacctctcagttcgccgacgtcttcaccaagggccatcccacgccggtgtttgaggagtttcggtccagtctcaacatctatcatggctagagttttgactgcggggggtgttagatgtatttgtgtgtggctgtcattgtattgggccaaggcccacctactctattattaatacatcacccaaccttattgagagagttagggtttcagtcttttccagaatgcaatattatctaagacacatatggatttgcttctctcctcaagttgatagacacatgttttttagaatgctaccttttttaatgaaaagtaggaagtattcctctgatcctataaccctatatattaatatacatgcatataaaagagtgattgtcacagtaagctacatttacattaaaatttgaatctttgtaaggtctactgttggcattggatgtcaagtagtatgatgaaagtttattttgttattatatctaagattgtgcttaaaactggtaggggcatttcacttctaggaaaagaaaaaaaaatcctactttgacctcttttttttatatcctggctggtttaggttatctgagatactgagaccagctagctatcagttagttatacttatgcacattctttgctccataagtattctttatcttcctatgttggcattttcaatttgagttgttgtcacctgaatttcaatacttcatattctataaataccccccccccccccctcaaactaacatatttcaagtatgtttgaacaatgaacagttggtagttctctaaaaaagtttaaggatcttgcaggtttcctgcttctgacaaggcctccaagatgaggaatcttgatgcctcgttgcttccgcaaaccaacaagaatgttcagcagcaaagtgaagtcgatgtgaagcttgcatcaatgctctatgaagctttacttagccttagagaacagataatggaggagtgtaacgaaggattcaatgcgtatcacatattcaaaacagacacgttgaaggaaatgagtatccgagtaccgagaacaaaagaagagcttttggatataaacggcctcggcaagacaaaggtcaagaagtacggggaccgcttgcttgcaaccatcgaggacttcctcagcaaacacccaaatccaaggagaaacagcggcggaggtggcggcggcaacgagcactccgatgcggcaaagaagcgaaggggctccaccgccatctctgcagcgagttacggcgactatgacttcgacgaacgcacgggccagcagtccaagaagcgcgcggccaagacgcgaactgtctctgcccacggcccccgctgcacggacgccgatctcgatgggcctgaggtggtggaggtggacggcgagctgcgcagcgtccggaagcccgtggcgtatggcaatggcagggttcttcccaagtgggcacccctctaacttattccaggaatttgggtacgtcaagtagagtagagtaccgctagggaataggaatgtaggcttgcacatatgtaatctcccaggttggctcgtgcacatgcagcgatgcagtgatgtcaagggttttctgtgatgc

SEQ ID NO: 131179 - DNA, 1894 bp, Zea Mays
atgcgtgtccatcaggccctaagctcatatgagcacggagcatcaatgcaagctaataaaccaccaaaggtcaattggccgcaccacgaaaacgctgtccaaggctactctagcagagacgactttctgagttcaagctttctcttctccttgccgacacagaggccgaaccctgaagctcgtgagaggatgctttcgctaaggtcttctgcctgtaaaattcaaggcccagagcgtcttcaggctccgttgatcgagaaggcctggcgttccctatgcaacactcaggctgcctgcaagagctatttaagacctggtttatctgcaaaagcgagagactgtgatagaggtcatgctcgtacctatggagaaggctcatacaacaccaacaaaatgtctactgtgccaggaaacaggattctttccatggaaagcacaggccaacccagtgaaagagtttctctgcagaacaacagcagccatcaaacagttggcatctgctcctctatgagaagtcaccagaacaaccatgttgtgcaggaagatatgagagcaacaaatcaatacaattttgcaagaacaaacgctgcattacaccaatctatggctgctgataacatgtgctcttatgataaatttgatgccatggatgatgatattctagcgactattgacgtggaccaaatagttatggaacattatcaagcaacaaatgcacccagaggatcagcatcccataacatgtcaactccaccaggaaacaagtgtagcgtcaatggcatggatgaggctaatttaccacgagaactatctgaattatgtaaccatcaatgcaagctagctttttgcagagaggcaatgactcatctgcaggagatgaaggatgagctgcttgcagtagccaatgagcttcttgatgatgatggtgaactcaatcctcaacattcacaagaacttcataaaagacgattgcatcttaaaaaactggttcagctacttgaggaccatatgacaaggtcagcccaagatgaggagagacaaatatcacactctatggcatccacaacatctacacagcagcatctgccacctatgaccccaggaagcacttttacaatggatagcaatagattccaatctcaggtttacgttggaaatggacctagggatagtgatttatgctattctcctgccccatattcctgttcagataatttaagcacaccattaaattctgtatggaagagctataccccaaaggttatcgatattaactacactgaaggatctggtgatagaaagtggagtagtacaaatttcccatggactaaggaacttgaggccaagaacagaaataagtttggaaaccattctttccgccccaaccaacgagaaataatcaatgccacaatgagtgggcatgatgtttttgttttgatgccaactggtggtgggaaaagtttgacatatcagcttccagcacttataagttctggcttaacattagtagtttgccctcttgtctcactgatccaagaccagatcatgcacttgtcacaggctaatattcctgcaacttatttgagtggcaacttggactggtctgaacagcaagagataatgaaagatttaatgtcatgccgctacaagttgctatacgtcactccagagaaaatagctaagagtggtgctttatcgagactattggacaatttaaattcacaagggcacctttctagaattgttattgatgaagctcattgtgtaagccagtggggtcatgacttccgtcctgattacaaggtatttctatctgacaggagacgttcatggttaaattagatgacttcttaatgtaggttttactatctatcagagcttaggtgttctaaaa

SEQ ID NO: 131180 - DNA, 249 bp, Zea Mays
atgtccactggtgtcatcactagttctaaaacgtcccaggatttgtattttaaagtggagtaccttcttgttttctaccctcttgagatcaagcaagagaatgcccttcactatggggaggatgtatatgaagggatgatagttggataccatccacgtaacagtgaccttgagaccattgacaccaatatagagcatgctgagcctgagcacaaagaccttccgagagttttcacagacatcacgtga

SEQ ID NO: 131181 - DNA, 1015 bp, Zea Mays
ttcgttcagctctttagaagagaaacaaagctaatttcagaagtcgaatactacctgactaacctcatttcagcagagatgtttataatagatgttagtgctcactcgccctcaatggaggaaagggagtttcagaaacatatggaatcgacaagactagctactcaagtatctattgcaagcccaagtagctcacaggggcttcccacatctgcaagggcaaatcaggaggaaactgatatggcaggttttagattccctttcatggactcagaaactaaaagcttgactctaggagaagtcaagcagctgcatgatctgtataagcgagttgtcacaagatacacgttgttgtctaaagccttaagaaagttatccatagacgaggatcagctccttaattcagtgcatgatccatgaggtgatgtgaagatgatgtctaggcatgatggtattaatcataagcaggcccttttagttatcgtttagttacatatctgattttattttaaacaggtacggatgagggatatccgtggtcaagtttgatgcttcaggaccaatatcgttgtgtgtcgttgctggtggtatctgaatgggggtaaagatatagagagggatttttttcttcaaatgatgatttatcgttgcgtgtcgatgctggtgttatttgaatgggggtatgcggtcggtgctcgtgcgacacagacccacgattctccttggacgccggccgcatgtccgtcagtgacatgggcttctcttgggatgagccctgtgcgtcgtgggacggctgaaacgtgtaacagagagtctcaagttctatagatcttcacttcccctgcttgttctacatttcacgatcctgactgatatttctttttatcatattagggccgagatgtatatatactggtaagcactcatcacttccattattgtgtttttctttagatgttaggggaaaaatgaagagggcaatttctattcaaagatatgtgcattatattgtata

SEQ ID NO: 131182 - DNA, 106 bp, Zea Mays
ttttttttgtttagcaggcctactaaaacaagcttagtgaacctgggtgaacaacatgcactgattcaaaattttatttgcattcattgcatttagcttgccttga

SEQ ID NO: 131183 - DNA, 2286 bp, Zea Mays
ggaataggagcgggggagtccgaggataggcaactcattgcttctgaatctctctcctcgtcgcgacgagatcctctgcatctctacttccccggggaagtagctgctagcgtgtgggtctgacctctcctcatcccgagttcttcattttcagagttagctgcagtcccagactctcgttctcgttcctggtcttcttcttcctccaccatttgtgcttgtgctgtttcagtggtctgcttgggaaccgaaccaccatgaaccttgcgtgggctctgcattcctttccttccgattcctgctgcctctgtgtctcctccaatccatgtgacgtgaagcagctatgatatatatatattttttccagagtcttgactcttcaggcccagaggctccgcaatgaactttttggaatctattgcggtgaatggacacagagaccgacagcatggaggcgtcatgagcagacagagcatggtcgccgtggagcagctcaccggccctgccagtgccagacccgctcacacgtgcgctgctcagcctcatgctcaccagctgctcagtgctcgatacgatcaccgtggcgcgtgcgcgtctcaagttgaattaccggaccggatctcgccatccaacgcttccacgttctgcacgagcatgtactcgtcgtcgtcgtcgtcgtcggcggcggcggattcctccaagtcgtgccggcgggcaggcgctctgccgttcctgccccatcctcctaaacgtgagcagcagcagcagcagcagtcatccagctctccatcactgctcgtctgtactgacctcggcaacggtggtcaagacgaggctgaagctgaacatccggctgagctcaaggacttcctgaacctctctggagaagcttcatggagaggcggtttccatggagagagcagcggcgtcgctttcagattcggagagcaggtggagtttcagttcttgtctgaacagctcgggatcgccatcaccgaccacgacgagagccctcgactagatgacatatacgacaggccgccgcaaacctcttcttgtccggtactgtcttgctccgaccaagaagaaggtctccagagggcagggtctcctgttaaagctcagccgagttcatctcgagctgcatcatgtaataacaagccaagactgaggtggactctggagctccatgagcttttcgtgaaggctgtcaacaagcttggagggccagaaaaggcaactcctaagggcgtgttgaggcttatgaaggtagaaggcttgaccatctatcatgtgaagagccatttgcagaagtatcgttttgccaagtatcttccggagacaaaagaagacatgaagtcctcttcagaagacaagatatccaaatcagagatgcctggaagcaacgctggcagaaagaagattctcagaagcttacaagtagcagaagctcttcggatgcaaatggaggttcagaaacaacttcatgaacaattagaggtgcaaaggcagctacaagtgcgcatagaagaacatgcaaagtatctgcacaagatattagaacagcagaaggcaaggaattccttatcagctacgacaagttcaatagaaacagagctttctgaatctacaaaggaagagaaacctgagacacaagcggatacttcttcagctcagttgccaaataaaaagaactcagatactgacatggaatgactcataaccaaagaactcattatgtatgaacaactgaacatgttgactcgccaagcactttccttctctaaccttgtagaatacaaacacttctgcctagatgcttctctcttgtatcatcatccctagtgcttgaaagagttctagctagccattgtatatgatttattttcagatgaaaatgctacaaaaaaaggaggaggaccagccattcatctattccatgtgtcactaaatttatttctgcctgtaaatgacgacagctgttcacagaagaaagaatgactttctgatttctacagtttctgcgtgtatcgtaagaacaaaactgttgcctacacaaactggggatctatgtagaacttcctgtgtaattttctgcatacctacagcagtgggtgtgcttgaatggccccttcaggtgaggaatgctgaataggccagccacttctgttttcttcttcagtgaatcgcaggagctcctcttgccctcttcgaagaggtttctttggagaactagaagtatagtcccatcccatcattgaaggtgctagtttcgaagaggctaaa

SEQ ID NO: 131184 - DNA, 831 bp, Zea Mays
gagaaggaaccgtgtaagtagttgactagtggcattgtaacaagcttgacgactaaaagggtcacgaatttgtgacgccccttgtgtcctcagtgttcgtccgtgcgtggagtctgattggggagctgacgaatgctagatctggctggaacttgggaggaaaagaacctcaactcatgggctaatagtaggataaaggatttgctgggctctctaggttcattgaagttccctacagggaatgcatccgttgatgaagtgtccaagtgctcaggcgatgcctttcaggtcactgtccgcaacaagaagagagtaggatataactacgaactaagcttgagatttaaaggtgaatggttagttaaagaagaaaacaagaagatcaaaggacacttagacattcccgagttctcgttcggtgagatcgatgacctggaggtgcaagtaaggttcagtgacgacaagggcctcgcatccgacgacaaggcacggatctgcaaggatctcaagtcctttatggccccgattcaggagaaaatgcgcgtgttcgaagaagagctcaagggtagatagcgagcattagcgagaatcggcagtgctaggtgggcgctgccgtgcccgtgctggaatgatgagtaaaacatgttgacgtcttgtggtgtctccacgttctaaagtcgtcttcggatgactgggactgtctgtgtactgatgctatgcacttccggagatgagtatgtacggttacgaactgcctaaaccgtctcttcgtcctaatcattttcgggatatgatggtagtagagagatttagggcttgtttggttcctaa

SEQ ID NO: 131185 - DNA, 1148 bp, Zea Mays
agcctggaaggttcacgaggttcattgagccgttgagcgtgtaactgccgtgaaggttcccgaagcatctggaacacgtgggcacgccgcacgccactgggcgtgtgcgctgaccctgacggcaccaaaaggagaaagaggaagcgagcccccaggaaagcggtcagaattggagtgcaagcgacgcgtcgagccccatcccgttcccgcgcctcgccgagagatctgcgccgtcgtcggcaccaatccgtacacccgtcagtccgtccgtcgtcggcgccggcgaacgagtagagatggaggagacggcggcagcggcaccggctgagaaggcgtcgtcgtacaggtactgggtgcgggaagccaccggcgacgccgcgccgctccccgtcccgcgcaagctcgaccccgccgccaatgggaacgggaacccgccgcccctcgggtccgtctggaatcaggctggaacttgggaggaaaagaacctcaactcatgggctaatagtaggataaaggatttgctgggctctctaggttcattgaagttccctacagggaatgcatccgttgatgaagtgtccaagtgctcaggcgatgcctttcaggtcactgtccgcaacaagaagagagtaggatataactacgaactaagcttgagatttaaaggtgaatggttagttaaagaagaaaacaagaagatcaaaggacacttagacattcccgagttctcgttcggtgagatcgatgacctggaggtgcaagtaaggttcagtgacgacaagggcctcgcatccgacgacaaggcacggatctgcaaggatctcaagtcctttatggccccgattcaggagaaaatgcgcgtgttcgaagaagagctcaagggtagatagcgagcattagcgagaatcggcagtgctaggtgggcgctgccgtgcccgtgctggaatgatgagtaaaacatgttgacgtcttgtggtgtctccacgttctaaagtcgtcttcggatgactgggactgtctgtgtactgatgctatgcacttccggagatgagtatgtacggttacgaactgcctaaaccgtctcttcgtcctaatcattttcgggatatgatggtagtagagagatttagggcttgtttggttcctaa

SEQ ID NO: 131186 - DNA, 665 bp, Zea Mays
gccttgtgcaagccatttgtttctttgaagtgtctctgtggttctgtactgtgacaatttaacttctgaatataaaccattggttcctttgcaggcctttcaggtcactgtccgcaacaagaagagagtaggatataactacgaactaagcttgagatttaaaggtgaatggttagttaaagaagaaaacaagaagatcaaaggacacttagacattcccgagttctcgttcggtgagatcgatgacctggaggtaaagctgccacactatcatgtaccaccactgtttccaacataatgctggatggcataacatccatggcgaattttgtcatgtgccaccactggtttcaggtgcaagtaaggttcagtgacgacaagggcctcgcatccgacgacaaggcacggatctgcaaggatctcaagtcctttatggccccgattcaggagaaaatgcgcgtgttcgaagaagagctcaagggtagatagcgagcattagcgagaatcggcagtgctaggtgggcgctgccgtgcccgtgctggaatgatgagtaaaacatgttgacgtcttgtggtgtctccacgttctaaagtcgtcttcggatgactgggactgtctgtgtactgatgctatgcacttccggagatgagtatgtacggttacg

SEQ ID NO: 131187 - DNA, 1049 bp, Zea Mays
agcctggaaggttcacgaggttcattgagccgttgagcgtgtaactgccgtgaaggttcccgaagcatctggaacacgtgggcacgccgcacgccactgggcgtgtgcgctgaccctgacggcaccaaaaggagaaagaggaagcgagcccccaggaaagcggtcagaattggagtgcaagcgacgcgtcgagccccatcccgttcccgcgcctcgccgagagatctgcgccgtcgtcggcaccaatccgtacacccgtcagtccgtccgtcgtcggcgccggcgaacgagtagagatggaggagacggcggcagcggcaccggctgagaaggcgtcgtcgtacaggtactgggtgcgggaagccaccggcgacgccgcgccgctccccgtcccgcgcaagctcgaccccgccgccaatgggaacgggaacccgccgcccctcgggtccgtctggaatcaggctggaacttgggaggaaaagaacctcaactcatgggctaatagtaggataaaggatttgctgggctctctaggttcattgaagttccctacagggaatgcatccgttgatgaagtgtccaagtgctcaggcgatgcctttcaggtcactgtccgcaacaagaagagagtaggatataactacgaactaagcttgagatttaaaggtgaatggttagttaaagaagaaaacaagaagatcaaaggacacttagacattcccgagttctcgttcggtgagatcgatgacctggaggtaaagctgccacactatcatgtaccaccactgtttccaacataatgctggatggcataacatccatggcgaattttgtcatgtgccaccactggtttcaggtgcaagtaaggttcagtgacgacaagggcctcgcatccgacgacaaggcacggatctgcaaggatctcaagtcctttatggccccgattcaggagaaaatgcgcgtgttcgaagaagagctcaagggtagatagcgagcattagcgagaatcggcagtgctaggtgggcgctgccgtgcccgtgctggaatg

SEQ ID NO: 131188 - DNA, 2499 bp, Zea Mays
ctgtccccagcccgcctctcaaacccctaatccctagccacaccacgccctcttccctccttccccgttggcttcggcggcgggcggccatcagcaaccagcatcgtacggaggagaagcgctgtttacacccgtctggcagggatgccgctggggcagcgttcgggggacaagagcgactcccgctactgcggggtggaggttctcgacttccccgccggggagggcctccctgccgtcctcaatcactccctcgcctccgccttcgacttcatcctcgcccctctggttgatcccaactaccggccggcgcccggcgccgttctgccagtgtcagcgtcggacctcgtcctcggcccgtcccagtggagcaaccacgtcgtcgggaagatcagcgagtggattgatttggacgcggaggacgagcggctccggctggactccgagctcacgctgaagcaggagatcgcttgggcatctcacgtttcgctgcaggcatgtgttattcctgcccccaggagatctttttgcggcaattatgccagagttgtgaatcaaattttgcaaggcctgaccaatatgaatttgtggcttaggttgcctctggagaagtccgagcctatggatggtgatcttgataaaataaagaacaacaaccacacgagtgaaatagcagactcatgggaattatggaattcattcagattgctatgtgaccatagtagccaactatgcgtggcacttgatatttcgggcacactgccatcaatgaactcattagggcgctggtttggggagcctgtaagggctgctattctgcaaaccaatgcttttcttacaaatgcaagaggatatccttgtttatcaaagcggcatcagaggctgctaactggactttttaatcattctgttcaggcgataatctctgggagatcgaatcacaatgtttttccagcatctgaaggagtgctctcaggcgatgagggcaacgctgaagattcctatgttcgacatgcattagctccgtacctggagtacattgcatacctgtatcagaagatggatccgcttcctgagcaggaacgctttgagattaattacagggattttttgcagtctcctctccagcctctaatggataatttggaagctcagacttacgagacttttgagaaggatgttgtgaagtatactcagtatcgaagagcagttgctaaggccttggttgatagggttgcagatgatgcagtctccacaactaggacggttctgatggttgtgggagcaggccgagggcctctagtacgagcatcattgcaggctgctgaagaaactggtcgcaagttaaaagtatatgctgttgaaaaaaatcctaacgctgttattactcttcatagtttgatcaaattggagggttgggaaagcctggttactgtaatttctagtgacatgcggtgttgggatgcccctgaaaaggcagatattttggtaagtgaattgcttgggtcctttggggacaatgaactatctccggagtgtctggatggtgctcaacgattcttgaagcctgatgggatttccattccttcatcatacaccagcttcatccaaccaataacagcgtcaaaattgcacgacgacatcaaagcacacaaagatattgcacattttgaaacggcatatgttgtgaaactacaccgcatagcgacacttgcacctccacaacaggtttttactttcacccatccaaatttctcaccaaatgccagcaaccaaaggtacaccaagttgcaatttgaaatgctgccagacatgggttcatgccttgtgcacggatttgctggctattttgactctgttctttataaggatgttcatcttggaatcgagccaaacaccgctacaccaaacatgttcagctggttcccgatcttcttcccattgagaaagcccatctacgtgcccgaagggtctcctatagaagtgcacttctggcggtgctgtgcccccacgaaggtgtggtacgagtgggctgtgactacgccgaccccgtcgccgatccacaacagcaatggccggtcctattgggttggtctataataaggcatcaagatcatctttgtgttgtaacagagaggaaaaataacagagatgatatggtttagttctatctgagttgagcagtgtgcttagtgctactggtttctgcctggagagctgatcaaaggatatatgtagcgtgttgttatctgatctgaaagggagtgcttgacccccaacgttgttctactcgattttgctagcgtttcagtaggatttttctagaattgcaaacgttatgctttcgtcagattctgaagcgtctgcatcctttcctttttcatctatgtactgtggctcttgtgtgtgactggaaattcgttaccagtttgctatgctggaacatggaaaagaaaaaaaagagataattataattgtttcattcaggtagcatttttt

SEQ ID NO: 131189 - DNA, 2505 bp, Zea Mays
ctgtccccagcccgcctctcaaacccctaatccctagccacaccacgccctcttccctccttccccgttggcttcggcggcgggcggccatcagcaaccagcatcgtacggaggagaagcgctgtttacacccgtctggcagggatgccgctggggcagcgttcgggggacaagagcgactcccgctactgcggggtggaggttctcgacttccccgccggggagggcctccctgccgtcctcaatcactccctcgcctccgccttcgacttcatcctcgcccctctggttgatcccaactaccggccggcgcccggcgccgttctgccagtgtcagcgtcggacctcgtcctcggcccgtcccagtggagcaaccacgtcgtcgggaagatcagcgagtggattgatttggacgcggaggacgagcggctccggctggactccgagctcacgctgaagcaggagatcgcttgggcatctcacgtttcgctgcaggcatgtgttattcctgcccccaggagatctttttgcggcaattatgccagagttgtgaatcaaattttgcaaggcctgaccaatatgaatttgtggcttaggttgcctctggagaagtccgagcctatggatggtgatcttgataaaataaagaacaacaaccacacgctacagagtgaaatagcagactcatgggaattatggaattcattcagattgctatgtgaccatagtagccaactatgcgtggcacttgatatttcgggcacactgccatcaatgaactcattagggcgctggtttggggagcctgtaagggctgctattctgcaaaccaatgcttttcttacaaatgcaagaggatatccttgtttatcaaagcggcatcagaggctgctaactggactttttaatcattctgttcaggcgataatctctgggagatcgaatcacaatgtttttccagcatctgaaggagtgctctcaggcgatgagggcaacgctgaagattcctatgttcgacatgcattagctccgtacctggagtacattgcatacctgtatcagaagatggatccgcttcctgagcaggaacgctttgagattaattacagggattttttgcagtctcctctccagcctctaatggataatttggaagctcagacttacgagacttttgagaaggatgttgtgaagtatactcagtatcgaagagcagttgctaaggccttggttgatagggttgcagatgatgcagtctccacaactaggacggttctgatggttgtgggagcaggccgagggcctctagtacgagcatcattgcaggctgctgaagaaactggtcgcaagttaaaagtatatgctgttgaaaaaaatcctaacgctgttattactcttcatagtttgatcaaattggagggttgggaaagcctggttactgtaatttctagtgacatgcggtgttgggatgcccctgaaaaggcagatattttggtaagtgaattgcttgggtcctttggggacaatgaactatctccggagtgtctggatggtgctcaacgattcttgaagcctgatgggatttccattccttcatcatacaccagcttcatccaaccaataacagcgtcaaaattgcacgacgacatcaaagcacacaaagatattgcacattttgaaacggcatatgttgtgaaactacaccgcatagcgacacttgcacctccacaacaggtttttactttcacccatccaaatttctcaccaaatgccagcaaccaaaggtacaccaagttgcaatttgaaatgctgccagacatgggttcatgccttgtgcacggatttgctggctattttgactctgttctttataaggatgttcatcttggaatcgagccaaacaccgctacaccaaacatgttcagctggttcccgatcttcttcccattgagaaagcccatctacgtgcccgaagggtctcctatagaagtgcacttctggcggtgctgtgcccccacgaaggtgtggtacgagtgggctgtgactacgccgaccccgtcgccgatccacaacagcaatggccggtcctattgggttggtctataataaggcatcaagatcatctttgtgttgtaacagagaggaaaaataacagagatgatatggtttagttctatctgagttgagcagtgtgcttagtgctactggtttctgcctggagagctgatcaaaggatatatgtagcgtgttgttatctgatctgaaagggagtgcttgacccccaacgttgttctactcgattttgctagcgtttcagtaggatttttctagaattgcaaacgttatgctttcgtcagattctgaagcgtctgcatcctttcctttttcatctatgtactgtggctcttgtgtgtgactggaaattcgttaccagtttgctatgctggaacatggaaaagaaaaaaaagagataattataattgtttcattcaggtagcatttttt

SEQ ID NO: 131190 - DNA, 1456 bp, Zea Mays
ctgtccccagcccgcctctcaaacccctaatccctagccacaccacgccctcttccctccttccccgttggcttcggcggcgggcggccatcagcaaccagcatcgtacggaggagaagcgctgtttacacccgtctggcagggatgccgctggggcagcgttcgggggacaagagcgactcccgctactgcggggtggaggttctcgacttccccgccggggagggcctccctgccgtcctcaatcactccctcgcctccgccttcgacttcatcctcgcccctctggttgatcccaactaccggccggcgcccggcgccgttctgccagtgtcagcgtcggacctcgtcctcggcccgtcccagtggagcaaccacgtcgtcgggaagatcagcgagtggattgatttggacgcggaggacgagcggctccggctggactccgagctcacgctgaagcaggagatcgcttgggcatctcacgtttcgctgcaggcatgtgttattcctgcccccaggagatctttttgcggcaattatgccagagttgtgaatcaaattttgcaaggcctgaccaatatgaatttgtggcttaggttgcctctggagaagtccgagcctatggatggtgatcttgataaaataaagaacaacaaccacacgagtgaaatagcagactcatgggaattatggaattcattcagattgctatgtgaccatagtagccaactatgcgtggcacttgatatttcgggcacactgccatcaatgaactcattagggcgctggtttggggagcctgtaagggctgctattctgcaaaccaatgcttttcttacaaatgcaagaggatatccttgtttatcaaagcggcatcagaggctgctaactggactttttaatcattctgttcaggcgataatctctgggagatcgaatcacaatgtttttccagcatctgaaggagtgctctcaggcgatgagggcaacgctgaagattcctatgttcgacatgcattagctccgtacctggagtacattgcatacctgtatcagaagatggatccgcttcctgagcaggaacgctttgagattaattacagggattttttgcagtctcctctccagcctctaatggataatttggaagctcagacttacgagacttttgagaaggatgttgtgaagtatactcagtatcgaagagcagttgctaaggccttggttgatagggttgcagatgatgcagtctccacaactaggacggttctgatggttgtgggagcaggccgagggcctctagtacgagcatcattgcaggctgctgaagaaactggtcgcaagttaaaagtatatgctgttgaaaaaaatcctaacgctgttattactcttcatagtttgatcaaattggagggttgggaaagcctggaaattcgttaccagtttgctatgctgg

SEQ ID NO: 131191 - DNA, 447 bp, Zea Mays
atggagctcaagccgtggcggcggcggcgcatcggtgagctcgggggcgccacgggcaacgggcaagaagctcagcctcgcgcaccgggacacaggcttgggcacaagctcacccgcatggagcttcctgagatctatacccctgttaggctattcctgcttcctctcctccccctcagcctggaaaccacagcatcgccaagtcgtcatcagcaactccggtctccggcggctggaccctactacacacatgatggcatggcgactggcaaccacagccacgccccccgcgattctactccctccgtccgatctttcagcaagaatctcacctcgctttggatgatggggaatctgctgtctcgtggcagctcttgcacagcgaccggcagtgggggaggaagcagtggggaagggagccaacgcctcacaaacccaaaagcctag

SEQ ID NO: 131192 - DNA, 86 bp, Zea Mays
cgttcacacatgacgtgaatcggctgtttctgttgtacactatagacacgtgccccacagctagcggtgggaaggttctagctgtt

SEQ ID NO: 131193 - DNA, 2266 bp, Zea Mays
tttttttcttgcattcactgtgagtaccaatttagatgcctcatgaaataggaactagcaaattgtagcaggaatctgatttttagattacatggaagacttatgtttcatgtttcctggtttacaaaacagctactaattgtgtgtaccctttgtccagatcataacattgtatgtgactggagcactaaacactgtcttgtcattggaacaccagaaggagatccgccggtatctttataatcaccagaatgaagatggcggctggggcttgcacattgagggtccaagcaccatgttcggctcagcactgacctatgttattttgagattgcttggagagggaccagatagtggagatggagccatggagaaaggtcgaaactggatattagaccatggtggagcaacatatataacatcgtgggggaagttttggctttcggtactaggtgtatttgaatggtctggtaacaacccggtgccaccagaagtatggctactgccatatctcctcccatttcacccagggaggatgtggtgtcattgtcgaatggtgtatttgccaatgtgctacatttatgggaagaggtttgttggccgaatcacaccacttctgttggaattaaggaaggaacttttcaaagacccttacagcaagattgattgggacaaggcccgcaacctatgtgccaaggaagatctgtactacccacacccattcgttcaagatgtgttgtgggccactctccataaattcgttgaaccagttatgatgcattggcctggcagcaaattgagggagaaagctctggaaacagtcatgcaacatgttcattatgaagatgagaacactcgttatatttgcattggtcctgtaaacaaggtattgaatatgcttgcttgctggattgaagatccaaactcggaggccttcaaacttcatatcccacgagtctatgattacttgtggcttgctgaagatggcatgaagatgcagggttataatggcagccaactttgggatacagctttcacagttcaagccattgtggctaccaaccttattgaagagtttggtcctacccttaaactagcacacaactatatcaagaattcacaggttcttgatgactgccctggtgatctgaatgactggtaccgccacacatctaaaggtgcatggccattctcaactgctgatcatggttggcctatatctgattgcactgctgaaggactaaaggcttcattattgttatcaaggatctctcccaaaattgttggtgaaccgatggaagctaatagattttatgatgctgtcagttgtctgatgtcttatatgaatgataatggcggtttcgcgacatatgaactcacaagatcttatccctggttggagctgatcaatcccgctgagacctttggggatattgtgattgattacccgtatgttgaatgtacatcagcagcaattcaggccctgacatcattcaaaaaactataccctgggcaccgcaggaaagaggtggataactgtatcagcaaagcttccaatttcatcgagagtattcagaaaagcgatggttcatggtatggctcttgggccgtctgtttcacatacggcacttggtttggtgtgaagggactaattgctgctggtagaacatttgagaacagtcctgcaattagaaaggcatgcgactttctgttgtcaaaagaacttccttccggtggttggggagaaagctatttgtcatctcaagaccaggtttacaccaatctcaaaggcaaccggcctcatgcggtgaacactagttgggccatgctggcgctgattgatgcgggccaggccgagagagatccaacgcctctacaccgagcagcaaaggttttgatcaacttacaatcagaggacggagaatttcctcagcaagagatcataggagtgttcaacaagaactgcatgataagctactcccagtacaggaacatcttcccgatttgggctctgggtgagtaccggtgtcgagtcttgggggctggcaagccttggcggtgaacgggaggtgtgtgtgtgtgtgtgtcatggatcagcttttgtgagtagccatgtggaagttggaataatgtagctacgttacgttcagggggttgcgttactagtggtcctagtaataatagtgatggtgatagtaatgtactcctcattattacaatctcaaagcggttcatgccattgccatgcacatctcagatccgagtc

SEQ ID NO: 131194 - DNA, 2688 bp, Zea Mays
gctgcgaactccactcaaatcccaaatcaaatcaactccccagcctgaactgtcctccctggactcccctcgccattcatcaacgcccgccacagagggggatcccggcctcccggtgccgggagccaagccaagccacgcaccggccggccgcggcggatcggaaccttccccaccgctcgcccgccgcatttgaggagggcgatgtggcgcctgcggatcgcggaggggggcggggacccctggctacgcacgaagaacgcccacgtcggccgccaggtgtgggagttcgacgccgccgccgaccccgaccccgccgtcgacgccgcgcgccgcgccttcgtcgccaccaggggccacctcaagcacagcgccgacctcctcatgcgcatccagttcgccaaagaaaactcgattgagcttcaccttccaggcatcaagctcggtgagcatgaagatgtgaccgaggaagctgtgttgactacattgaaaagggcaatcagccgtttctctactctccaggcacatgatggacactggcctggggattatggtggtcctatgttccttatgccaggcttgatcataacattgtatgtgactggagcactaaacactgtcttgtcattggaacaccagaaggagatccgccggtatctttataatcaccagaatgaagatggcggctggggcttgcacattgagggtccaagcaccatgttcggctcagcactgacctatgttattttgagattgcttggagagggaccagatagtggagatggagccatggagaaaggtcgaaactggatattagaccatggtggagcaacatatataacatcgtgggggaagttttggctttcggtactaggtgtatttgaatggtctggtaacaacccggtgccaccagaagtatggctactgccatatctcctcccatttcacccagggaggatgtggtgtcattgtcgaatggtgtatttgccaatgtgctacatttatgggaagaggtttgttggccgaatcacaccacttctgttggaattaaggaaggaacttttcaaagacccttacagcaagattgattgggacaaggcccgcaacctatgtgccaaggaagatctgtactacccacacccattcgttcaagatgtgttgtgggccactctccataaattcgttgaaccagttatgatgcattggcctggcagcaaattgagggagaaagctctggaaacagtcatgcaacatgttcattatgaagatgagaacactcgttatatttgcattggtcctgtaaacaaggtattgaatatgcttgcttgctggattgaagatccaaactcggaggccttcaaacttcatatcccacgagtctatgattacttgtggcttgctgaagatggcatgaagatgcagggttataatggcagccaactttgggatacagctttcacagttcaagccattgtggctaccaaccttattgaagagtttggtcctacccttaaactagcacacaactatatcaagaattcacaggttcttgatgactgccctggtgatctgaatgactggtaccgccacacatctaaaggtgcatggccattctcaactgctgatcatggttggcctatatctgattgcactgctgaaggactaaaggcttcattattgttatcaaggatctctcccaaaattgttggtgaaccgatggaagctaatagattttatgatgctgtcagttgtctgatgtcttatatgaatgataatggcggtttcgcgacatatgaactcacaagatcttatccctggttggagctgatcaatcccgctgagacctttggggatattgtgattgattacccgtatgttgaatgtacatcagcagcaattcaggccctgacatcattcaaaaaactataccctgggcaccgcaggaaagaggtggataactgtatcagcaaagcttccaatttcatcgagagtattcagaaaagcgatggttcatggtatggctcttgggccgtctgtttcacatacggcacttggtttggtgtgaagggactaattgctgctggtagaacatttgagaacagtcctgcaattagaaaggcatgcgactttctgttgtcaaaagaacttccttccggtggttggggagaaagctatttgtcatctcaagaccaggtttacaccaatctcaaaggcaaccggcctcatgcggtgaacactagttgggccatgctggcgctgattgatgcgggccaggccgagagagatccaacgcctctacaccgagcagcaaaggttttgatcaacttacaatcagaggacggagaatttcctcagcaagagatcataggagtgttcaacaagaactgcatgataagctactcccagtacaggaacatcttcccgatttgggctctgggtgagtaccggtgtcgagtcttgggggctggcaagccttggcggtgaacgggaggtgtgtgtgtgtgtgtgtcatggatcagcttttgtgagtagccatgtggaagttggaataatgtagctacgttacgttcagggggttgcgttactagtggtcctagtaataatagtgatggtgatagtaatgtactcctcattattacaatctcaaagcggttcatgccattgccatgcacatctcagatccgagtc

SEQ ID NO: 131195 - DNA, 141 bp, Zea Mays
atgacgccaacatactgctctactcgtgccctcgtcgtgccgtcactcgtcgttgtcgacggacctcgtcaccgtgcttgctcgacgtcgtcttcgtacccgtgctggtgcactacgccgtcttggtcactatttttgtga

SEQ ID NO: 131196 - DNA, 4127 bp, Zea Mays
acggcccttggtcttcgtgagctgctgctcgcgttgtcggggaggcgccgccacgccgctcgcctcgcctagcgccgcgtccggattccggagcaacaactcctaggcaggtagtagtagtagcctagtaggttgtgaacgacccggccggccggcggcgcggtgcagcgtccccgctgctccatgcccgagggccaccagtgaagctcccgcgtggccacgcgacgcgaccatgaagcagtccccggccagctctggtgtcacggccgcgcccgtcgtccctgcccccgcgcccgcggccgcctccaccggcgcggcgccgccatgcgaaggggagcggaaggcgccggcgatcaacgccgacctgtggtacgcctgcgcgggcccgctcgtgtctctgccgccggtgggcagcctcgtcgtctacttcccgcagggccacagcgagcaggttgcagcttctatgcaaaaggacatcgatgcacatgtgccaagctacccaaatcttccctcaaagctgatatgtcttcttcacagtgttactttgcacgctgacccggatactgacgaggtgtacgcgcagatgactcttcagccagtgaacacgtatgggaaagaggctttacagctatcggagcttgcactgaaacatgcaaggccacagatggagttcttctgcaagacgcttactgcaagtgatacgagtacacatggaggcttctctgtgcctcgtcgtgctgcggagaagatattacctccactggacttcggtatgcagcctccggctcaagaacttcaagccagggacatacatgacaatgtgtggacatttcgccatatatttcgaggtcagccgaaaagacacttactaaccactgggtggagtctttttgtgggcggcaagagactatttgctggtgattctgtcatttttgttagggacgaaaggcagcaacttctactgggaatcagacgggctagccggcaacccactaatatatcttcttcagtactttcaagtgacagtatgcacataggggtgcttgctgcagcagcccatgctgctgccaacaatagcccatttaccatattttacaatcctagggctagccctactgagtttgttatcccatttgccaaattccagaaggcactgtatagtaaccaaatatctttaggaatgcgattccggatgatgtttgagaccgaggaattagggatgagaaggtacatgggtacaataactgggataactgatctagatcctgtaagatggaaaaactcccagtggcgcaacttacaggttggttgggatgaatctgccgcaggggaaaggagaaacagagtttcaatgtgggagattgaaccaattgctgctcctttcttcatatgcccccagcctttctttggcgtaaagcgccctaggcaaatagatgacgagtcatcagagatggaaaaccttttcaagagggcaatgccttggcttggtgaggagatatgcataaaggacgctcagacccataacaccacaatgcctggtttgagcttggttcaatggatgaacatgaacaggccgcagagctccacattaaatacaggcatacagtcagagtatctgcgatctctaagtaaccctgccatgcaaaaccttggtgcggctgagctcgcaaggcagctatatgtccagaaccatctcctgcaacaaaacagtgtacagcttaatgcttccaagctccctcagcaagtgcaacctataaatgagcttgctaagggatcattgtcttgtaatcaacttgacgtcatcatcaatcaacaagaactgaagcaagaagttggcaatcagcagaggcaacagcagcccgttaaccaagcaattcctttaagtcaggctcaaaccaatcttgtccaggcccaggtaattatccagaatcagatgcaacagcagcagcaacaacagcagcagtctccaactaggtgccagaagggaaccagtgtgcaacagctgcttctttcacagcaacagcaggaccagaattttcagctgcagcaacaacagcagcttttacttcagcaactgcagcagcagaatcagcagcagcagcaacaacagcagaatcagcagcagctaaacaagttgccagctcaacttgtgaatctggctggtcaacaggctcagttgtctgaccaggaacttcagctgcagctattacagaaactacagcagcagtcacttgtatcacagccaacagttacactctcgccgttacaggtaatacaggaacaacagaagttacttttggacatgcagcagctatcaagctctcattcacttgcccagcagcggatcctgcctcaacaagatagcgatgtttcgctgcaagcatcacaggcgccaccaccaatgaagcaagaacagcagaagccttcacagaaacaatttgtgcttgcagatgtgtcagatgttgtctatccacagatttcatcaaccaacgttttgtccaaagctggaacccaactgatgactccaggtgctacacaatctgtactaacggaggaaattccttcttgctcaacatcaccttctacagccaccggaaatcatttggcatacccaatcattggcaggaacgagcattgcaaggtcaccattgagaaagttcctcaatcgtcttctctgatgtcaattccaacagctggtgaagctgtaacaactccaataatggcgaaggaattgtcaaagttgaaccataatctgaaggagaatgtaaccacatcaaagtcacccattgttgggactggacatgagaatcttttgaacattgtaccgtcaacagacaacctggaaacagcttcatcagcaacttctttatggcctacccaaacagatggacttttgcatcaaggttttcctactaacttcaatcaacaacaaatgttcaaagatgcacttccagatgtggaaattcaagaagtggatccgactaacaatgccttctttgggatcaacagtgatggtccattgggctttcctatggaaaccgaaggcttgttggtaagtgcaattaatcctgtgaagtgtcagcctaatttgtcaactgacgttgagatcaattaccgaatacaaaaggatgcccaacaagagatctcaacctccatggtttcacagtcattcggtcagtctgatatagcttttaactcaattgattctgcaatcaacgatggtgtcatgttgaatagaaattcttgcccccctgcacctccgcagagaatgcggacattcacaaaggtctacaagcgtggagctgtaggccgatccattgacataggcaggttctccggatatgaagaattgaagcatgctgtggcccgcatgtttggtatagagggccaacttgaggaccgacagagaataggatggaagttagtctacacggatcatgaggatgacgtcctacttcttggtgacgacccatgggaggagtttgtgaattgtgtgaagtgcattaggatcctatccccccaagaagtgcagcagatgagcttagatggtgatttggggaacaatgtcctctccaaccaggcttgcagcagctcagatggtgggaatgcctggaagcctcgccgcgaccagaaccctggtaacccttccatcgggttctacgaccaatttgagtgacctgatcacggaaattcgagatgagaattatagctgcaaaaagcaaccagtgtccagccatctacagaattatcgccacggaaagggtaagcagatgcaggatgccgtagacgtcttggcttttatagttgggagaggaaatgctcctcagattagggtatgttctagatatatgtgtagttttctttgttttgaaacaatgtaggcaagaagaatgaaacttacctagagctgttgctgagtcgaaacatcagacagatggttaggcaaaacctgaacttcagacagagtaggcagatctgaagataaagtattttgattgagagtattttgtaattctgtattgaactgccgctggggtttgcttgagacccatgcggcactatatgagtctctctcagttcagaaaatactgaagcagatctaagaggtcctactgattattactata

SEQ ID NO: 131197 - DNA, 219 bp, Zea Mays
ttatatcgctgcactgttccttgtcttctttaccgtcgagtttgataacctccacgcgcatacacgacctcgtatattggaagagctatgttcttccattcatgctgttgaagtcggcatcatgataaatacaattgtaatccgcacatatgtataaaacggtgagttaaacggtggaagttgaaattctgtgtcatggggtgtcaaataaaaaaaatc

SEQ ID NO: 131198 - DNA, 122 bp, Zea Mays
ccgtttgtcgtaagtgtaaatagagccaataaaaatttcaacttacttttatatacatatgtagttaaatactgcaaagtagtcttctctaaaataataataacaataataaataatatatt

SEQ ID NO: 131199 - DNA, 1967 bp, Zea Mays
gcatgtgctggggtcgtctttgtgacgcctgatgatggaatcattccatactccttcacattaacctcagcggtttcgaataatgccgccgaatatgaggctctcatcattggtctcgaaatagcccttagtatgggtataagcacactccatgtctacggagattctcaattaatagttaatcaattattgggagtatatactattaaaaaacaaggtattataccatattttagaaaagtaaaaacgcttatatccatgtttgctgatttaaaagttcagcatgttgtacggaataaaaatgaaaaggcagatgcactagccagtctagctgctagcatgtcactaaatccatatgacacaatggatgtacatgtggaggaacgtagagtccttcctaatgggaagaggaagaagacatatcatccatcgttgcaacaaatatagaaacttgtgagattgaaatgggggattggcgaacaccattcctcgaatatttactccatggatacttgcccctcaattcaagtgagaggtctaggattaggaaaagatcaattaactacacctacataaatgatacgctttatcgacgttcaagtgatggcatgctacttcgttgccttgctggagatgaagtgatagaggccttaaaagaagtccatgctggagtgtgcggagcgcatcaatccggacctaaactacattatcaactcaaacatttaggctattattggcctaccatgttcgatgattgcatgaaattcgcaaaaaggtgccatgagtgtcaaatacatggcaactttatacaccaaccacatgaaccattacatcccactaacatgtcctggccatttgaaatgtgggggatggatgtagttggaccgattcacccaccatcatccaaaggacatagatttattttagccgccactgactatttctccaaatgggcagaagctgtggcattaaaagaggtaaaagctgaaaatgtagaaaatttcataagaactaatctcatatatcgatttggtgtgccaagtagaatgatatctgataatgggtcaaattttaggagtaaacaaatcgagaggatgtgtgccaatttaaaatcaagcatagtttctctactggatataacccgtccgctaatggtcaagcggaaccatttaataaagtgttatgcaaattacttaaaaagatggtatcacataataagaggcactggcatgaaaagttactagagtccttgtgggcgtatagagttacgacgcgaacagcaacagggatgaccccttactcccttgtatatgggggcgaatcagtcttgccattagaagtacaaatcgtctctttacgagttgccattcaagaaaaactcacagaagacgaagcgacaaaattgcgattaaaagaattagacaacttggaggaaaagcggcttcatgcattgcaaaacttggaagcataccaagctaggatgtctcgagcttttgataagcgattaaaaagaagatcgtttaaacagggcgagctggtgcttgcaatcatccgtcccatgaatattactcatcggatgaaaggtaaatttgagcctaaatgggaaggcccttatatagtaaaagatgtttattcaagtggtgcgtatcgaattatttccgctgacggtgaatattgccctccgccaataaatggaaaattcttaaaacgctactatgcttaaaaaatattattattattatgctacatcgctcatgagcttaaactgttagcgagaaatgaataaaaaaataataaaaccatcatatgctccaatgctttaagagcttaaactacaagcgccaaaaaacaaaaaaaataaatccaccatacgctccaatgcttcatgagcctaaactataagcaacaaaaaaagtacacatactccatcgcccatgagtttaaactgttagcgagaaataaataat

SEQ ID NO: 131200 - DNA, 667 bp, Zea Mays
gcactgcggcagtactgcaataccaagttaccaacttatcacagttatcagaactgaggcatattacctatccacgaggagcagaaagcatatttgccaatgtatgctggggttggtatgcagccattgcaatctctgtatctctagttccttccatggatctctggttgatgttagcggatccaattatcacatattcatcatccacaatcatgcctttcgagtgcacatacaccatgaatctcctattattccgagcttggtcctgattggatatccaagctgcagcataattgtatttttctggggaaatcagtacctccttcagttttgggcatttctaaagtgtaccggaatcagcagcagaaaacagaacaatagtatgcagtctaacctgtgggttactggttgagaatggtccactagatgtgcaagtagtgtcctcggcttcacggttaccaaggcagaagaaattcagtgatttatggagccctttggtagacttacctgcatgtcccatctctctggatcatcgtcatttgaatagatttcgtcgtcaatagaaataatatcagtttttcaggacatcgtatgcttctggaccgtcgatcttggaatgcaagtcatgccatggctctcttgggccgcgagcatcttcaacctgaga

SEQ ID NO: 131201 - DNA, 781 bp, Zea Mays
atggcgatcgacgacatcggcgtgtcagcacgacgatttccattcgacgaagacgatggcatgacgattcgtttgggctttttgtcgagcactaatgcagggtgctgggatggagcagacgctcgaccacagacgaaagacgacgcgctagctatgaaggctgagcagggaacccagccgagcgcggtaagaacgacaacgggccaagcaaaggagctcgcgtgcgcacagggaagaaccgaagaactcacagccacctgcaagcaaatcgacgccagcgagggagctgggataagggataggggtgcggccaacagagctgggcgagtgcgatctgagatggagcagcggcggccaggcgtcatggcagagggcaggaccgagctcggcgttgggggctggggcaccatgggaacaagcttgaggaggagagggtgtggggagctgccgacggcgcagcaggggcaaggtccaacgagtggcagcggaggaggaccgctagagctcgacgccggtcaagctcgccagagagaggggctgggcgagcgtagcagcaaggcgaggtcgcggtcgggcgagctggagagccatggatgggaggagcagaggccgagctggggccgagaccaggggcgcacgcaccaaagaaggcgagctgcagcggccagcaaaggagctcgcgccggagctccaaatcgacggcgtgagagccgagcagggcgcgaccgtgggagctccagggcgcacggctgaaaaaaaaatcccaggcggatgagggaga

SEQ ID NO: 131202 - DNA, 336 bp, Zea Mays
agatggatgtatccaattgagagatacttacgtactcttaaagcctatgtaaggaacaaagcgcaccctgaaggctcgatagctgagggatatatattagaggagtgcatgacattttgcagtcgcttcttgcaagatgtggaaaccaagcttaatcgtgcagaccgtcatgaagctgttgctgtgaatgaaccaccatctggcctaagcatatttgccaacattgactacactaagaaaggattcactgtcgagtcactttctaggagtgagctgcagcggatgaggcactacatattacaaaattgtgatgaggctactccatggataaagtaa

SEQ ID NO: 131203 - DNA, 687 bp, Zea Mays
atgaagttaagatacataccagttctctatgcaacattttggaaatacgcctatatgagagtttgtaaaaatattccatctgaactgccagatcctacatcttcattttttaacagactgacaagttctctagaacctgttgatttcacaggagaggatcttttggtgattgctgctgatcaaccatttcgcttcccttccacatttacatttgtggtcagagcattctcagttctagatggtattaggaaaggccttgatcctaggtttcatattacagagattgctaagcccttgcacatcttcacatatccaattgtttcaacaattggatatgtgcggtgcagggacaacgagctatgcagcgccgccggcgccaaggtggtggtgacggaccaagcgcggatgtcgaaccgcacagccctggtgctgagcgccgcggcgtacgcggccatagccagcgccggcaaggccgcgcgcctcagggaccggcgcgttgtcgacgtcgagtacaagagggtaccctacgagtacgcgaaggaccgcaacctgtcgatacgcgtggaggagaagatccggccgccaagcaacctgtccatcaggatcctgtaccagggcggccagaccgacatcgtcgccgtcgacgtcgccaccggcgcccgtaagggcgccgcctgttctagttag

SEQ ID NO: 131204 - DNA, 781 bp, Zea Mays
atgaagtagagcatctgaccttcacttgataacatacatacatgttcgggattggtggactgatctgtaggcattagtgggtcatcaacactcccagtagaagtatacaaatcaagttggcggatgatatcacgtatagcaattttgcattttatgatttgtttcctggcacgttgcagttccttctctggctttattttctctcggctgcttgggaaggttccaaagttcaaaagaatgcattgactctacaaggatgtatatagatttgaaaactttctttacaccagcagattacagcagaaagagcagggaatgcacctttgcccattccatccatctccagagaatcagatttgcattggtgggaagcatcaggtctagctggtctttttggtacaggaaccaaccccatagaggtctcattccaacccagtttattttccgaagaatgcatcacgagcagtggtgcttatcacaggggatttagacctaataatgcaatgaaagatgtgttaaaaagggtcaggcagaaagtaagaggctgaacaacaaatttatgatggctgcagtatgtcaaaacaataagggagagagttatcttgcacgaagctatgctgatctgacctactgcagtacttttatttatttctaataggcatggcatctgaagacatatgtccacatcggatggatgtacacagagacagagcacttagatatgtttggtttgggtcaaagtagtatgaggcggaatttgggaccacaccgccaccaaaaa

SEQ ID NO: 131205 - DNA, 1779 bp, Zea Mays
tcccctctcccggtcctccccacccccatccctcctcacggtcacggcacgggactcgcctccccccctcctcttcctcccctcccgcccacggctggaggtgctcacagcgagcggagcggaggcgagggattcggccgcgcgcatggcgacgcctctctgaccgaagctgctccacccactcggccaggcgcgccgtcctctcctctcccctccccttatcctctcgttacaaaatggcgatgatggtggatcctccgaatggaatcgggaaccaaggaaagcattactactcaatgtggcagaccttatttgagatagacaccaaatatgtaccgatcaagcccattggtcgaggagcttatgggatagtttgttcatccattaatcgtgaaacaaatgagaaagtagcaataaagaagatacacaacgttttcgacaaccgtgtggatgcactacggaccttgcgggagctgaaactccttcgccatctccggcatgagaatgtcattgctttgaaggatataatgatgccaatacacaggagaagctttaaggatgtgtacttggtatacgaactcatggatactgatttgcaccagataatcaaatcacctcagggcctttccaatgaccactgccagtattttctttttcagttgctccgaggactcaaatatctccattcagcagaaatactccacagagacctaaaacctggaaacctgctggtgaatgcaaattgtgatctgaagatatgtgattttggtctcgcacgtacaaacagtagcaaaggccagttcatgactgaatacgtcgtcacccgctggtacagagctcctgagctgctcctctgctgcgacaactacggcacatccatagacgtctggtctgttgggtgcatctttgctgagctccttggccgcaagccaatatttccaggaactgaatgcctgaatcaactcaagctcatagtgaacgtcctcggcaccatgagtgaggctgacctagagttcatcgacaacccaaaggctcggagatacatcaagtcccttccctatacccctggtgttcccctcgtaagtatgtacccacatgcgcaccctcttgccattgatctgttgcagaagatgctcatcttcgaccccaccaaaaggatcagtgtcaccgaggctctcgagcacccttacatgtcccctctgtatgatccaagcgcaaatcccccagcccaagtgcccatcgatctggacatagacgaaaacatcagctcagagatgatccgggaaatgatgtggcaggagatgcttcactaccaccctgaagttgccacagcaataagcatgtcatgagagattccacagcccccaggacatcagcgggggctcacctcttctttttttgtctttgataaaagcctactgcgagtagccgattattgcggcacctagctgttatagtacacttaatgtctgcttggaaccaattatggcgcctagctgttgtagtacccttaatgtctgcttggacacttccgcttgtgtaaatacgcgcccaataagagcggcgtatggatagatgctgtcactatggaccattacttgttgtatgcactgtatatctgtggactgttgtggtgttgtattagttcatgaaccatgaagctttgaagtaaaaatcccatgcatgttaagtttgtatgcttccctacctcttcttttgttaactctgttttctccaggagacacatcgtacatttgtaaaaaaaaaaacaagaaaaaa

SEQ ID NO: 131206 - DNA, 122 bp, Zea Mays
atttaaactactactattgtaatatgtattttattatgttaataacttttcaaatgatagtgcttgcaaaaactccatttttattttcttgtggtggagatcttttattaaaaatagaattc

SEQ ID NO: 131207 - DNA, 110 bp, Zea Mays
cttcgattcatcctgcatcaattttttttaaaaggatcagagacacccagatgggtgggccagaggaaagaacaaaccgagccaagaatatacagagaaaagaataaacc

SEQ ID NO: 131208 - DNA, 84 bp, Zea Mays
ggttagaaccgaagaaccgaatcgaagaaccgagaaccgaactagtcggttctggtttctttatcttgctatttcggttctagt

SEQ ID NO: 131209 - DNA, 1544 bp, Zea Mays
acggttatttcgtatcagcaatagcatacgccccacgtccccacgcggccacgccttctttcctctctgcccccaccacgaaactccacgacgacgcgtccgcgcaccaggcaggcacgaccaccaccgtggcaccgtccaccggagccgagcaacgcgaggagttgagccgatggaggtggcgtcgggggatgaggatctggaatcgctgctccagaacttccatcgcgtgtcccaggggtacaaagatgcacttatgcaggtccaggttttaagagtaaattgcagcactgagttcaaaaggcgggaagctcttgaatcacatattacagatcttaagaaagataatgagcggttaagaaggcaatacacagaaactttattcaaggtcaccaaccaggtgaaattccgcgcagaagctcaaagcctgaaggaagagctggacaaggcaaatagtagattgttatccatggaagaggaacacaagagggaaactgagcaacttaagcacagcagtgaaatgaacatcaatgccctggagaacaagctcagccacgcccttgtacagcaagcaagagatgaagctgcaatgaagcaactgaagttggagctgagtgcccataaatctcacatcgacatgttaggtagcaggttggagcaggttactaatgacgtgcattcgcagtataaaaatgagatccaggatttgagggatgtggtttctgttgaacaagaggagaaaaaggacattcacaggaagcttcagaatgtggaaaacgagtgtatgttcgagctgaattggtgaactgaaaaaaaaaagaagatgagtttctgcaaacagcagacgtcatgaaccaattcaaacaggaaaacaaaaacatgattcgtatccccaacatgcttattaagtagcgttccatgggcttgcctttcagttctgaaaagggaacacaaaatatgaaccaccaaccccttgtctgatcttcagaaagtagcaaaattttccttatcagtgcattgcttcttggtggccttaacatgttctctaatgatgcagtgaggatcacgaggatgaagcaggcggagcagcaaagggattctgtctcggtccagcacgtggagacgctgaagcagaaggtcatgaggctccggaaggagaacgagtccctgaagaggaggctggcgagctctgaagtctgaactggagtgcacatgaaaactgcaactgctttccttcacgccgtagttttatctcatactgtaggatgtagaaaaatccactgctccaaaaacacatatcacttccagatgctttaaaactagcaatgataggtatgttttcactgaaagttattatcaccaatcgacacactcataaccttttcatatgaaattatataaagataaactctatgtccaagatatagagttcaaagaactttttagttgacaacattttcatataagacaatttggatgttcgaatattcaatataaagatcacatgcctattaaactatcttgggtaaaaaatataatcaaca

SEQ ID NO: 131210 - DNA, 1269 bp, Zea Mays
acggttatttcgtatcagcaatagcatacgccccacgtccccacgcggccacgccttctttcctctctgcccccaccacgaaactccacgacgacgcgtccgcgcaccaggcaggcacgaccaccaccgtggcaccgtccaccggagccgagcaacgcgaggagttgagccgatggaggtggcgtcgggggatgaggatctggaatcgctgctccagaacttccatcgcgtgtcccaggggtacaaagatgcacttatgcaggtccaggttttaagagtaaattgcagcactgagttcaaaaggcgggaagctcttgaatcacatattacagatcttaagaaagataatgagcggttaagaaggcaatacacagaaactttattcaaggtcaccaaccaggtgaaattccgcgcagaagctcaaagcctgaaggaagagctggacaaggcaaatagtagattgttatccatggaagaggaacacaagagggaaactgagcaacttaagcacagcagtgaaatgaacatcaatgccctggagaacaagctcagccacgcccttgtacagcaagcaagagatgaagctgcaatgaagcaactgaagttggagctgagtgcccataaatctcacatcgacatgttaggtagcaggttggagcaggttactaatgacgtgcattcgcagtataaaaatgagatccaggatttgagggatgtggtttctgttgaacaagaggagaaaaaggacattcacaggaagcttcagaatgtggaaaacgagttgaggatcacgaggatgaagcaggcggagcagcaaagggattctgtctcggtccagcacgtggagacgctgaagcagaaggtcatgaggctccggaaggagaacgagtccctgaagaggaggctggcgagctctgaagtctgaactggagtgcacatgaaaactgcaactgctttccttcacgccgtagttttatctcatactgtaggatgtagaaaaatccactgctccaaaaacacatatcacttccagatgctttaaaactagcaatgataggtatgttttcactgaaagttattatcaccaatcgacacactcataaccttttcatatgaaattatataaagataaactctatgtccaagatatagagttcaaagaactttttagttgacaacattttcatataagacaatttggatgttcgaatattcaatataaagatcacatgcctattaaactatcttgggtaaaaaatataatcaaca

SEQ ID NO: 131211 - DNA, 907 bp, Zea Mays
acggttatttcgtatcagcaatagcatacgccccacgtccccacgcggccacgccttctttcctctctgcccccaccacgaaactccacgacgacgcgtccgcgcaccaggcaggcacgaccaccaccgtggcaccgtccaccggagccgagcaacgcgaggagttgagccgatggaggtggcgtcgggggatgaggatctggaatcgctgctccagaacttccatcgcgtgtcccaggggtacaaagatgcacttatgcaggtccaggttttaagagtaaattgcagcactgagttcaaaaggcgggaagctcttgaatcacatattacagatcttaagaaagataatgagcggttaagaaggcaatacacagaaactttattcaaggtcaccaaccaggtgaaattccgcgcagaagctcaaagcctgaaggaagagctggacaaggcaaatagtagattgttatccatggaagaggaacacaagagggaaactgagcaacttaagcacagcagtgaaatgaacatcaatgccctggagaacaagctcagccacgcccttgtacagcaagcaagagatgaagctgcaatgaagcaactgaagttggagctgagtgcccataaatctcacatcgacatgttaggtagcaggttggagcaggttactaatgacgtgcattcgcagtataaaaatgagatccaggatttgagggatgtggtttctgttgaacaagaggagaaaaaggacattcacaggaagcttcagaatgtggaaaacgagtgtatgttcgagctgaattggtgaactgaaaaaaaaaagaagatgagtttctgcaaacagcagacgtcatgaaccaattcaaacaggaaaacaaaaacatgattcgtatccccaacatgcttatta

SEQ ID NO: 131212 - DNA, 1747 bp, Zea Mays
gtttattttcacttagaaaaatagaaatcacttggtgaaataaggttccaaactagaacttaaaaaaatagagttctaaaactagccctgaccctgattattgaatgaccattgtaccggtaaccatttataatcgtacacccaaaagaatcagacagatacccgttcacccctcgctctcgctgccacttctcccgttcggcctctttttccttccaccaatggaagctctcacagcccgctcctccgtactctcgccgccggggattgccggagacacctcgccctcccttcccctgcccctccgccgagcctccgccgcgtttcttgggcctcgcaggagcccctccgccctcgccatctccacgcgctggctgcgcgctccgcctcgacgcggcggccgcctgctcgcgggggaaggggaagaagtgccccccgaccccgccgatgacgcggctggccgggcggaagattttctagtactcgagaataatgtaactctacgccaaagcaatgacatggataccattaaacatgatgatgctggcacttctggaattggtgggagtaacactggtggctctaggactggcctattcagaacacctatttcaggtggtgtgcacagtgcaactgctgttcatgatttaccaccaccagctttggctgttcgcaacctcatggaacaggcaaggtttgctcatctgtgcactgtaatgtctcggatgcatcaccgccgtgagggatacccattcggttccctagtagattttgcacctgacccatttggccacccgatcttctcattatccccactagctatccacacaagaaatttgttggcagacccaagatgcacccttgttgtacaggttcctggatggagtgggctatcaaatgcacgagtaactatctttggcgatgtcattccgttgcccactgaacaacaggaatgggctcatcagcagtatgtttcaaagcaccagcagtgggcatcccaacagtggggtaacttttactattacagaatgcacacaataagtgacatatatttcattggaggttttggtactgttgcttgggtagatgtgaacgaatatgaggctctgcaacctgacaagattgctatggatggaggggaacaaaatctgaaggaactcaacgcaatgttctcaaagcctctgaaagagcttttgtcaactgatgaaggagaggtagacgatgttgctcttatttcaatggacagcaaaggtatcgatatccgtgtccgacaaggtgcacagttcaacatacagagggtgccctttgaggtggatcacagcgtcgaaacactggatgaagccactgaagcgctcaggaggataatcagcaagtctaggtggcacacaaagagctcagtcataggacgcccttgaaagctgaagctggaggctctatagaacagtttgtacagtgcggcagcagtctctactatggtatgtgccaataagaggaactccgttccagagtttcgtctactgccaagggcctcgtgtttgtgggtgggttgaataaacacgcaatttgagatgacgctgttttgaccatgaatttagattgaacgcacaacggcaaaaaggattttatgtgaagttgtcgatgggttgaaaaagatgtgaccatctctgacggtctgacctgcttcattcatgaggaattgaggataaagcacatttgaacatgcgcatgccattttgtttttaccaaa

SEQ ID NO: 131213 - DNA, 9910 bp, Zea Mays
tcctgtcgattcctccctcttcttcctcctcgtccctcccaaatccccgaacccgagcgcgcgactccctcccgcctcccagatcttccagaacccgctacgattcgggcaatccgccggcccgcgccctagtaggtctccgcgggcgggattggttgatgcctccccgcctcgcgtgaccgctgcccgagggctggaccggagatctccgcatggatcacaggggcggcggcggcggtggcggaaacaagaaccgcaccgatctcctcgctgcagggcggaagaagctgcagcagttccggaagaagaaggggaagcggggtcccggcaataaggccgacgccgatgctgacgcggaggccggggagggggcgcccaaggcggcggaggagtctgtgcccgagccgaaatcgcctgttgggttgaagctcctcgccggggagggcggcggcgggagcactccatttgaggaagcggagaggtctcaggcggagcagtgcaacggtgaggggcctggtaccgcggagtccagctctgtggagagttccaatgcggtgcaagaacaggagacggtgcaagagcaggagacggatgatgtctccgatgcacatcatgtcggtcctagtgagcaggggatttcggagcatcctgaaagccagacagctggtggcagggatctatcacttcaggctaccagtggagacagcattggtgatgataatgtaggacgagctcagctgggtgatgtggatagcatggagctgaatgcttcttctgaaggtaatggagcagatggtgattgcaatcaactaggggaacaccagcaggtggaaatggatgctgttgaaaggccaacaagttccagtttcgaagaattcaccgagttgccaattcattctcaaggcattgaagccgataatatccacggtgaaggggctcaggaaatggtgatggatgtttctgggaggccattagatggagacatacagcatgacatcgagcccacagcttctgctgaaatagatgccgagactgcacttgaagagtcaactgttgcagcttcaattgtgattcctgagagtactgcaagaggtactgagtacgaaagagacactgggtatgaaaccgatggagtagacaaagaggctctcctagaagatccaagcatggtgcatgtaagtgatgaagctgtcactatagatgatttgagtgttcaggccaagccaacagcatcagcggatatgccactttgtgagcagaagggggatccagctttatctagaagtgcggtattgcaaggcattatgccacttcacttcgaggatatacaaaatcatatgttctctgcaactctgtcaagggattttctccagttgcagctagatgaggctgctggcctttattcagattttacacaacagtcttctgacaataccacacagctccgggtactgctaaaagaaactgaagaaagcaaactagcagttgacagagagcttcatcaatgtagacatgagctctccaaggtgaacatagaaaaggggcaacttgaactgaccatggcttccttgaaagaagaaatcaacactagcaacacgaggtgcacatatttggagagtgagctacattcctccaaggagagcacagaacaaatccacagtgaactagctaacagcagattgttactggaagctctgcaaaaagagaacatggagcttactgcaagccttgcttttgagaaagaagccaaaaaagaagttgaagaacagcgggaccatctatcttctgataacaggaagcttttatcggagttgtcaggtcttgagcttagcttagcttctgtgaaagaggaaatggatgctagcagtagcagatgtaatgtttttgagtgtgagctgcgttcctccaatgagaatatgaatcatactttgacagagttggcaaattgccaggctttattggaaacattacagaaagataatttggagctgtctgcaaattctgcctccgaaagagaagcaaaaatgaaactccaagaagacaatttgtatctatgtaatgaaaagggcaagctttcttcaaatttacgtgaactaaatgacaagttggaagtttcgtatgccaagcataagcagcttgagtcacatgtcaaagatacagaaacatactttggacaacttaccgagcagctaattgaggaaaatctgtacacaagtattagcatcgatatttaccaatctacaaccaaagacttagacactaagtacaatattgtgctgggacaattccagaatattatgcgtcaagaacttcatttggactcgtctgaagtcactactgagaatgctgaaagagccattatgacccctagacatgatagccatggtaataatcagtgtttgcttaatctggtaaatgcgaatgactcatgtaactcaactgctttgctgtcgctgaagggccatctagaggtggcaaaaagtgatttgcataaccttgaaaagttgctagagaggatctcctctaggtctgatggacgtgttctggtatcaaaactcattaaatcctttgagtcaaagggaagtgacgatgatactggactgtctgagggggagcatgataatttacaaaagtcaactcgggagatgctatcatgcctaggggagaagtttatagcaatgagctcagatattacaaaaactgaagaatatttggctgaactgtgtaacaaaattgaactttacgtcaagtctactgtgcagcatgatagagatagacaatgtactgttgttcttgaggccaaaatggatgaacttgctggcaagctgagcaactacaaggagacaattgacaatctgcacaatcaggttgctattgtgcagcaggatgcaaacagtaatgctggaaagctcattgatcaagcagaactgttgcagaaggatgcggtagaaaggatttccattcttgagaatgagagaatgtctttatcagatttactcagtgaagtaacaaacaagctcacctctttgggagatgctgtatttcctagtggttccagtgaaattgaaggtctcaatttctgcactttgagctgtgtggaccttgttgctagatcatttcaaagtcttcaggagaaattagaggctgctcaaatagataatgctcagctcaatagttctctggtggagctcaggaaggcaattggtgttgctcaagagaggagtgaacatgcagatggaattgtcaagaaactgtatgattccctacaggaacttctatgtgattcacttggaagttcaaatgaatttggggccagatatagtgttgaggaaccaattgaaagtcaatatggaagactcattgcgcatttaaagaatttgttgcatgaccaccattccgcgctgtcaactaatgctgaacttgagttgagtctgttaagtaaatgtgaagaagttgaggagctcaacatgagatgcagttctctattaaaaaaattggatgaagtttgtattctaaatgaggagcttaagtcagcttcttcaagtaaaaacgtcacactggataaactacacagtagatgccttactgtagcagaaatgttggcttcatgctcagcaaatcattcctcgacagttcagttgatatctgatattggtgaaggatctagcaaggaagatcatattcttaccacccttctcccatgcattgaggcggacgtggcttcatgcatcgagaaatttgaaaatgcagctgaagaaatccgtttgtctaagatatgcttgcaagaaatcagcatatttgaccagatttcatttgaaaaatggtcttaccccttgcccacattgattaaagaggaagttttaccaaagatatgtgatttgcaagacagattcgaccagctcaatgcactaaacattcagctggaaactgaagttgcagtcctcaaggatggcatgaaagagctggatgaagatcttggaacttcgcgatctgagcttcagaaaaaggtttctgaacttgaacagttagatcagaaattttcatctgtgaaggaaaaacttagtattgctgttgcaaaaggtaaaggtttgatagtgcagcgtgacagccttaagcagtctttgctggagaagtctggtgagatcgagaaactcacacaagaactgcagttaaaggaaacattgctgaaagagttggaagccaaactcaaatcctatacagaagcagatcgaattgaagccttggaatcggagctgtcatacataaggaattcagctacagctctaagggattcatttcttctaaaagactctgttcttcagagaattgaagaggtcttagaagaactagatttgccagagcaatttcattctcgagatattgttgaaaaaatagaactgctgtcaaagatggccattggcactcctttcactctacctgatggtgataagggatcctctgttgatgggcattctgagtctggtgtggctatgaatgtcatagacgatgagcagaactcaaattcaaattcagtatctgatgaagtaaagagcaaatatgaggaactgaataggagattctgtgagctggctgaacagaacaatatgctggaacaatctctagtggagaggaacagtcttatacagaaatgggaagaagtccttggccaaattagcatccccccacagttcaggatgttggaagcagaagataagttagcatggttaggaaacagattcttggaggtggaacaggagagagattcattacagttgaagattgagcatcttgaggattcctcagaaatgcttattgctgatctagaagagtcacataaaaggatatctgaactcagtgcagaggtggttgctataaaggctgagaaggatttcttttcacaaagcctagagaaactgagatttgagttccttgggctctctgagaaagttgttcaagatgagtttgttagagataaattgcgaatggatctatctgaactgcgggataagttcgctgaaaaaaccgaggagagcaggcactaccatgaaatggacaccgaggtccacaaactgctgaatttggtgcaaaacacattgcaggatagcactaactctgaaatttcatctggaggcatttctgctgtgttgtgcttgggcaaaatgctgaagaaacttttagatgactatggcactcttctgtacaagtcgactgaaggcaattttgccgagagagacattcagttagaggatatcaagccatctaaggatgcctctaaatcggacactggtgcatacgagaaagagatggaactaaattctttaaataacgagttagatcatgctcacaacaatctggccttagcgcaacaggagtgtgatgaagctgtggagaaggcacaatcactaatgatggaaattgagaccttacatgctcaaataagtaaattgcaggaaagtgatgctgaacaaatgcaaaagaaagagatggaactaaattctttaaataacgagttagatcatgctcgtaacaatctggccttagtggagcaggagcgtgatgaagctgtggagaaggcacaatcactaatgatggaaattgagaccttacatgctcaaataagtaaattgcaggaaagtgatgctgaacagatgcaaaaatatcagtcgcttgtccttgaactagaaagtgtgggtaagcaacgggacaatctacaggagcggttaaatcaggaggagcaaaagtgtgcctcattgagggagaaactaaatgttgctgtcagaaaagggaagggtctagtgcaacacagagacagcttgaagcaaactatggaagagatgaatgtagtgatagagaaacttaaaagtgaaagaaaacagcacatagaatcacttgagaccgagaaatcatcgttaatggatcgattggctgagaatgaaaagagcttgcatgaaacaaaccagtacttgagtggactattaaatgctttaaatagagtggatgttgctcgggaatttgatatggatccaatcaccaaggttgaaaagatggctaaatttttccttgacctacagtcaacagtggcttcatcgcaaaacgaagtgatgaaatcaaaacgagcaacagagctgcttcttgctgagttaaatgaagctcatgaaagggctgacaacctgcaggaggaattggtcaaggcagaagctgcactttctgaatcttctaaacaatacattgttacagaatctgcaagagctgatgctgttcgtcagcttgaacttattatgcatgcacagtcacaaacaaggaggaggcaagcagatcatttgctggagttaaactccaccagcagtcaactaagagaagtctgctttgaactttcacactgtcttgttaatacattcagtaaggatgtggaccttatctgctatgtggtgaacttcatgaggtcttctggtaaattgatggatgacacaaatacgatggacataccgattgcctctaaacatgttttgtccaaccgcacaaacaacaagaaggctcatattccaaatgctcctttggaaattaagacggatgatacggatgacagtcagtttttgcatcatcttgctattgcatgccatgctttatctgattgtgttaaggactgtaatgatctcaaaagaaacattgatgagcatgacttttcagttgaacagaaagcaaccgagctatttgatgttatgtccaccttaaagaataggttcacttctcagcataatgagttggaatctttgagagcaaaatttgttgaactacagtcagagatggaagaaagagacaaggagattatatttgcacaaaggaatatgagcttgctatatgaagcatgcgcaagttcagttgctgagattgaaggaattagtgatatatatcctggtaaacacagctatgctgttgaacattctgcagatgaatgtataaaatcaatcgttgaacagttagttatggctgtaaaaacttctcagaacagtaacgaaggtagcacaaaggagctgaaggctattgttcttgagttgcagcaggagcttcaagctaaagatgtccaaattagcacaatcagttctgatctatcatatcagttaagggtggctgaatcttctgcaaagcagttctcagttgatcttgaagatgcaagaatggagctccaaaatttggagaaacaagttgatgtgttgcagaatcagaagaaggatttagagactcaattaaatgagcttaaaaatatggaatcaatggcaagtgaacaacatggaagaattgagaaattgactgatgaattaagcagaaaagatcaagaaattgaaggtttggtgcaagcactcgatgaagaagaaaaagagcttgaaatcttggagaataaaagccttcagttggagcaaatgctgcaagagaaagaatttgccttgaagacctcagaagtttctaggaccaaagctttggcaaaacttgcaacgactgttgacaaatttgatgagctgcatagcttgtctgagaaccttcttgctgaagtggaaaaccttcagttgcaattgcaagaaagagattctgagatctcatttctgcgaaaagaagttacaaaaagcactaatgaactgctaaccactgaagagagcaacaaaaattattcatctcagctaaatggtttcatgaagtggttagaaagagaactgttgcagttcggcttccattctgagagtgccaatgattatgattacactcaatttcctgtctatatggatatgttggacaaaaaaataggatctctgatagccgaatcagatgatttaagggttacagttcaaagcaaagattctttactacaggttgagagggccaaaattgaggagttgatgcgtaaatcagatggtctagaagcttcattgagccaaaaggattcccagatagggttacttcgccgggacagagcatccaatcagcagagcagatctataaatttgcctggcacttcagagattgagcaaatgaatgacaaagtaagcccagctgcagttgtcactcagattcgaggcgcacgaaaagtcatcaatgaccaagttgctattgatgtagagatggagaaggacaagccttttgatgatgaagatgatgacaaagggtctcaggcgatagattgctcatgaggcaaccgaccttaagactcggcgtcttgatatattggattgcactgcatgctttgcttgctagttttatttgaactctgtaaaggtgagtgatgattttactacacaccaatttaaccttctactgttatggccctgctgtctgtgacaaactatgttgtgcatgttggaacatgacagtcttgcactcatgtttcatctccaactacaatggttgctgcatagcatataaacctgatgataattgataaacatatattggactgattcactgaacattcatcacccatagcgttggtttgatgggaatcaatgttttaggaaatgaaaagctaatggaacgagcacaagtaattctcttaaataaattgtgccaataaaatgattctagcgatctaggaaccgtcttgagaaatgtgcactgttgactgttctgtcatgttttttcttcatgaaattgagttttgtcatgtaaattgacttctcttaatgttatgcagttgtagcgatgttctgggcgagtgactgtacagtactcttgtgtctatagcaagttatctaaacagaagcagattgcactaataccgtgattccttttgaaaatgttaccgaatactttagccgtattggcagctgcgagacatcttcaggatgcatttcacccatcatcctggtgcttgatcctgtctagcttagtttgtgttcaattgatacaaatggtggaagagaactgaaggaagcagcagcaaagaaccccctgtacatacatttttgtttgctctattctttgcttttagaaaaagatgggagggattctacatgctagcgactactgactacactatatggtacaggattacaggtgaggaaagtgacatgtagttttggaagttagggttttgggacatgtagttttggaagttagggttttgggatggtaacaggccaataaaatgagtaccagcgatctaggaaccgtcttgataaatgtgcactgttgactgttctatcatgttttatcttcatgaaatcgagtttttgtcatgttaattgacttctcttaatgttatgcagatgtagccatctcctggcgagtgactgtacagtactctgtgtctatagcaagttatatctaaacagaagcagtttgcactgataccgtgattcctttcgaaaatgttaccgaatacttgagccgtattggcagctgcagaaatcttcatgatgcattttcacccttcatcctggtgcaaatcctgtctagcttagtttgtgttcaattgatacaaatggatggaagagaactgaaggaagcagcagcaaagaaccccctgtacatacatttttgtttgctctattctttgcttttagaaaaaagatggagggcattctacatgctagcgactacttactacactatatgatacaggattacagggaagtgacatgtagttttggaagttagggttttgggatggtagcaggtcatcccctcccttgagttggccccctcaatcccatcatgccttctaatctttttcgtttacatgtataacacagtgattatatcatttattgtaatccacatagtgtgcaatgggggagcttgcacattttattaacgtcaagtgaagcctgagtgctgaaagttcatgtcaggtctgatttggggagtgcgttgagccctggcgtatgctgtgaggcttcagcggttgttttgctactgttgc

SEQ ID NO: 131214 - DNA, 378 bp, Zea Mays
ttcaattgatacaaatggatggaagagaactgaaggaagcagcagcaaagaaccccctgtacatacatttttgtttgctctattctttgcttttagaaaaaagatggagggcattctacatgctagcgactacttactacactatatgatacaggattacagggaagtgacatgtagttttggaagttagggttttgggatggtagcaggtcatcccctcccttgagttggccccctcaatcccatcatgccttctaatctttttcgtttacatgtataacacagtgattatatcatttattgtaatccacatagtgtgcaatgggggagcttgcacattttattaacgtcaagtgaagcctgagtgctgaaagttca

SEQ ID NO: 131215 - DNA, 456 bp, Zea Mays
ttatttggaggcgagcatcttcatgtccgatgttgtgcacatatcttgaatctcctagttcaagatggaatggcaattgctcatggagcattcgataagattcgtgatctggtcagacatatcatatcctcaccctctcgcatacaagcttttaatgagattgctgagaggtctggattgccttcaaaggccagattaattcttgatgttccaaatcgttggaattcgacacacaacatgattatggaggccattgagtacaaagttgtcttgaagagatatgctgaggaacaacttgagccttcaccagatgatgaagagtggacaaattttgaggcgattggagagtttcttggggcatttgaggaagctacaaaagcattctcagcacatagaagtccaacatctcatttgtttttgcataatgtgctatgtatccatcaagctctaagaaat

SEQ ID NO: 131216 - DNA, 429 bp, Zea Mays
atggatttaaggatatctgagggttctggtactagtaccaccttggatgaccaatcggtacaatcgccgaccagaagggcaaaggtttgggagtattttgagcaagagttagttgaggttgatagagtgatgaaggctgtttgcaaatactgtgggacgaagctaacaagtaaaaggaattcaggaacaaatagccttagaaaccttgttgcggatacatgtcctaaaattccagttgaggaccaaaaacgattcattgcaacaatgagaaaaaggccaggagaaggttcatttgtgtttgaccctcgaaagactcgtgagtgcatggttaagtggtgcatcagtgctgaggtcgcattcaacaagtttgatgatcctttctttgccccgtggatggagtcattgcagccattgttcagcggtgttggg

SEQ ID NO: 131217 - DNA, 984 bp, Zea Mays
atggcgtcgtcgcggtccctgccgcggagcgcaagcgagctgcccgacccgccgtcgccgttcagctccaacccggcgcaccacccagtctccattccgaccacgcccgggctctcgtcgtcgtcgtgctcgtcgttcggccgcatgcggtcaccgcccaccgactcgccgccgatcacgcccaccaagcagcagggcggcaagcccaagccgacgccggcggccgccgccgccgcgtactacgcgtcgctgtggtcgcccaggcgcctcatgcagcgctgtgcccgcgccttccgccgcagcaggtcacgcggcggtgtcgttaggacggtcaaggacctcgccgaggaacgggcggcggtgctcgccgccagcagcaaggtctccgacgcggcgtcggcggtgccgccgctgcctcctggtgtcgagaccgccagcagcaacggtgcccgcggcggcagcgtggaggataagcagcggcagcgccacgacgactgccaccccgaggtcgttcccgagaagatcatacgggaggacgcgccgccagttgttgcggagaccgctgccgccaccaccaccacggaggtggaggtggaggtggagtcccccaagaaaggagcggcgccggtgccagagcccatcgtcgttgtcgccgcagtggaggacgtggtggcggacaagttcgtggcggtggtgaaggaggcgatcaagaagccggagatggacgagaaggaggtggcgatgcggagattcctgggcagccgggtgaagacagcgatggagccgcggtcagaggcggagcagccgcggcgccgggaggtggcgcggagcaacgacgtgatcgaggcggcacgcaccaagctgatgcagaagcgccagtgcagcagggtcaaggcgctcgtcggcgccttcgagactgtcatagacacccagaaggacgccgccgccggcaggccacaacacatctaccgcaagtcagcttaa

SEQ ID NO: 131218 - DNA, 738 bp, Zea Mays
ctgtcacatgaaaatctgaatctttcttttcggagatccattgttggaattaagcttgtagaatggctgaccatgatacacttactggctacggttaatctgacttcgatgagggacactttcgtgtggacagctcatagggatgggactttctcaacccgatccatgtattataatttaattagtatccccaattttaatcgtggatgttttctttggaagttgaaattaccccttaatattaagatctttctttggtatctaggtagggggctgatcctaaccaaagacaacttagccaaacgtagatggcaaggaagtctgaagtgcagtttttgtaatcagaacatacaacatcctttctttgattgctacatagctaaaactatttggagaattatttattttactttaaaaatagacccacccgttaatattaatcatattatagaggattgggaatccaacaaatgttgtatgcataaaaagctgcttctttctggcgttgcagctttgtttttgttgatttggctttgccataatgatgtggtgtttaatcataaccatatactttcaattatacaggtgattttcaaaggtacacattggttcagattttggagactcctacagaaggaagaaacacaacagcaaatccttgtcgtgtgtcagtctttggaggtggtggccatggaggtcttcgtgagccacgtgtggcggtctaatacaaggattgac

SEQ ID NO: 131219 - DNA, 1811 bp, Zea Mays
atgagcgacgtgtccgtccgcttcgtggccctggccctggccgccatctcgctcgccgccgccgccgccgccgcgcacgactacggcgatgcgctgcgcaagagcctgctctacttcgaggcgcagcggtcggggcggctgccgtacaaccagcgggtgcggtggcggggccactcggggctgacggacgggctggagcaaggggtggacctggtgggcgggtactacgacgccggagaccacgtgaagttcggcctgcccatggcgttcacggtgacgctgctgtcctggggcgtcctggagtacggcggcggcgtggccggcgcgggggagctggcgcacgcgctgcaggccatcaagtggggcaccgactacttcgtgaaggcgcacacggcgcccgccgagctgtgggcgcaggtcggggacggcgactcggaccactactgctggcagcggcccgaggacatgaccacgtcgcgccgcgcgtacaaggtggacgcggagcacccgggctccgaggtcgccgccgagaccgccgccgccatggccgccgcgtccgccgtgttccgccgcgccggggacgcgcactacgcgcacctgctgctccaccacgcgcagcagctgttcgaattcgccgacacccaccgcggccgctacgacgaaagcgtcgacgtggtcaagagctactacccgtcctccagcggctaccaggacgagctgctgtgggcggcgctctggctgcaccgggccaccggccgccgcgactacctccgctacgccctcgacaacgccgaggcgttcggcggcaccggctgggccgtctccgagttcagctgggacatcaagtacgccggcctccaggtcctcgcatcccagctgctggtggaggccaaggaggagcggctgcggctgagcgcggaggaggtggcggtggtggagcagctgcggtccaacgcggagtactacgtgtgctcgtgcatgaaccggaaccccggcggcgcgaagcacaacgccggacgcaccccggcggggctgctcttcatccggccatggaacaacctgcagtacgtctccggcgccgccttcctcctcaccgtctactcggacgtcctcgcctcgctgggccagcccctacgctgcggctccggcgacgacggtggcgaacccgccgccggcgacgcgggcgacgtgctggctttcgccaagtcccaggccgactacatcctgggcacgaacccgatgcgcaccagctacctggtcggatacggcgcggcgtacccgcggcgggtgcaccaccgcgcggcgtcgagcgcgtcgtaccggcacgaccgggacttcatcggctgcctgcaggggttcgactcgtggtacagcgcgcggcaggagaacccgcacgacctcgtcggcgccgtcgtcggcgggcccaacggcgaggacgtcttcaacgaccaccgcggcgcgtacatgcagactgaggcctgcacgtacaacacggcgcccatggtcggggtcttctccaggctcatgcagctggaggggcagtcgccacgcccggcgccggcgccggcggaggatctttgataggagaggtcgttttccttgaaaggttcccagcgacaagtggtggtgcgaaataaacttttcaaaaaggattaaaaaaagtgatattgatcgtttaggctggatgtatacatgattctttttgttgattcctagatactaccatatttgtttcatgtctttgcacataacaaaagaatcgaaaagaaggatgtaaatttcaaaaatgaactcgatctgttatttggctc

SEQ ID NO: 131220 - DNA, 2892 bp, Zea Mays
tctccccccacccaccccgacccttcctcctcccctcggcctctccggcgggcgggcaattcggccatggatcccccacgcggaggaacagtgattgatcctactaaatgtcgattgatgagtgtggatgaaaagcgagaacttgttcgtgatttatcaaagagcccagaaagcgctcctgacaggctccagtcatggacacggcgggaaattgtagagattctttgttctgatcttggaagggagaggaaatatactggtttatccaagcagagaatgctagattatctcttcagggtggtgtctcgaaaatcatctggtccagtggaacatgtacatgagaaagagaaagggaaagataaagagtcaattcttgagcccaatacaactaaccatcagtcccctgccaaacgaccgagaaagagtgacaatccatcacgattaccgattatcacaaacaactcagcagcatctgatgtaactgggccaactaataatctacgcttctgccaaaatttagcttgcagggctattctcagggacaatttttgcagacgctgttcatgctgcatttgttttagttacgatgataacaaggacccaagcctctggttgtcgtgtagttcagaccaacacttacaaaaggatacctgtggtttctcatgccatcttgaatgtgctctaaaggatgaaagaacgggtattctgcagagtggacaaggcaagaaacttgatggtggctattattgcattcgctgttggaaacagaatgatttgcttgggtgctggaagaaacagctggtgatagcaaaagatgctcgacgattggatgtattgtgtcatcggatttatctcagtcataggatccttgtctccacagagaagtacttggtattgcatgatattgttgatacggcattgaagaaactggaggctgaggtcggtcctttatctggagctccaaatatgggtcgtggaattgtcagtcgacttactgttggtgccgaagttcagaaactttgtgctcaagcagtagatgctgtggaatcattgttctcgggtgtatctcctgctagttcaaaaattcagcggccatgcatgatgcgaccaaactttgtaaagtttgaagctataacccaaacatccgtcatggtatttttggatttggttgattgtcctatgcttgcccaagaggcaacttcttttaatatctggcaccgagtggctgttactgaatcgtacccatcaaatccgactggcataatacttgcgccattgaaaaaattacttgtcacttggctcgcaccggctacaagctatatctttaaggttgtcgcgttcaagaactcaattgagttgggttcatgggaaattagaatgaagacaagctggcaaaaggatgatccaaggggttcaatgccaggtggtaccggactaggacaaaatagtgagagcccaaaggcaaacagtgatggccagtctgatccttcctcagagggtgtggactcaaacaataatactgcagtttatgctgatctaaacaagtctcctgaaagtgattttgagtactgtgaaaatcctgagatccttgattcaaataaagcttctcatcaccccagtgaacgtattaatgacttgcaaaatatacagatggctgcagatggggtaacagaagtcacagagctggaagaagcacctgggctctcagcctcagccttggatgaggaacccaatgcttgtgttcaaacagtgcttctcagggattcaaacccactagaacacaatcagagaactgtggttcctagatcacatgatacatctaatatactggctggacatgagttggtgattgttggacctcgatattctggttctgtgcctcccactgcaccaagaagtgtggaaaacagcaaagacaatggtggaagggcctccaaacccaaaccttgtgacatagttgttcaaaatggctcttcaaagcctgaaagggaaccaggcaattcgtcaaacaaaagagcaacggataaaatggacgactttggccacaaggatagtttctctgaagtgtcctatgaatactgtgtaagggtggtcaggtggctggagtgtgagggctatattgagacaaacttcaggatgaagtttcttacatggtttagcttacgtgccaccctgcaagagagaaagatagttagcgtatatgtggatactcttatcgaggaccctgtcagtctctctggccagctcgtcgacagcttctcggagaggatatatagcaaaaagcggccttccatgccttctggtttctgcatggatctgtggcattaaggaactgcagggtcttaccgttcgctttgtagggagcatattcggcccattcttttgttgcagatcgttgcattgattcttcattggaaatttagctgaagtatttgacttgcacatcttcattgaaactttccttggtgatgacagtaggttatgttatcgtcgggcaacttctttttcccttctgttttttttttcttcatttgctccataataggttacagtgctcccatgttaatcttagagcatcaatgtgctgcattgttcagtcagcttagtgccgtcatgaattttgtggcgtgtagcttgtctgaagaagaggatggttgccaggctggatcaggaatgcgcctgtgggacgaagcaggcttcgtgtggacgctgacgaatccaagctaaccatgtcttgtcggtaaaatggttgtgctgtatcttcggggggatttgcattttcttgctgactctttctgggaatgggaggaatgatgtttaaggtgcagaacgtctgccttaatttaatgttatgttgactcatgctcctttatctgctgcatttgttggttc

SEQ ID NO: 131221 - DNA, 453 bp, Zea Mays
atgcgggggaaggagctcacctccgaactcgtcgcccagatccgggccctccttgccaccaccccgccccgcgaagggcgggagccagaagagcgccgacagcagcacggccaccccgagcacgagtgtcgcaacgcattgcagccgaatcaccctcgccgctcctccttctcttccgcaccagcagcagaagcggtcgcccctgcttcctcctgcgccttcgcctgcgccgccgcccgccccgtccggcgtctgatgcgcctcgccggcgtccttccccatccggcaccgcgatctcacgcatcccggccggccaccgccgacgagcgagaggtgagggggcaccccgccattgcgccgctaagtcgggttagggtcgcgggtcgctcgccgcgtcgtttgcttaaggacgaggcgatggaggtgggcgaggaaggtgagagcaagggagag

SEQ ID NO: 131222 - DNA, 829 bp, Zea Mays
gagttccacagatatttctctccatccgtcgggtgtcgcttcctctcccagttctttctggcttttcctcctctctgctttctcgcttttcctcctctctgcctttctttgctaccgtcggcgtcaggcgtcaggaactccgcttccacacgaatatttcgtctattgtcagcttgctcagtggctccgtttgtttgaagctgcggccgtcagaaaagcttgacaggtttcttgagggtagaaacttatatgaaggtttggactgtcataccatttcgagtatatgccaggagtatgatttggacaagactgatgttctcaagtacagggatcttccgtaaccacatccagattgtttcattgaggcttatacggtaaaaattcttctgctagtgagatcaagattaagggtacaggagttgcatggacccactagaaattggtggccaaagtaccaaacgagttctttgaaacagcttcagtttttcttgttatgtaccaaatcggtctgccactagtgcaatgaccacagaaacaaaaccagggcaggttcccacttcccaccgtgtaaatagagatgcagtcgtcatttttctagctgtcatttttctagctgggttctagtctttggacgacaaatacaagagtagggttgagattgaccatccgtacgtgcttttcttttttttcatggctcccaatctatctttggttgtatttgaatcttgtgctggggtccaatgcgtaatcttctcgttttgtgagggattctaaagctttgatctctgaagtgacttttctgcacaaatgtatgattagctttacatct

SEQ ID NO: 131223 - DNA, 718 bp, Zea Mays
gttgctaccagtcttagggctagtttgagaacccttttttcccaaaagattttcatttttcaaagaaaaattagttcatttttccttgagaaaataggaatcccttaaaaaaatagtgttttcaaactagcccttaatgttttttttcatgaacagaagctgcggccgtcagaaaagcttgacaggtttcttgagggtagaaacttatatgaaggtttggactgtcataccatttcgagtatatgccaggagtatgatttggacaagactgatgttctcaagtacagggatcttccgtaaccacatccagattgtttcattgaggcttatacggtaaaaattcttctgctagtgagatcaagattaagggtacaggagttgcatggacccactagaaattggtggccaaagtaccaaacgagttctttgaaacagcttcagtttttcttgttatgtaccaaatcggtctgccactagtgcaatgaccacagaaacaaaaccagggcaggttcccacttcccaccgtgtaaatagagatgcagtcgtcatttttctagctgtcatttttctagctgggttctagtctttggacgacaaatacaagagtagggttgagattgaccatccgtacgtgcttttcttttttttcatggctcccaatctatctttggttgtatttgaatcttgtgctggggtccaatgcgtaatcttctcgttt

SEQ ID NO: 131224 - DNA, 591 bp, Zea Mays
gagttccacagatatttctctccatccgtcgggtgtcgcttcctctcccagttctttctggcttttcctcctctctgctttctcgcttttcctcctctctgcctttctttgctaccgtcggcgtcaggcgtcaggaactccgcttccacacgaatatttcgtctattgtcagcttgctcagtggctccgtttgtttgaagctgcggccgtcagaaaagcttgacaggtttcttgagggtagaaacttatatgaagggatcttccgtaaccacatccagattgtttcattgaggcttatacggtaaaaattcttctgctagtgagatcaagattaagggtacaggagttgcatggacccactagaaattggtggccaaagtaccaaacgagttctttgaaacagcttcagtttttcttgttatgtaccaaatcggtctgccactagtgcaatgaccacagaaacaaaaccagggcaggttcccacttcccaccgtgtaaatagagatgcagtcgtcatttttctagctgtcatttttctagctgggttctagtctttggacgacaaatacaagagtagggttgagattgacc

SEQ ID NO: 131225 - DNA, 814 bp, Zea Mays
gagttccacagatatttctctccatccgtcgggtgtcgcttcctctcccagttctttctggcttttcctcctctctgctttctcgcttttcctcctctctgcctttctttgctaccgtcggcgtcaggcgtcaggaactccgcttccacacgaatatttcgtctattgtcagcttgctcagtggctccgtttgtttggtgagatgtgttttcccctttatccttcgtcgtgcgtttccattcggtggatatctttttccatattcctttgtggattagatccaggcttctctagtcgagatcctcttgctttttaccgagatgaaaattgggaccgaaaaggcaagtatttttctttgatagctttggcatgtgcagacatataaggaagtgttctacctcattgaactctattttggagattgagactgaaaaggcaattatttctttttggtaaagtctttcgcatgtggacatctggttccaattccaatctattgttttttgtcgtatcctcttgctttggtacatttagatctgcaagtaaatgttttttatttcattgaacttcaataagggcaggttatgttctgtttgtactttattgaacttcattatactattttcttttggtaaagttgttcgcatcaagtgcatattgcattctttttagttttttaacggttttgctgtcatcttattttttggctgtgtttccattcttccaactgtgtttccattcttcctttgtcaactatttcaatttcgttaacaactaatttcctttgggtaaaataatctactcgaagttgaga

SEQ ID NO: 131226 - DNA, 1075 bp, Zea Mays
gaccattttggggcgcacatataagccaccgccgcctcgcatctcctcctccgccccacgcagctgaggcgttgatcctcaccggcgtcgccatcgtaatcgccttggacagcggcaccagaacctctgcctccgcagggtgcttgctggtatcattacaatctggtagttttagtggttgggcttgacttcctactattcagaaacacagtaccgagaagtctttaggtggggtcaaagatggtgtcgctgaagttgcaaaagcgccttgccgcgagctacctcaagtgtgggaaaggcaaggtgtggcttgacccaaatgaagttagtgagatctccatggcaaactcccgccagaatatccggaagttggttaaggatgggtttatcatcaagaagcctcataagatccactctagatcccgtgcaagaagggcacatgacgccaagcaaaagggacgccactcaggatatggtaagcgtaggggtaccagggaggctaggctacccaccaaggttctgtggatgaggaggatgcgtgtgctgaggcgccttctccgcaagtatcgtgaggccaagaagattgacaagcacatgtatcatgacatgtacatgaaggtcaaaggtaacgccttcaagaacaagagggtgcttatggagagtatccacaagtccaaggctgagaaggccagagagaagacactttctgaccagtttgaggccaagcgcgccaagagcaaggcgagccgtgagaggaagatcgctaggagggaggagaggttggcccagggtccacgagaaataacaccacctgtctcatccacagctccagctactggggcaccgaagaaagcaaagaagtgaagtattgaaataaagctgtagctttctagtccagtactgcactttcttttataagctctagtcaaattttggagcgcctgaactgttttgctgttatataacttagtgtattgataaattcgactatcacatctggattattctgctggataatgtccgtgtctttgatgtttgtgttaaattcctattctggatgagcacctggccctaa

SEQ ID NO: 131227 - DNA, 1182 bp, Zea Mays
gaccattttggggcgcacatataagccaccgccgcctcgcatctcctcctccgccccacgcagctgaggcgttgatcctcaccggcgtcgccatcgtaatcgccttggacagcggcaccagaacctctgcctccgcagggtgcttgctggtatcattacaatctggtagttttagtggttgggcttgacttcctactattcagaaacacagtaccgagaagtctttaggtggggtcaaagatggtgtcgctgaagttgcaaaagcgccttgccgcgagctacctcaagtgtgggaaaggcaaggtgtggcttgacccaaatgaagttagtgagatctccatggcaaactcccgccagaatatccggaagttggttaaggatgggtttatcatcaagaagcctcataagatccactctagatcccgtgcaagaagggcacatgacgccaagcaaaagggacgccactcaggatatggtaagcgtaggggtaccagggaggctaggctacccaccaaggttctgtggatgaggaggatgcgtgtgctgaggcgccttctccgcaagtatcgtgaggccaagaagattgacaagcacatgtatcatgacatgtacatgaaggtcaaaggtaacgccttcaagaacaagagggtgcttatggagagtatccacaagtccaaggctgagaaggccagagagaagacactttctgaccagtttgaggccaagcgcgccaagagcaaggcgagccgtgagaggaagatcgctaggagggaggagaggttggcccaggtatgataatgttatgttgatccataccttgcaattcgtttagaatcttgtttaaatgtatgctttgtcgtatagggtccacgagaaataacaccacctgtctcatccacagctccagctactgggtaagcgccttggagctctttgtttcgtttccttggattttatcatgtttttttgttgatgtgtttctctttgtttggccgatgtcacagggcaccgaagaaagcaaagaagtgaagtattgaaataaagctgtagctttctagtccagtactgcactttcttttataagctctagtcaaattttggagcgcctgaactgttttgctgttatataacttagtgtattgataaattcgactatcacatctggattattctgctggataa

SEQ ID NO: 131228 - DNA, 836 bp, Zea Mays
gaccattttggggcgcacatataagccaccgccgcctcgcatctcctcctccgccccacgcagctgaggcgttgatcctcaccggcgtcgccatcgtaatcgccttggacagcggcaccagaacctctgcctccgcagggtgcttgctggtatcattacaatctggtagttttagtggttgggcttgacttcctactattcagaaacacagtaccgagaagtctttaggtggggtcaaagatggtgtcgctgaagttgcaaaagcgccttgccgcgagctacctcaagtgtgggaaaggcaaggtgtggcttgacccaaatgaagttagtgagatctccatggcaaactcccgccagaatatccggaagttggttaaggatgggtttatcatcaagaagcctcataagatccactctagatcccgtgcaagaagggcacatgacgccaagcaaaagggacgccactcaggatatggtatgctgctgcaactcatttatgtcacagttctgaagggtgagtaagctcgtggtaatccgatgcctgtataggtaagcgtaggggtaccagggaggctaggctacccaccaaggttctgtggatgaggaggatgcgtgtgctgaggcgccttctccgcaagtatcgtgaggccaagaagattgacaagcacatgtatcatgacatgtacatgaaggtcaaaggtaacgccttcaagaacaagagggtgcttatggagagtatccacaagtccaaggctgagaaggccagagagaagacactttctgaccagtttgaggccaagcgcgccaagagcaaggcgagccgtgagaggaagatc

SEQ ID NO: 131229 - DNA, 804 bp, Zea Mays
gaccattttggggcgcacatataagccaccgccgcctcgcatctcctcctccgccccacgcagctgaggcgttgatcctcaccggcgtcgccatcgtaatcgccttggacagcggcaccagaacctctgcctccgcagggtgcttgctggtatcattacaatctggtagttttagtggttgggcttgacttcctactattcagaaacacagtaccgagaagtctttaggtggggtcaaagatggtgtcgctgaagttgcaaaagcgccttgccgcgagctacctcaagtgtgggaaaggcaaggtgtggcttgacccaaatgaagttagtgagatctccatggcaaactcccgtaagtattatccactgcttggttctgcctggttcgtaatatgtttgacttctgctctgatttttgctattcttgtttgggtctgtgttcagctgtgatcttgacatcatatgagctgtggcgatctgtttgtagtgttcttggtccatttttctgctgttgagctttatagccgtcaaaatgggtagcacagttcactttatgggcatggtcaaaggtggatactttatgtagtttgaatatgttggatcaaacattattcttaccgccatggtttttaaagcggtaaggcggtccaaggcgttggaccaccgctacgcctaggcggcgcctaggcgttagaccaccgtccggacgcctaggcgacgccttaagaacagagcttaccgccaccatgttatagtgttatttacctgccaccacccttgaagacactattggctgtagctgct

SEQ ID NO: 131230 - DNA, 1227 bp, Zea Mays
gtcggaagcactaagatgtatcaagacttaaagcaacattattggtggacaaagatgaagatcgaaattgcacgctatgtggctaagtgtgacacttgcagacgtgtcaaggccatacacatgaaaactgctggtccattacaatctttgccaatcccaacatggaaatgggaagacataagtatggactttattgtgggactgcccaggacggccaaagggtatgattctatttgggttatcgttgatcgactcataaagattgcccacttcttacctgtcagggtcacatatacagtagccacttatgcagcattatacatcgcccgtattctcagtctgcatggtgttccgaagaccattgtgtcggatcgtggacctcaatttgtagccaagttttgggaagcacttcacaaatccttgggtactaaattactccacagttcagcttatcatcctcaaaccagtgggcagactgagagggtcaatcaaatacttgaagatatgctgcgggcatgtgttctggacttctcacagaaatgggatgaatgtttgcccctagcggagttttcatacaataacagctatcaagaaagtatcaagatggcaccctttgaagctttatatggacgtcggtgtcgaactccgctaaattggtctgaacctagagaaagatacttctttagacttgatatggtgaaagaggtcgaagaaaaggttcagaaaattgttcataatatgaagaaagctcagactcgacaaaagaattatgcagaccgacgacgacaacccttatgttttctggtaggcgattatgtctacttgaaagtttcaccaatgaagggtgtatcgcgtttcggggttaaagggaagcttgcacccaggtacattggtccattcctggtgattgagcaatgtggaccagtggcgtaccgacttcaactacccgaaacattgtctgctgtgcataatgtgttccacgtgtcacaattgaagaagtgtcttcgggttcctgatcgaaccgttgaagtaacggatgttgtccttgaaccggacttgacatactctgagcaccctattcgagtcttggatcaaaaagacagggttacctggagaaaaactctcaagctttataagatacagtggaaccagcatcctgaagatgaggctacatgggaaacccaagactttttagataagaatttcccaggctttttagcctcttgt

SEQ ID NO: 131231 - DNA, 1093 bp, Zea Mays
tctcttgattccatcatcttgagaattacagcaagacaagaggccgtggtcacatacatggtgctgttacagatacactacacagcaggaagcaggaaggtttgcgagaacagaacgaacaggttccctccacggattacatgatcagttattcacactatcacaaataagtattaccgaatcttggcagtggtaaaagagagagagtgggactaaagaagcggtggagagaaaaaatttaagctatcaatttctatggagacatagcacgatagcagcagttttgctgagtgctcgcttcgcgttcgcggctacaggtgcagcagcgtgtcgcagcgccagtccatctcgtcggccgcggggtccggcacgttcaggtcgaacggaagcggggagcaccgcggcggcgcggcggtctcagcgccgacgaggaggagccgcagtagctgcggcagtcctcctcggcggccggggcgcggaggatcccgacgggcgcgccgccgccgctgccgccgctccaggactcgacggtgctgctgtggctagacgtcgcggcgggggcggctggcggcgccaccgtggctgagatggaggcggaggggaagttggtcctggcggcggcgccgcggatggtcctggcggccgcgtcgtaggcgtgggccgcggcctcggccgactcgaaggtgccgagccagatcggggtcttcctggccgggtcccggatctcggccgcgtaccgccccgacgggcgccgcctcaccccgcggtacttcacctccggcccagcgtcccccggcgtcatcgggaccgggaccggcggcggccttgcccgccgcatcccgctcctcctcctcttcctccctccctctctgccctgccttgtcctcctcctcggcgactccgcgtttggcttggcccggccccgccccgccccgccccgagtggcctttcttttcctttcctcccgcagtcccgcccgcggctgctcctgtttggtcggcacggccccgcggaggctgaagcaccggggcccgccacgacccgggcgccgcgtcggtctgttgagtcttgatttccccgaccgcgtcaccac

SEQ ID NO: 131232 - DNA, 573 bp, Zea Mays
atgggagtgggagaaaaattcatacgggcttctgccctgccctgccctgccgtgccgggcgcgcgtgacgctgcactgccgcgtacgttacgtgcaccatgggccaacaattgcatgtgccgcgctttacgcgtggaaaacaggaacaccttgtgcgcgtggctcggcctagtgctgggaattgagtcagaacaggccagtccggctcaagctcggcgtgcttcatgtcaaacaggaggaggactcctcctagcagagaaggaagtgagggattcgttgcatgacctggctccaaaagaatggaaggagaaaattcttgagaacattgaccttgaaattctgtctcaggtacttgggtcaggttcccaggatgcacaatacttggggcagattttggagtattctctggatatggttcgcaagctctctgctgctgcaaaggaggatgagatgaagaaaaaccatgataaattattgagtgaattgtctacgaattctgaagttaacgacgatggcatcaactcatttgtcattgttgttaccaagggccttctttcatcctggaagaaataa

SEQ ID NO: 131233 - DNA, 1034 bp, Zea Mays
ttaatgttgacaaacctgttgcacatctctccaactgtgagactgaagatagctggcccgcttgccttcagtgtccgccggagatcaccatcagtgaaggtcccaatcaaatgatgctcttcatcaaccacaagcagacaaccacaacctttactggtgagctcggtgagttggtccattatcatatctccctccttgcacagaggaagctcattctgtttcttcataacatccttaacctgcaggatgagggtcttgccgatcttgccagcgggatggttggaagcgtactggtccctggagagtcgccttgcctccatgatggcggcgatgacggtgtccccaaacaccatctggatggcggtggaggtgacgggcgcgaggccaaaggggcacacctccccctgcagcggcaggtggacgttgaggtcgcaggccgcggcgagcgggcagtcatcccccgaggccgcggaggtgagcgagacgaggtaggcgcccttggcgcgcgcgcagggcgcgagcgcgagcagctcgtcggaggccccggacttggagaggatcacgaggacgtccccggggaagagcgcgccgatgtcgccgtggagcgcgtcgacgggggcgaggaagccggcccgcgcgaggcccagcgacgccagcgtctgcgcggtcttgcgcgccacgatgcccgacttgccgacgcccgtgaagaagacggcgcccggcgcgtcgagcagcgcctgcgcgaacgccgccgcctgcgccatgtcgaggcggtcgaagaagtggtccaggtgccggcgctgcgcggagaagagcggcgccaggtccgacgccaccaccgtggcgcgcccccgcggccgcggggcgaattccgccgaggccggcgccgggagcgagcccatgggcggcgagggcgtggctcgcgcggggcgttcgaggaattgccgcgtcgagagggcggggcagcggatctggggagacgcgggtacgcagccgaacggtagaagggaaggagcacgaggcgtagagaatgt

SEQ ID NO: 131234 - DNA, 1183 bp, Zea Mays
ccttggcatgctgtcagtccctcccaacctccattccttcctcctttgccaatgcagctctgatctctcctacctgagaatgtcagtgtgagtggccattccatctgcacaacatcctcctccacgcacgcaaaacatacaaaaaggcagaagcggaggagatgaaggcaatggccgggccaaagctgctcgtcgtccacgcgtcgtcgaacaaggccctgaacgggatggcgcccacgtcgccggcgtcgcccggctggtcgcggtgcctgtggctggtggtgttcctggccttgttcacctgcgtgtccctcctgaccgtgctctccacggcgcgcgcctcggccggggcgccggcgtgccaggcggcgtcgctcacggccagcgctgccggcgccacggaggccggcctgccgcggcacgtgttcgacgcgctggtgcagtacgcggcggcggcagggaacttgtcgtcgagcatgccggagccggacgtgcgcgcgatcgcgtcggtgctccggcggcgcgcgccgtgcaacctgctggtgttcgggctgggcgcggagacgccgctgtggcgcgcgctcaaccacggcgggcgcacggtgttcctggacgagaacccgtactacgtggcccacctggagggtaagcacccggggctggaggcctacgacgtggcctacgccacggcggtgcgcgagctccccgacctcctcgacgccgcccgtgccgcgcgcgccgctgagtgccgccccgtccagaacctgctcttctccgagtgccgcctcgccatcaacgacctccccaaccagctctacgacgtcgcctgggacgtcatcctcgtcgacggcccgcgcgggttcatggaggggtcgccggggaggatgtcggcgatctactcggctgcggtgatggcgcggaccaagggcgcggagacggaggtgatggtgcacgactacgagcgggaggtggagcgcgcgtgcggccgggagttcctgtgtgacgagaaccgggtcacggcgaccagcacgccgtcgctcggccacttcctcgttcgcggcggcgccgccgccaaccgggaagccttctgcgggccgcccgccggcgccgcccagaaatcgaaaccgagctaagcgagtcgtagtcgttacttctcaacgaatcaagctgattcatcagaagt

SEQ ID NO: 131235 - DNA, 1104 bp, Zea Mays
tgaaggaaaacgggcgagagactagacaaaccatagaagccgccactcacgcctggaagcatctggaggcgtggcacggcagccgtcgcccgccacaccagcagcgaactgcttcccggtgcccgcggcggcgaagcacaggagagaggcggcgagtgaaaccgatgacgccgccgatggatccgcccgacgtcgagatggagatggagcccgcgccccagcctccggctccgacagcggtcggggaggggtggagcatgctgtcgcgcgcccgcgggctgctcgaggagggcaaaccgtccctcgctctgcaggcggttctcttggccataagatctcaaggcggtgaacaagctctcatgcagacattgaaccgtgcacgtgaactctatgcacagagattgcaggccagtcctagtgttgatgagcttgcctctttgcttgcccaatgtgccatagcagaggctcagtcatcaaatactaaccctccacaagggcctgggtcagaccctgtcaatatgctgaattctgatgaggcctgcattcttgctgagagtggaaggaagcagatcatcctggacgcatttgctgatgggagcagcttcatttgcttgaaatgtggggggctctttagcacatctcgcaaggatgagcacttagcctactggtgcgggactgcatgatcctggttacgtcttgctgtggtatatccatggtcacacctagcaatgaaccgatgatcatgatacccgtgagattttgtataaactttgttctgttccaatccgattactgcttctttactgcggggatgccagaggcacgtctgttaagtcgtagtaaatacatttgccgatgacaaactttatgaacgaaagtttccatctctatccgcttgttgtacttgtgctttcggctgatggaatgtgttgagatgtttggcatggtcatcaaattctaatagttgaatgtgacgaagcaatgttcttgtggttagctctgatctgatcacgcaaatactgaagctgggtagaaagtttggaggaactgatgatatgccccttcgctttcggttttattgagttgaaaactggatttagcagt

SEQ ID NO: 131236 - DNA, 333 bp, Zea Mays
atggctctgctcctcgctctcttactcgtgctactcttggccaccggtggtcaagccgacgccgatgagccggcaacgtcacagcagcgcgctgttccggcggagcaggcgccggcgccgaagggctacgaaaccctgagggaggaaccggcaccaaccggcggtcaccgtcaccgggagatcaagatcggagcatgcttccccatcagcgacggcggcagcagcgctttctcctgctaccagcggtgcacgagcaaaggctacgccggcgggcgctgcgacaccctgcccagcggcttccccggcgactgcttctgcatcacgtacgcttga

SEQ ID NO: 131237 - DNA, 1445 bp, Zea Mays
cggaagcaaaagcaggccagcacaaaaccactcgatagaaaagcccccctcaaaacccacggcgccgccgcagccgcgttcacgaagcttggggaggcgagcaccccgatccggcgaggtgccgcgagcgaggcagcgatgagaggccgtgcgtcccatctccgcgcgctcctctcgcgagcgctctctccaagccttcctcctcctggtcgcgctctgcctcaggtcactaggcccggtgcgtctccgttcggagctggattcgtggggcgcgcgcgcttcttctccatcgacgcctcggctgcgacgcagggcgggtcgaagccccctgcgccgccgccggcgggtactgcgggcggcgagggagggggtggtggtcagtctgggaaatctgaacaagcggacgccgggaaagccgtccgcggagggccggtgtcttggctcagttttctactcctgcttgtgactggaggagggataatcgtgtactacgacaaagaaaagaagcgtcacattgaaggtagattactatgaattgaagaatagaacaagtgctgtgaagcctggacaatcagtaggcactgcagccattggcggtccattcaagcttttgaatcatgatggaaaacctgttactgaaaaggatttcttgggcaaatggacgctgctttattttggatttacacactgtcctgacatttgtccagatgaactccagaaaatggctgcagcgattgacaaaattaaggaaaaggcaaaactggatgttgtgccagtttttattacagttgatcctgaaagagatactgttgagcaggttcgggactatgttaaagagttccatccagatctagtaggcctcacgggcacgacagatgaagtaagacaagttgcacgtgcttatcgagtttactatatgaagacagaggaggagggttctgactaccttgttgatcactcaattgtcatgtacctgatggacccagagatgaagtttgtcaagttttatggcaagaactacgacacagattcccttgctgacggtatcgttaaagaaattaaagagcacaagtaaacagtagttggaatgccactttgcaacgtcagccttgtttctgaatttctcccgagagttttgttaaatcaagcaaaaaccaaatggcacacgagatcatgtggcaatagctgatgacatttgaatctcgcggcggcttttatttcagcagattcgggtgcacatgttgcggttttgtgcacgtttttgtcacggcaaacttctgcgttattagcttgggacgctgttcattgctgaatgtaattttatttgcatagtttcataccagttcaatatgaaacctttttccccttctgctccctctgttttttgaatatttggtttccaataaaataagaacacatcaatttgtggagtttctaaatgaaaa

SEQ ID NO: 131238 - DNA, 1432 bp, Zea Mays
cggaagcaaaagcaggccagcacaaaaccactcgatagaaaagcccccctcaaaacccacggcgccgccgcagccgcgttcacgaagcttggggaggcgagcaccccgatccggcgaggtgccgcgagcgaggcagcgatgagaggccgtgcgtcccatctccgcgcgctcctctcgcgagcgctctctccaagccttcctcctcctggtcgcgctctgcctcaggtcactaggcccggtgcgtctccgttcggagctggattcgtggggcgcgcgcgcttcttctccatcgacgcctcggctgcgacgcagggcgggtcgaagccccctgcgccgccgccggcgggtactgcgggcggcgagggagggggtggtggtcagtctgggaaatctgaacaagcggacgccgggaaagccgtccgcggagggccggtgtcttggctcagttttctactcctgcttgtgactggaggagggataatcgtgtactacgacaaagaaaagaagcgtcacattgaagaattgaagaatagaacaagtgctgtgaagcctggacaatcagtaggcactgcagccattggcggtccattcaagcttttgaatcatgatggaaaacctgttactgaaaaggatttcttgggcaaatggacgctgctttattttggatttacacactgtcctgacatttgtccagatgaactccagaaaatggctgcagcgattgacaaaattaaggaaaaggcaaaactggatgttgtgccagtttttattacagttgatcctgaaagagatactgttgagcaggttcgggactatgttaaagagttccatccagatctagtaggcctcacgggcacgacagatgaagtaagacaagttgcacgtgcttatcgagtttactatatgaagacagaggaggagggttctgactaccttgttgatcactcaattgtcatgtacctgatggacccagagatgaagtttgtcaagttttatggcaagaactacgacacagattcccttgctgacggtatcgttaaagaaattaaagagcacaagtaaacagtagttggaatgccactttgcaacgtcagccttgtttctgaatttctcccgagagttttgttaaatcaagcaaaaaccaaatggcacacgagatcatgtggcaatagctgatgacatttgaatctcgcggcggcttttatttcagcagattcgggtgcacatgttgcggttttgtgcacgtttttgtcacggcaaacttctgcgttattagcttgggacgctgttcattgctgaatgtaattttatttgcatagtttcataccagttcaatatgaaacctttttccccttctgctccctctgttttttgaatatttggtttccaataaaataagaacacatcaatttgtggagtttctaaatgaaaa

SEQ ID NO: 131239 - DNA, 4365 bp, Zea Mays
gacgaaacggtacggtgacggctcacctcgggggtctccatgtccatggacggccctgccacctcgccggcaagcgaggtgccgttccgcatcagcttctccggccacagcggccacctccgcctcgaccctaccccgcacacgcccagccccattccggacttcgtcctgccgccggcatacccggccgagagcccgagcagcgtgaaggagtacctcgagaggaactacctcgaccccgagctgcacctccccaccgcggccgatagcgggagggtgtgggatgtcgactggtttgccctggccaggccgccgctggagccctccgccccccgcaccatgctcgcgcccgtctgggtgccgcctttccggcgcgggcaggagaagttgcaatccgcggcagagtcgcgagtgtgggaccctgagtccgtgcaaatggagatggtcgacgtgttcgattcggggaccggggggatagcgccccggatgcctggtccggcgaaggacttcgtcagggggagcatcaacaacagaccttttcgtccaggcggtctgcaggatgacgccgctgaggcggctgcgctggaaaaggcgttcccagagggtgcaaggactggtgattgggtgcgtgagctcatgagcggtggcccggcgcaggttgcgcctccagggttccgtaagggattggagctgggccagttgaaggggtatgaaagccactggaagtgtttccgggatggagaacttgtagaggagcaacctgcatcatcatcgaatgacacaatggagaagtactctgtgcagtttgatgatcttttcaagatagcgtgggaggaagatactgccaacaagttgttgaaggacggtgttgttcaacaatctgctgaaggtgaaggaatcaatgaaattggcgaacaaaaagttgatgcattgcaggatgagttcgagagtataacaacgctagatgacgagaaacaggaagttgatgtcataagaaatgttcctgaaactcaaacagacttggatcagatgttatcttctgaagtacaggatacaggcagggaaccaggtgcatcaggtgataagaagccaacacaagatggcatggtttgggcacttgttggtggggacgaggacatagtgactaacttctccaaactcgttccagatatggcaatcgagtttccatttgaattggataagttccagaaggaggctatatattatctcgagaagggtgaatcagtctttgttgcagcccatacttcagctggaaagacggttgttgctgagtatgcattcgcattagcaacgaaacattgcactaggtctgtctatactgctcctattaaaactatcagcaaccagaaatacagagatttttctgggaagtttgatgtgggacttctgacaggagatgttagcatcaggccagaggcaacttgcttaattatgactactgagatattgcgttcaatgctctacagaggcgcagacattatacgtgatattgaatgggtaatctttgatgaagtgcattatgtaaatgatgctgaaagaggtgtagtctgggaggaggtcattataatgctcccgaagcacattaacattgttcttctttcggcaacggtcccaaatactgttgaatttgctgactggattggtcggacaaagcagaagaaaattcgtgtcacatcgaccaacaaaaggcctgttccacttgagcattgcctgttctactctggagaagtgtacaaaatatgtgagagggatatgtttcttgctcaaggatttaaagaagcaaaagatgctttcaaaaagaaaaatttgaataagtttggagtgaaacctggttcaaagtcaggaacccctgcagtacgtgctggaactcaaggcaaaaatccagatacatccaacaaggggagagatcaaaagtacccaaagcaccgcaattccaattcaggagtagccacagttcaacagagctcctcagggccaaagagatttgaatctttattttggatgccacttgtgaataaccttctgaagaaatcccttgtgcctgtggtgattttttgtttctcaaagaatcgctgtgataaatcggcagatagtatgtttggcactgatctcaccagtagttcagagaaaagtgaaatacgtgtcttctgtgacaaggcattttcacgtcttaaaggatctgataggaaccttccacaggttgtaggaatacaaagccttctgcgaagaggaattggagtacaccacgctgggcttctccctattgtgaaggaagttgttgagatgctgttttgccgtggtgtaatcaaggtactgttttccactgagacatttgcaatgggtgtcaatgcaccggcaagaacggttgtgtttgattctttaagaaagtttgatggaaaagaacaccggaaattgcttccaggggaatatatacaaatggctgggcgagctggtcggagaggacttgataacattggtactgtgatcattatgtgtcgtgatgaaattcctgaagaaagcgatttgaaaaatttgatcgttggaaaaccaactcgtttggaatctcaatttcgattaacatacaccatgatactacatcttctgcgtgtggaggaactgaaggtcgaggacatgctcaagagaagttttgctgaattccacgcacaaaagaatttgcctgagaaggaaaagcttcttctgcaaatgcttcgtcaacctacaaggacaatagagtgcataaaaggagagccttctattgaggaatactacgagatgactttagatgctgaggcacacagggaatacataacagaagcaattatgcagctgcctaattctcaacagtttcttacgcctgggagattggtggttgttaaatctgattctgatgatgatcacttgcttggtgttatactgaaaaatccatctgcattgctaaagaaatatgttgttctggtattgactggtgattgcagttcatctgcactagcccctgagttcaataaaaatgaaaagggtcctgtggattttcaaggaggacaatttattgtcctgaaaggaaaacgtggcatggacgatgaatatttctcttctgttagttcacgaaaagcttcaggtgtaatcaatatcaatctaccatacaagggggatgcatctggaatgggctttgaagtaagagcaattgagaataaagaaatcattagtatatgcagcagcaaaataaagattgatcaagtcagacttcttgaggagcctaacaaaactgcatactctagaactgtccaacagcttataaaggagcaaccagatggaaccaagtatcctcctgctttagatgcaataaaagatctaaaaatgaaagacatgtatcttgttgaaagttaccgtgcatatcacatactactgcaaaaaatgtctgaaaacaagtgccatggttgtataaaactgaaggagcatatatcattgatgagggagcaaaagatgtacaaggatcagttgaatgaattgaaattccaaatgtccgacgaggcacttcaacaaatgccagagtttcaaggcagaattgatgtactaaaggtaatccactacattgattctgatctagttgtgcaacttaagggtcgggtagcatgtgaaatgaactccggtgaggagttaatatcaacagaatgtctgtttgaaaatcaattggatgacctagaacccgaagaagctgtggctattatgtctgcattcgtcttccaacaacgcaatgcttcagaaccatctcttactccaaaactggctgaagcgaagaagaggctctatgatacagccataaaattagggaagctccaatccgagttcaaggtgcctgtggaccctgaagagtatgcacgtgataatctcaagtttggccttgttgaggtcgtctacgagtgggcaaaggggacgcctttcgcagacatatgcgagctgactgatgtatccgaagggatcattgtaagaacaatcgtccgtctggacgaaacatgtagggaattcaggaatgcagcttccatcatggggaactctgcgctgttcaagaagatggaggtcgcgtctaacgctattaagcgtgacattgtgtttgcagcaagtttgtatgtcacaggaatctgatgcatgtaacctcgtagtctcccttgcttcttttgttagagaaatcgttgtgctggtggaatgctactaacctaaccttagctagaacaattgttgtggtatttttttttccagttctggattattgcttttgctagttttgcgaagttttctgaagcggcgaccagcagagtaaaggaaaatcgaaagcgggtgggattctcg

SEQ ID NO: 131240 - DNA, 1724 bp, Zea Mays
atggcgaacccccgcgtcttcttcgacatgaccatcggcggtgcctcggccggccggatcgtgatggagttgtacgccaacgaggtgcccaagaccgtggagaacttccgcgcgctgtgcatgagctggaggcgccctgcacgacgtcttctaggtcagacggtcatgggcgatggtgccgacgaagaggaagcacaaaacatgtgccaccgaaccctccccaaaccctatcttcggatctcgatggcgaacccctgcgtcttcttcgacatgaccatcggcggtgccccggccggccgaatcatgatggagctgtacgccaacgaggtgcctaagactgtggagaacttctgcgcgctgtgcacgagctggaggcgccctgcacgacgtgcttccaggtcggtggtcatgggcgattgtgccgacgaagaggaagcgcacaacaggtgtcgtcgtggtcgcgaccgtcgtcaagtggaaggtgggcgacctcatgcttaccaagatgaagagcttcccggtctagccggctatgcctggggtccaaggattctgggtctaggcgggggtttcccacttaggatttggtggcggccttggaagaccggtggaagactgcaaggacatgaggagcttgatggagccagcttacgggaacatgaagaattcacaaaggtgaaaaatatcacaaaggttgaactggggagatatgagatagatacaccatacatgttaactaggctttattcacatatctctactattctatatagtcaaagcaaggtggcagaaggacccaatgttgatattggtaaatcatgcgcaaatgggtgtgctgaaatgatggagaacaatagggaacatagaattgctcttgttgctgctggattagctgctggaatcgcttcagcttgctggactggaccccgttgtgttcttccgatgatcaatcagtcaatcacaaattcaaaccatacaaatcaactcaatatccaacgtgcttctagaagtgtgttcaaggggtggagtgaggagaagatatattttgctcccacatacaagtactcttgcaactcatattcttatgctggagagactgccacatcaaagaaaaagaggagaaccccggcttggtgtgatagaatactatggcatggagatggtattgcacagttgtcctacttccggggggaatctcaattctcttaccatcgtcctgtttgtgggacatttactgttgaggttaaaaggctagatggccgatcaaagcggcgcccatcaaacaccaacattataatcgatgcagttgttaccgacaagagacaagcataactaaggtgatctagatggatgaaattgtcgacaaggccattagcatcaaaaaagattacctcaaagcatctcatgtatatccgcaaggagaagctgcactcagggaaggcattgagtgcaatagaggtgaaggaactgcgcgaagcccttgaagcgattgctgaaggtttggaccaagattcactcttgtgccagagtttggcgtagtcctcgattataaactgtgtactatgttaatgtaatgacatagtttgtatgatacagatcgtagtgatgttgtttgaagctgtttgtatgaactgtttcctactatcttgtatgaattatgatgtctgatgtagtttgtatgaactatgtcatattatgttgaatgaagctattgcatgccctta

SEQ ID NO: 131241 - DNA, 112 bp, Zea Mays
taagttcgatcatctgaacaagccgtgtacaacaacatctcaaggatgtaaaccaatactaccaacaacagactgtcaactatacattctctcttctttaagggaaaaaaaa

SEQ ID NO: 131242 - DNA, 372 bp, Zea Mays
atggcgttgcaggtgtcgaggagcgcgacgcgcagtgtcgaggtgggcggcgatggcatagccctcgccggagccggcgagtgcccctgcccctcggcgagcgtgagtgcaaggaggtcgtctacccatgcgggcggagcgaacgaggatgccgacagggacagcaggccctgggggctagggggcgcggacagcgtcgtggactgcgacagcatccggtgtgctgaggagaagacagaggatgcagaggtcgccggcaatgcgatttctctggaatattcgtggcgtttggctagacgtcaggccgatggagactacacgagccggctggtggacgttgtcaccattggtgaacgatcggacggccaataa

SEQ ID NO: 131243 - DNA, 311 bp, Zea Mays
agccgggaaccaggaagccgcatgccctcttcgatgggtgtgcttcgttgccatgtcaatctgcccatggtccatcctcgccgatgccggtgactcgacccaagagcgaaaccagtggggagcgcagggcttggcgatgacgttcggtgcacgccgtgggagctaggatgcctgggccatcggcaatttcacgacgggcatgagatttcgctgctactcgttgctgggctccacgctgctcgatttttgcagtgaggacacgtgtcatctgaagagcaagttggtacctggaatctcaagtcccaggcaag

SEQ ID NO: 131244 - DNA, 815 bp, Zea Mays
ggcgcagctagcagcagccgacatgagcgacgggcgcgaggagagcaccagcagcaggtggccagagctggccgccctgcgcgcgctggcgcgcgacgcggcggcccgggccgggagggagacggcggggtggcgcgggcgggagcgggaggaccaccgccacggccacgccaagacggccaaggtcatgcacctgctgctctggggacccaagtgaggtgaagtgaagcgctgctgcacctgcctctgcctctgcctctgcctcgtggcccgcgcgcggcgtcctcgcttccttctccgcccgctgcccgcacgggttgtttgtacttgtacatgtaccactgctagactagtactgctgctgtgcctgtactatgcactgtgtattgtattgtattgtacgtgctagtagtaagctgctgccttcttccttctcttctctcccccaccactctgctgttttgctcctcctcatcgtcgtcgtcgcgtcggctgtgagttgtgacctgtatgtaattaagccatcatccaacacgtctaatctccctcccctttctgtcgaaggttattcgatgagtcgatgttaactagatcacaagatcgaaaactaaagataaaagcacaggaaagtttttatacaagttcaatctctctctttctgagataataacctatgtcgtgtatgttggatctgttattgtatcttactatcttgcgtattttacgatgatcagagtggacggtggttacacattagccacgaggtcggttgtaagaggacgggtcaagttgtacacgagtgtaaaaaaaaaaaa

SEQ ID NO: 131245 - DNA, 3254 bp, Zea Mays
gcgtggaagccatggccgctcccccaagagaaaataaaaatgtagcagtagcttgcaagcgggaaagccaagaaggcgtgtctcgcacctgtctctgaccaagacgcgcgcatggaagagaaagcgtcgggaggcggttgagatgcgtgggcgggcgggcggccaggcatccacacgtctgacgcctccccgcggtcggcgcctcggcgtggcaatataccggcgtgccccgagcgcgccggggccttcttctactcgaggcgtggcaactcccgcgtgcgcgaggccggcttccttggacctgctgccgccctcgccaccggcgatagccgcccgccgcatccattccctcgccttctcgccacggcgccaggcaaacgatgcacaagaaaaaaggagggacaaaacaaagagggaaaagaacgagcggcgtgggccgttggcccatcgggcccttggagaaattaggcaagtggggcccagtgacatggccgctctggctgtccacggccggtcagccgcgagcgagagctgggctgagctgccgtgcgcgtgctaacctggactgggcagcaggcatcagacgcatctcgcggcatctcggcatgtggaagctgtgaagaggagaagacgcggagaggagatgctgcaacagaagccgaaccgaacgaaaggaaggagagagagagagagagagagaaaaaaaaaggacggctccgcccaagggtcggaagggagggagttgccgcgccgcggccggttcgatcctttgcgcgagatcgagcttctccggttggtgttggggctggcgacatctgggatccgtcgtctctcctcgtgttcttgagcagttttccacttgcctggcaaaagaacatttgacttggaagagcaaacactggaagctttgtggtttgtcctaagtgatcctatcaagttctcataggctgcatactggtacagcattttctcctgtgttttgggccacagaagaggggggagccaaggatttttctatctcgtaagccgcggccttggtgctcatagttaccctagtctgtaagctggagattgtaaaaagccatatctgttcctctatcactgtatatagagatctacataatggacgagaggaggactattttgatggaccgttacgaaatcgggaggcagttaggccaaggaaacttcgccaaggtatactttgctcggaacctgaccgacgggcagtccgttgcgataaagatgatcgataaggacaagatcacgagggttgggctaatagtgcagataaagagggagatctctataatgaggctggtgaagcatccgaatgtcctgcagctcttcgaggtaatggctagcaagagcaagatctacttcgtattggagtacgctaaaggcggcgagctgttcaacaaagtatcaaaggcgaagctcagcgaggatgccgcgaggaggtatttccaccagctggttaatgccgtggactactgccacagccgaggcgtctaccatcgcgacttgaagccggaaaacctactcctggacgagaacgagaaccttagagtctcggacttcggtctgagcgccctgtctgaatccagaaggcacgacggcctcctacataccacgtgtggaacccctgcctatgttgctcctgaagtgcttggtaggagaggctacgatggcaccaaggcggacatatggtcctgcggagtgattctcttcgtgctcgtggctggttacctgccgttccacgacccgaatctcatcgagatgtacaggaagatctccagagctgaatacagatgccctcgctccttctccggtgagctgaaggacctgcttttcagaatgctcgatccagatcccagtaccaggatatccatttcaaggatcaagagaagcacttggtacagaaaacctatcgaggcaaacgcggcaaagatcaagcacggcacagcaagagacaccaccgtgcgcgacggtgaagccgccacggcctcgagctcgatagagtgcagtaaccggccagaggaagaccaagggtcgtcaagcctccctaacctgaacgcattcgacatcatttctctctcgaccgggtttgacctatctaacctgttcgaagaaagacacgggcggagggaggagaggttcaccaccaggcagccagtgggagcggtgtttggtaggctgaaggagctggctgagcggttgaagctgaaaatccagaagaaggagagcggggtcttgaaactggctgcgcagaaggaagggatgaaggggttcctggagctcgacgccgaggttttcgagcttgccccttcgttccttctggtcgagctgaagaaggccagcggtgacaccattgagtaccaaaggctcgtgagggaagaagtgcggcctgcgctgaaggatatggtctgggcttggcagagcgaccggcaccagcagcagcagcagcggtgcgagcagtctgtgcaaggagaggaccagcagcagccgttgtcgtctttgccgacgcagcagtagtcactgcaccaccagttgcgaccgccataaccagatcacgtcaaaactgcaccaagccgcacaggactagtaactcccacttgcatcgacgcttatgtgattgcggaattgtgtttcaggttacctgcctgctgcggtaggacctaaaacgcctacctgcctaccatttggcatttttttgtatactgtacgtacattagagtaataaacaaacatgcttaacttttcagctttcgattggaatgtgcttttcgatgtaactctgtaaccagtgtaggtacgaagtcgattagccacagggtctggccatgttgacctcacgtagccctggttcattggtgtaacagtttgttggctgcggctttacattattttgtctctatggattacggctgcgactatgtgtagctgaacaagctggtatatgatgagccctggaaacgtgtgtttactgcagctatttgcagccagtgactgttgatacaaacgacgaagtagagttggttgtttatgtaggcacgcagcatgaccataattatccatgaatcatggatagatgcacaatgtttaggaaacaggtgtgtgtggctggctggtggtgcgagaagagatgcgctgccttgatgtactgtactgggactgggagggatgcgtctcgcagtacagtctgtactatcatctctacacgcacgcacgcaggctcgacgtgtcggcggcgg

SEQ ID NO: 131246 - DNA, 750 bp, Zea Mays
aacctcgtgttgttcggagcgcacacacacacaaccagatctcccccaaatccacccgtcggcacctccgcttcaagatgcagatctttgtgaaaaccctgactggcaagactatcaccctcgaggtggagtcgtctgacaccattgacaacgttaaggccaagatccaggacaaggagggcatccccccagaccagcagcggctcatctttgctggcaaacagcttgaggacgggcgcacgcttgctgactacaacatccagaaggagagcaccctccaccttgtgctccgtctcaggggaggcatgcagatctttgtgaaaaccctgaccggcaagactatcaccctcgaggtggagtcctcggacaccatcgacaatgtgaaggcgaagatccaggacaaggagggcatccccccggaccagcagcgtctgatcttcgccggcaaacagctggaggatggccgcaccctagcagactacaacatccaaaaggagagcaccctccaccttgtgctccgtctccgtggtggtcagtaagtcatgggtcgtttaagctgccgatgtgcctgcgtcgtctggtgccctctctccatatggaggttgtcaaagtatctgctgttcgtgtcatgagtcgtgtcagtgttggtttaataatggaccggttgtgttgtgtgtgcgtactacccagaactatgacaaatcatgaataagtttgatgtttgaaattaaagcctgtgctcattatgtt

SEQ ID NO: 131247 - DNA, 1756 bp, Zea Mays
aacctcgtgttgttcggagcgcacacacacacaaccagatctcccccaaatccacccgtcggcacctccgcttcaagatgcagatctttgtgaaaaccctgactggcaagactatcaccctcgaggtggagtcgtctgacaccattgacaacgttaaggccaagatccaggacaaggagggcatccccccagaccagcagcggctcatctttgctggcaaacagcttgaggacgggcgcacgcttgctgactacaacatccagaaggagagcaccctccaccttgtgctccgtctcaggggaggcatgcagatctttgtgaaaaccctgaccggcaagactatcaccctcgaggtggagtcctctgacaccattgacaacgtcaaggccaagatccaggacaaggagggcatccctccagaccagcagcggctcatctttgctgggaagcagcttgaggacgggcgcacgcttgccgactacaacatccagaaggagagcaccctccacttggtgctgcgcctcaggggaggcatgcagatcttcgtgaagaccctgaccggcaagactatcaccctcgaggtggagtcttcagacaccatcgacaacgtcaaggccaagatccaggacaaggagggcattcccccagaccagcagcggctcatctttgctggaaagcagcttgaggacgggcgcacgcttgccgactacaacatccagaaggagagcaccctccacttggtgctgcgcctcaggggaggcatgcagatcttcgtgaagaccctgaccggcaagactatcaccctcgaggtggagtcttcagacaccatcgacaatgtcaaggccaagatccaggacaaggagggcatcccaccggaccagcagcgtttgatcttcgctggcaagcagctggaggatggccgcacccttgcggattacaacatccagaaggagagcaccctccacctggtgctccgtctcaggggtggtatgcagatctttgtgaagacactcactggcaagacaatcacccttgaggtggagtcttcggataccattgacaatgtcaaggccaagatccagaaggagagcactctccacctggtgctccgcctcaggggtggcatgcagatttttgtgaagacattgactggcaagaccatcaccttggaggtggagagctctgacaccattgacaatgtgaaggccaagatccaggacaaggagggcattcccccagaccagcagcgtctgatctttgcgggcaagcagctggaggatggccgcactctcgcggactacaacatccagaaggagagcacccttcaccttgttctccgcctcagaggtggtatgcagatctttgtaaagaccctgactggaaaaaccataaccctggaggttgagagctcggacaccatcgacaatgtgaaggcgaagatccaggacaaggagggcatccccccggaccagcagcgtctgatcttcgccggcaaacagctggaggatggccgcaccctagcagactacaacatccaaaaggagagcaccctccaccttgtgctccgtctccgtggtggtcagtaagtcatgggtcgtttaagctgccgatgtgcctgcgtcgtctggtgccctctctccatatggaggttgtcaaagtatctgctgttcgtgtcatgagtcgtgtcagtgttggtttaataatggaccggttgtgttgtgtgtgcgtactacccagaactatgacaaatcatgaa

SEQ ID NO: 131248 - DNA, 1892 bp, Zea Mays
accctactccatcttctcgtgttgttcggcgcacgcggagacagcccgcgatcccgatcccgatccttcttcacgcgaatctcgacgatcccccccttccttccttcaagaaggagagcaccctccacctggtgctccgcctgaggggtggcaatggtaatgcagatctttgtgaagaccttgactgccatatgcggttcaactagccctccgaccccctctcgagagttccgctccaccgcggcgaaggaagtggcggaggaggaggatccgcgcctgcgctgggccttcgtgcggaaggtgtacgcggccccccgctgccgtctggcccacgtacatcgccatcctcctatccctgtccccgctcggactcttcctcgctaccgccgtgtctgcggatctggccaagtagcccggtaggaagcgccgtgggaggagacaggcgaggcgttcgaccgccgccggcagcttaggacgtaccacgtctctgttctatgggttcacgagtttcggggccctacatggattctccgcctccgcctccgcctcgtccgccatcgccgccgcgacaccctcctcaccctcagggcgagcgtcacgtcggcggggagatgctgtaccaggacacagaccataggctccgcgcgctggtcgggagcgccgagggcttcggccgccacgccatcgggggcctctacggggccatccaccgcgtcacgtcgctccaagacgacgggcccgggagtctgagggaggcgtgccgggcggaggagcccctgtggatcgtcttcgaggtgtccggcaccatccacctccactcctacctccgcgtctcctcgtacaagaccatcgacgggcgcggccagcgcgtggtgctcaccggcaaggggctccggctcaagtcatgccatcacgtcatcatctgcaacctggtgttagaaggaggccgtgggcacgacgtggatggcatccaggtcaagcccgactccaccaacatctggatcgaccgctgcaccctcgccgactacgatgacggcctcatcgacatcacgcgccagagcacagacatcacagtctcaagatgccattttatgcggcacgacaagacgatgctcatcggtgccgaccccacgcacgtcggcgaccgctgcatcagggtcaccatccaccactgcttcttcgacggcacgcgacagaggcacccccgcctccgcttcggaaaggttcacctctacaacaactacacgcgcagctggggcatctacgccgtctgcgcaggcgtagaggcccagatcgtgtcccagtgcaacatctacgaggcaggtggagggcccccaaagaagacaactgtattcaagtacatgccggagaaggccggcgaccgagaggacgtggtggcagggtcgatcagctcggaaggggacgccttcctcaatggcgcgctgccctgcctgatcgataaccctgggtctgtcttcaggccagaggagtactaccagcagtggaccatggagccagcgtcgccggcgctcaaggacataatacagctctgcgcaggatggcagccggtgccccgccccccggatgatcgctgactttcatcattctgatatgctgcagctcgcttctgtaagaatattcgtttcacggaagcactgcatttgtatgcatctcatcctaggtaattcaacatttgtttcatggtagagtggcatttgtatgccactcctcttcatctgccccctctctgaaatgtagtagaaaagttgttatggttttctatttgtgtctttatttatggtacatacaattcccaatgtaaagatatttctctcgtccatagcagtacaatagcttttagttgtgaatgctactcgtatgtcttatactag

SEQ ID NO: 131249 - DNA, 2629 bp, Zea Mays
caaatctgtcaacggggactctcatcctcttgctcatagaaagaactgcagtgttacaggtaggtaattactagagtactactactaagtaaatctgtcaaaggcagtcatggcatccatatccttcacatcagtactgggagtggcacacgcaccgcacacatactactacatctactagtatgtagtggagtgcttgaaaggcataagcgaattttcttcttgtttggtctacgtccatttgcttgtccactaaccggctagtttactctgctttttgggttttccacgtctctacaattgtgactgttagagcaactccagtagttctctaaaaaatagcttgctaaaatcatgtttagcaagttgctaaatagctattggaagtaaaaaataacttagtttccaatagttgctcatatttaggaagtagttcgattttgaatctagctttagcggccctgtccctatgagatctgcctgataataaggttgagagcagaggatatgagggcggaagaaaaaaggtcggtcgatatgaattatggatgagtggtggtccggtgacgcaacttatgagaaagttaggttcgacggtgaaggagaaacttgcgtcatacgtgtttgacctagctacctcattatgctagaaaataaaaaagagtgtgttataactggctatctcactgtataggaaaggtaaaaataatcacgctagtgtgaagaaattgacgtcaactgtatttagggagttcctaccgagttgctaaatgtggagagtaaatagagttgaatagcaactaactaaatttagcaagtctatttagagaaccattggagaagtatttttctgttcacttcttaaatttaagatttagagagttatttagagaactattgaagttgctcttagaccacctataattgtgactgttgaccacctatagatgcggttcaactagccctccgaccccctctcgagagttccgctccaccgcggcgaaggaagtggcggaggaggaggatccgcgcctgcgctgggccttcgtgcggaaggtgtacgcggccccccgctgccgtctggcccacgtacatcgccatcctcctatccctgtccccgctcggactcttcctcgctaccgccgtgtctgcggatctggccaagtagcccggtaggaagcgccgtgggaggagacaggcgaggcgttcgaccgccgccggcagcttaggacgtaccacgtctctgttctatgggttcacgagtttcggggccctacatggattctccgcctccgcctccgcctcgtccgccatcgccgccgcgacaccctcctcaccctcagggcgagcgtcacgtcggcggggagatgctgtaccaggacacagaccataggctccgcgcgctggtcgggagcgccgagggcttcggccgccacgccatcgggggcctctacggggccatccaccgcgtcacgtcgctccaagacgacgggcccgggagtctgagggaggcgtgccgggcggaggagcccctgtggatcgtcttcgaggtgtccggcaccatccacctccactcctacctccgcgtctcctcgtacaagaccatcgacgggcgcggccagcgcgtggtgctcaccggcaaggggctccggctcaagtcatgccatcacgtcatcatctgcaacctggtgttagaaggaggccgtgggcacgacgtggatggcatccaggtcaagcccgactccaccaacatctggatcgaccgctgcaccctcgccgactacgatgacggcctcatcgacatcacgcgccagagcacagacatcacagtctcaagatgccattttatgcggcacgacaagacgatgctcatcggtgccgaccccacgcacgtcggcgaccgctgcatcagggtcaccatccaccactgcttcttcgacggcacgcgacagaggcacccccgcctccgcttcggaaaggttcacctctacaacaactacacgcgcagctggggcatctacgccgtctgcgcaggcgtagaggcccagatcgtgtcccagtgcaacatctacgaggcaggtggagggcccccaaagaagacaactgtattcaagtacatgccggagaaggccggcgaccgagaggacgtggtggcagggtcgatcagctcggaaggggacgccttcctcaatggcgcgctgccctgcctgatcgataaccctgggtctgtcttcaggccagaggagtactaccagcagtggaccatggagccagcgtcgccggcgctcaaggacataatacagctctgcgcaggatggcagccggtgccccgccccccggatgatcgctgactttcatcattctgatatgctgcagctcgcttctgtaagaatattcgtttcacggaagcactgcatttgtatgcatctcatcctaggtaattcaacatttgtttcatggtagagtggcatttgtatgccactcctcttcatctgccccctctctgaaatgtagtagaaaagttgttatggttttctatttgtgtctttatttatggtacatacaattcccaatgtaaagatatttctctcgtccatagcagtacaatagcttttagttgtgaatgcta

SEQ ID NO: 131250 - DNA, 1763 bp, Zea Mays
cgcacgcggagacagcccgcgatcccgatcccgatccttcttcacgcgaatctcgacgatcccccccttccttccttcaagatgcggttcaactagccctccgaccccctctcgagagttccgctccaccgcggcgaaggaagtggcggaggaggaggatccgcgcctgcgctgggccttcgtgcggaaggtgtacgcggccccccgctgccgtctggcccacgtacatcgccatcctcctatccctgtccccgctcggactcttcctcgctaccgccgtgtctgcggatctggccaagtagcccggtaggaagcgccgtgggaggagacaggcgaggcgttcgaccgccgccggcagcttaggacgtaccacgtctctgttctatgggttcacgagtttcggggccctacatggattctccgcctccgcctccgcctcgtccgccatcgccgccgcgacaccctcctcaccctcagggcgagcgtcacgtcggcggggagatgctgtaccaggacacagaccataggctccgcgcgctggtcgggagcgccgagggcttcggccgccacgccatcgggggcctctacggggccatccaccgcgtcacgtcgctccaagacgacgggcccgggagtctgagggaggcgtgccgggcggaggagcccctgtggatcgtcttcgaggtgtccggcaccatccacctccactcctacctccgcgtctcctcgtacaagaccatcgacgggcgcggccagcgcgtggtgctcaccggcaaggggctccggctcaagtcatgccatcacgtcatcatctgcaacctggtgttagaaggaggccgtgggcacgacgtggatggcatccaggtcaagcccgactccaccaacatctggatcgaccgctgcaccctcgccgactacgatgacggcctcatcgacatcacgcgccagagcacagacatcacagtctcaagatgccattttatgcggcacgacaagacgatgctcatcggtgccgaccccacgcacgtcggcgaccgctgcatcagggtcaccatccaccactgcttcttcgacggcacgcgacagaggcacccccgcctccgcttcggaaaggttcacctctacaacaactacacgcgcagctggggcatctacgccgtctgcgcaggcgtagaggcccagatcgtgtcccagtgcaacatctacgaggcaggtggagggcccccaaagaagacaactgtattcaagtacatgccggagaaggccggcgaccgagaggacgtggtggcagggtcgatcagctcggaaggggacgccttcctcaatggcgcgctgccctgcctgatcgataaccctgggtctgtcttcaggccagaggagtactaccagcagtggaccatggagccagcgtcgccggcgctcaaggacataatacagctctgcgcaggatggcagccggtgccccgccccccggatgatcgctgactttcatcattctgatatgctgcagctcgcttctgtaagaatattcgtttcacggaagcactgcatttgtatgcatctcatcctaggtaattcaacatttgtttcatggtagagtggcatttgtatgccactcctcttcatctgccccctctctgaaatgtagtagaaaagttgttatggttttctatttgtgtctttatttatggtacatacaattcccaatgtaaagatatttctctcgtccatagcagtacaatagcttttagttgtgaatgcta

SEQ ID NO: 131251 - DNA, 1748 bp, Zea Mays
cgcacgcggagacagcccgcgatcccgatcccgatccttcttcacgcgaatctcgacgatcccccccttccttccttcaagccctccgaccccctctcgagagttccgctccaccgcggcgaaggaagtggcggaggaggaggatccgcgcctgcgctgggccttcgtgcggaaggtgtacgcggccccccgctgccgtctggcccacgtacatcgccatcctcctatccctgtccccgctcggactcttcctcgctaccgccgtgtctgcggatctggccaagtagcccggtaggaagcgccgtgggaggagacaggcgaggcgttcgaccgccgccggcagcttaggacgtaccacgtctctgttctatgggttcacgagtttcggggccctacatggattctccgcctccgcctccgcctcgtccgccatcgccgccgcgacaccctcctcaccctcagggcgagcgtcacgtcggcggggagatgctgtaccaggacacagaccataggctccgcgcgctggtcgggagcgccgagggcttcggccgccacgccatcgggggcctctacggggccatccaccgcgtcacgtcgctccaagacgacgggcccgggagtctgagggaggcgtgccgggcggaggagcccctgtggatcgtcttcgaggtgtccggcaccatccacctccactcctacctccgcgtctcctcgtacaagaccatcgacgggcgcggccagcgcgtggtgctcaccggcaaggggctccggctcaagtcatgccatcacgtcatcatctgcaacctggtgttagaaggaggccgtgggcacgacgtggatggcatccaggtcaagcccgactccaccaacatctggatcgaccgctgcaccctcgccgactacgatgacggcctcatcgacatcacgcgccagagcacagacatcacagtctcaagatgccattttatgcggcacgacaagacgatgctcatcggtgccgaccccacgcacgtcggcgaccgctgcatcagggtcaccatccaccactgcttcttcgacggcacgcgacagaggcacccccgcctccgcttcggaaaggttcacctctacaacaactacacgcgcagctggggcatctacgccgtctgcgcaggcgtagaggcccagatcgtgtcccagtgcaacatctacgaggcaggtggagggcccccaaagaagacaactgtattcaagtacatgccggagaaggccggcgaccgagaggacgtggtggcagggtcgatcagctcggaaggggacgccttcctcaatggcgcgctgccctgcctgatcgataaccctgggtctgtcttcaggccagaggagtactaccagcagtggaccatggagccagcgtcgccggcgctcaaggacataatacagctctgcgcaggatggcagccggtgccccgccccccggatgatcgctgactttcatcattctgatatgctgcagctcgcttctgtaagaatattcgtttcacggaagcactgcatttgtatgcatctcatcctaggtaattcaacatttgtttcatggtagagtggcatttgtatgccactcctcttcatctgccccctctctgaaatgtagtagaaaagttgttatggttttctatttgtgtctttatttatggtacatacaattcccaatgtaaagatatttctctcgtccatagcagtacaatagcttttagttgtgaatgcta

SEQ ID NO: 131252 - DNA, 1737 bp, Zea Mays
gagagttccgctccaccgcggcgaaggaagtggcggaggaggaggatccgcgcctgcgctgggccttcgtgcggaaggtgtacgcggccccccgctgccgtctggcccacgtacatcgccatcctcctatccctgtccccgctcggactcttcctcgctaccgccgtgtctgcggatctggccaagtagcccggtaggaagcgccgtgggaggagacaggcgaggcgttcgaccgccgccggcagcttaggacgtaccacgtctctgttctatgggttcacgagtttcggggccctacatggattctccgcctccgcctccgcctcgtccgccatcgccgccgcgacaccctcctcaccctcagggcgagcgtcacgtcggcggggagatgctgtaccaggacacagaccataggctccgcgcgctggtcgggagcgccgagggcttcggccgccacgccatcgggggcctctacggggccatccaccgcgtcacgtcgctccaagacgacgggcccgggagtctgagggaggcgtgccgggcggaggagcccctgtggatcgtcttcgaggtgtccggcaccatccacctccactcctacctccgcgtctcctcgtacaagaccatcgacgggcgcggccagcgcgtggtgctcaccggcaaggggctccggctcaagtcatgccatcacgtcatcatctgcaacctggtgttagaaggaggccgtgggcacgacgtggatggcatccaggtcaagcccgactccaccaacatctggatcgaccgctgcaccctcgccgactacgatgacggcctcatcgacatcacgcgccagagcacagacatcacagtctcaaggtcttttcactcttccttcccctgtaaatcttattactatattgcaaaaaaaaaaactgctatccgatgcggaaattttgtagtaatcgatatattagcttcacgattgaaccaaccaattaacaaattactgcacgcagatgccattttatgcggcacgacaagacgatgctcatcggtgccgaccccacgcacgtcggcgaccgctgcatcagggtcaccatccaccactgcttcttcgacggcacgcgacagaggcacccccgcctccgcttcggaaaggttcacctctacaacaactacacgcgcagctggggcatctacgccgtctgcgcaggcgtagaggcccagatcgtgtcccagtgcaacatctacgaggcaggtggagggcccccaaagaagacaactgtattcaagtacatgccggagaaggccggcgaccgagaggacgtggtggcagggtcgatcagctcggaaggggacgccttcctcaatggcgcgctgccctgcctgatcgataaccctgggtctgtcttcaggccagaggagtactaccagcagtggaccatggagccagcgtcgccggcgctcaaggacataatacagctctgcgcaggatggcagccggtgccccgccccccggatgatcgctgactttcatcattctgatatgctgcagctcgcttctgtaagaatattcgtttcacggaagcactgcatttgtatgcatctcatcctaggtaattcaacatttgtttcatggtagagtggcatttgtatgccactcctcttcatctgccccctctctgaaatgtagtagaaaagttgttatggttttctatttgtgtctttatttatggtacatacaattcccaatgt

SEQ ID NO: 131253 - DNA, 328 bp, Zea Mays
accctactccatcttctcgtgttgttcggcgcacgcggagacagcccgcgatcccgatcccgatccttcttcacgcgaatctcgacgatcccccccttccttccttcaagaaggagagcaccctccacctggtgctccgcctgaggggtggcaatggtaatgcagatctttgtgaagaccttgactgccatgtatgataccgtctttgaagtatttgtattgtctgtcgtgactaagtttgtttcgtggaccggttgtcttctaccctacccaaaactacagtgtggcagcaaatgatgaataaatgtgatgtttgaatttaaaaata

SEQ ID NO: 131254 - DNA, 700 bp, Zea Mays
accctactccatcttctcgtgttgttcggcgcacgcggagacagcccgcgatcccgatcccgatccttcttcacgcgaatctcgacgatcccccccttccttccttcaaggtacggcgaatcggcgatcatcctcccgctttcccttctcctctaggtataatgatttgttataggttatggggacttttgagtcatcgggtcgatctgacgatttgctatgggtgctctgagtactcgacctgggaactgtggggcgcttgtaggcggcgcagagttgggtctcgtcgttgtaatgattccatcggctcgttgcgtagggtttgatctgcctgtcgttttcttttcttttaattaaatttctgatgcacagtcatgtattgatctggtttggtgttcctagatgcgtgtaataaatggggaaaaaaccatgtcgtaataaaatcaatttatttttaataaaaaaaatctgaattctggctctagtgaataaatggatagagcctggctctaattctggtaaaataaaaagacaacgagcttaacttcttaattggtcaattggaagggttctccgatctaattagacgttgaaaatatattgcaagattacttcacttctttaaattgccaagaaaccataaatttaccattgtgattggggctacttttttttaacctttagcctttgtgaaatttaa

SEQ ID NO: 131255 - DNA, 2110 bp, Zea Mays
agaaagattcgcccatcgcccactggccactgcgcactgggcacggactggcaggcgaagaacctaagcagaacctaccatgtcaccggcggcgaggcgcatcctgctcgccgtcgccgcccgtcgccgccgcttctccacggacgcagcggcgtcggacccgtcccgggcgtcgcagcagctgcccaggggcaagcgatgggatgcggtggtgatcggcggcggccacaacggcctcgtcgcggccgcctacctcgcccgcgctggccgctccgtcgccgtgctggagcgccggggcgtcctgggtggcgcggcggtctcggagtcggaccttgtccccggattccgcttctcccgctgcagctacctcctcagcctccttcgccccgccatcctccgcgacctggagctggagaggcacgggctgaagctgctgccgcggagcccttcgtcgtttacgccatgccttgacggcagatacctgcttcttggccccgatgctgagctaaactactcagagatcagcaagttctctaggaaggatgcagtggcatacccaagatacgaggagaagctggagaacttctgcaagctcatggactttgtcatagactcagctccacccgagctgaggcaggaggcccacttctcgatggttgacaggatgaagcatagggttgagaagtcagcattctggggccaccttcttcggcatgtgatgcagcaggggcagaagaacatggtggaattctttgacctactcctttctccggcatcgaaaatcttgaacacctggtttgagagtgaggttttgaaggccactcttgcaactgacgccgtgataggagctatggctggtgtgcacactccaggttctggatatgttcttctacaccatgtcatgggggagactggtggtcagcgtggtgtttgggcgtatgtccaaggtggtatgggttcagtgtcatcagctataagcaaagcagctcttgaagcaggagtgcagattgtaacaaatgccgaggtttcccaagtaatggttaatgaaactagtggaatggtagaaggggtagctttggttgatggaacagaggtgcactcgccagttgttctctcaaatgccacaccatacaaaacatttgtggacctagtaccttctagtgttcttccggaggacttcctctgtgcaattaaggcagcagattacagctctgcaacaacaaagattaatgtggctgtcgacagactgccacagttccagtgttgcaacaccaatcttgaaggtggcccagagcacatgggcacaatacacattgggtccgaaagcatggaggaaattgacgttgcatacagggaagcagcagacggcatctcgtccaaaagacctgttatagaaatgacaattccttctgttttggataagaccatctctccgccaggtcagcatgttattaatctctttgttcagtacacaccctacaaactttcagaaggcagctggcaggattctaatgtcagaaaagcctttgctgagcgatgcttctctttgattgatgagtacgcgccaggcttcagctcatcggtggtaggctacgatatgctgactccgcctgatcttgaaagagagttcggcctaacagggggaaacattttccacggcgcaatgggcttggattctctcttcctcatgaggcctgccaagggatggtcggattacagaactcctgtgaaggggctgtacctctgcgggagtggcgcacacccaggtggcggggtgatgggcgcgccaggacgcaacgccgccgccgttgttttggaggaccacgtgaagacaaagtaggtgtagtgtagctcgctggaaaccaagatggcatttttatcatcaggagaaaatctttgatgccatggtgctgttttagtgcctttcttttcttttcctttttggagaattattgtcgcaatccatagtcggagaacttatatcatgtgaagactcgtgtaacaaatcctcactaacatttctgtccctgtccggcgggaaattggaactgtggtaaaatgtggacccatctctttgaaccacaaaggccctatgggcttattttgtgat

SEQ ID NO: 131256 - DNA, 1015 bp, Zea Mays
gatctaccagctctagtgttgctagaataactaagcaaatatcttttatgctgatatctggtttcttttgcaggacctagtaccttctagtgttcttccggaggacttcctctgtgcaattaaggcagcagattacagctctgcaacaacaaagattaatgtggctgtcgacagactgccacagttccagtgttgcaacaccaatcttgaaggtggcccagagcacatgggcacaatacacattgggtccgaaagcatggaggaaattgacgttgcatacagggaagcagcagacggcatctcgtccaaaagacctgttatagaaatgacaattccttctgttttggataagaccatctctccgccaggtcagcatgttattaatctctttgttcagtacacaccctacaaactttcagaaggcagctggcaggattctaatgtcagaaaagcctttgctgagcgatgcttctctttgattgatgagtacgcgccaggcttcagctcatcggtggtaggctacgatatgctgactccgcctgatcttgaaagagagttcggcctaacagggggaaacattttccacggcgcaatgggcttggattctctcttcctcatgaggcctgccaagggatggtcggattacagaactcctgtgaaggggctgtacctctgcgggagtggcgcacacccaggtggcggggtgatgggcgcgccaggacgcaacgccgccgccgttgttttggaggaccacgtgaagacaaagtaggtgtagtgtagctcgctggaaaccaagatggcatttttatcatcaggagaaaatctttgatgccatggtgctgttttagtgcctttcttttcttttcctttttggagaattattgtcgcaatccatagtcggagaacttatatcatgtgaagactcgtgtaacaaatcctcactaacatttctgtccctgtccggcgggaaattggaactgtggtaaaatgtggacccatctctttgaaccacaaa

SEQ ID NO: 131257 - DNA, 926 bp, Zea Mays
ctgcaagtctgcaacaacaactcaacaaagacgtgcacacacagtcatacacaagtagagcgacagtagagatacctaccgtctcctatattgtgtgtgtttgtcgtgtcatctcctatctcgatcatggcgcaggcgcacgtggcggcgaggttcatgacggaggtggcgccgccgcaggtggtgtcggtcatgcggcagaggaggaagaaggtgccgaggagcctggacaccatcgccgaggacgacgacagggagcagcagctggcgtgcgggccaccgtcggaccacggcttcgcggcggcgtggtcgctgccgacgccgacgccgacgccgccgcagccacgggagcgcgcgggcgggttcgtggcgaggggcctcgtcggcaagtacttgtcggacgcccacgacggctgccaggccagtggctgggagggtgggcacatgctaggccaccggcgagccgtgcatgcgcaggagctgcacgaggtcggagcttgaagaggggggagagagaacatcatctagctgcatgcagtgagattgttttgggctgggtccgcccctgtttgtaccacttccacacgtgcgctcatgcatgcatgataatttaattacctttagctttattacgcgtcaagtggagagcatatcacaagtagaaaagcttacacacggtttcagtatcaagtgtacaataaggttatttgtagtggcgtttttttaaaaaaaacgcaaggataaatcatatttatacatgcggttccttaaaaaatcgtcactagaaatccataatttctaaatattgttttcttaaagaaccatcactagaatcatttttatcttaaattttttaagttttttaaatgatctcgtatgaaaaaaaacaacaacataaaagctatatatctctaaaagttataaaa

SEQ ID NO: 131258 - DNA, 1134 bp, Zea Mays
cacaagagcaagagcaagagcaattactgcaaaaccctaaattagctacgtatagcttctcttctcacccatggccaattcaagcaactacggccttgggcttgcttgcttcttcgccattgctgctgcggtcgccggcgggacgcagttcatggtcggcggcgccaatggctggagcgtgcccaccgccggcgccgagcccttcaacacttgggcggagaggacgaggtttcagatcggagactccctagtgttcgtgtaccccaaggaccaggactcggtgctgctggtggagccggcggactacaacgcctgcgacacgtcgtcgtacgtgaggaagttcgacgacggcgacaccgtggtcacgctcgaccgctccggcccgctcttcttcatcagcggcgtcgaggccaactgccgcgccaacgagaagctcatcgtcatggtcctcgccgcccgcagcaacggcaacggcaccggcggcggcgcgcaggctccgagcacggcgccgcagccggcgtcaccggcggcatcgccccctcccgccagctccaccccgcccccgccgtcgtcgcccgctcccaagggcgcgtcgccgcccccggcctctgctcccacaacgacaccgggtacgccgccgccccctgctccgagcgcgtcgtcgcctgctccggcgtcgtcaaccccaccgccgccatctgccccgcaggcaccgccgccgccccctgcttcgagcgcgtcgtcgcctgctccggcattgacgaccccgccgccgccatctgccacggcgaatgccccgcaggcaccgccgccgccctcggcgagctctccgtctccgagcgcacatggagcaacggctagctcgacgggcacgccatcgtcgcctcccgccggcgccgaggtcaagaacggcgccgccctcacggtggccacgggcttggccagctccttcggggcctgcatccttggctacgccatgcttgctctatgaagaagtgaagtggaccgtggacacgatgcacggaagacccgagtaaatacagtatgtctatacatgttaactgaagacatgcgatttgtgcatgctttcgttttccgccgcatgaataagaaatcaacaattctttatgcctc

SEQ ID NO: 131259 - DNA, 688 bp, Zea Mays
cttttcttcagtatgaacattcaggagatatgtgtatccttgtcattcatgcaaattgtatccctgttgtctccttttcccttccccacgttttagtgtatctttttgtagcatgaaagccaagaccttttctttgtgctccaagaacatttgagcttattccacattcttgcaggagctctttctcttccgtcaaagggttccaccgatggcgataaagatgaaggggatcttcaaagggctgaagataatttctcaaatgtttgcgcataaggagcaggagatggagattgggtaccctacagatgtaaagcatgtggctcacattggtctgggcaccagtgacacatctccaagctggatggctgaattcaagggaacagatgattcatcagcaggctctgtgagcacagctgcgcagtcaaggcagacttcttgggcctctgcagacttcgagcagccgagaagcatgctgcccatcgacatcttccaggacaagaggcccgggcaagagaacccggacgtgcagaggggggagagaaaggcgaggaggaagaagacgaagaagaacagagcgtcgtcgccgcccgcttcgtccgcaaggtcgtcttccgcgaggtccacagcctcgtttgcgacggcgtacgacgccttcagcgagtcccagagagggttcccggtcgcctga

SEQ ID NO: 131260 - DNA, 807 bp, Zea Mays
gcccggtccgagcccggcacgacccggttctatgcgggccggggccggcccgacacgaataagcgggccgggctcggacaggaaactaggcacggtgggatagcccggcacggccccgctggactcttcatcttcaacctctccgtcggcacatcctccccgcagagcatgcccggcatcctggacatcgccagccagctcgtttggtggcagctagtgcgcgccctcttcctacggcggagacaccaacaccaccggctacctcgccaccgaaacgttcacgttcggtacggttcaggtgcccggccttttgttcgggtgcagctccgccagcgccggcgactactccagcgcgtccggcgtcttcggcttcagccgcgggcccctgtccctggtgtcgcagctccagatctactggttctcctacttctgggcgtccgactccgacggcagcagctggttcgggttcggattcgacagcgagacccagaccaagaacagccgctccactcctctcatccccagcgtcgtcacgccctattcagagacatgcgcacagctcagtttggacgtcgaagcgcccacggcggctgcatcgtcgccacactctttggtgtctcacaccacgaagatactctgtttattagctgcatggctccttctcttctagcctttctgcttcatcaacttaagttgctgcatgcttgttactgtcaattgtacactttcccctctttttagtttctcaagcgatcatgcatgtgtttctcgtcgacgaaataaaccattccggacttgtttaggagt

SEQ ID NO: 131261 - DNA, 342 bp, Zea Mays
tgattaacaccatcaacttcctctttatttcgcttttcagttcgcaagccacggaagaacaggtaatcgcagagcatcaatctgccatgataaaagaacaggcgaagcatgcacccaaagcttttacagcaccttttcttctcactcgggagtcgggatctgaacgactgagagcatgagatcaacaaatgtgccagtacagtggattaatacggagcaaaaaaaaaaccacgcggcggacagaatttacaggaccaaagcggacgggtttgttgatcgcaaaaaaactctctggcctcacgaagcgaaaatcagctcaccaaactatcctcccacccaatc

SEQ ID NO: 131262 - DNA, 466 bp, Zea Mays
gaagatcagaacaatcaatgtctagcatatagcacgtttcttctgacccaaatgagcgcgagacacaaacaaagcagatggatggtctggacgcgcagtaggtttcccgagctggacaaacacagctggtgtcgagccagcgtcggccgccatacggccctcgcctgcagcgggacggcagggcagcccgcagccggcggagctgcgcgagctcttcatttcactgcgcgcggtggcgccgggaggcgcaccgcgaccgcggtggacgcggcgatccaggcgcagaacgcggcgagggcgacgggccacggcacgctccctccggtgccgacgacgacgacgacgttgacgcaaagggaggcggcgacgagcagcgagagggagagcggcaggagccgcgggcccatagccgtggccaatactaccaaataccaatagagatttttggtctggggagagcgacgag

SEQ ID NO: 131263 - DNA, 555 bp, Zea Mays
cgataggcatggatataaagtatccttgataacttcaaaatattttgagtctaaaatgatttttataaacttaagaatctataatcaaggcctgatagtagaagtgcaaatagtatgtggttaaaactaaggagctagcagaactgaagactcagttgcaagacttgctcaataaaggtttcattcgcccgagttcatcaccttggggttgtcctactatctttgtgaaaaagaaggatcaaacgctccggttatgtgtggactatcggccactcaatgaggtgaccatcaaaaataaatatcctctttcgcgcattgatttgttgttcgatcaactttctggagctaaagtgttttccaagattgaccttagatcaggttatcaccagataaggattcatccggaagatgttcccaagactgcctttactacccgatatggtctttatgagtatttggttatgtcttttggcttaacaaatgctccagctcatttcatgtacttaatgaatttggtattcatgccagagctggataaatttgtggttgtgttta

SEQ ID NO: 131264 - DNA, 2831 bp, Zea Mays
atggccaacctagcggcccagctcgctgccgtgctccaggcctgcatcaagcgtagcggtggccgcaagcccagccgctcaaacgccaaggccgcgcacgcgcgcgtcctcgccgccggcctcgccgcagataccttcctcctcaaccgcctcgtcgagctctactccctctcgggcctgccatgccacgcgctccgcgccttccgcgcgctgccccaccccaacgtctactcctacaacgccgccatctcagctgcctgccgcgcgggggacctcgccgccgcccgggacctgctcggccgaatgcccgaccggaacgccgtctcctggaataccgtcatcgccgccgtcgcgcggtcgggctccccgggggaggcgctagagatgtaccaggggatgctgcaggagggcctcgcgccgacgaacttcacgctggccagcgtgctcagcgcgtgcggcgccgtggccgcgctcgacgacgggaggcgctgccatgggctcgccgtcaaggtcgggctcgacgggcaccagttcgtcgagaacgggctcctcggcatgtacacaaagtgcgggagcgtcgccgacgcggtcaggctgttcgacgggatgcctagcccgaacgaggtgtcgttcacggcgatgatgggcgggttggcgcagggcggggccgtcgacgatgccctcaggttgttcgcgcggatgagcaggaccgggattcgtgttgatccggtagcggtctccagtgttctcggcgcctgcgcgcaggcctgcgctggtgactacaatgtcgctcgtgcaatccagctcgcacagtccatccatgcattggttgtcagaaaaggttttggatcggaccaacacgtgggtaactcgttggttgatctgtacgcgaagggcatgaagatggatgaggccatcaaagtctttgagtcgttgtccagtgttagtattgtttcttggaacattcttataactgggtatggtcagctgggatgctatgagagggccatggaagttcttgagtttatgcaagagtcaggctttgagcccaatgaggtaacctacagtaacatgcttgcttcttgtattaaggcaagggatgttccgtctgctcgtgcaatgtttgacaagataccaaagccaagtgtgactacatggaacaccctattatctggctacggccaggaggaactgcatcaagaaacaatcgacttgtttaggagaatgcaacatcaaaatgtgcagcctgaccggacaactttagctgtgatactcagttcatgttctagattaggaaatttcgaactgggcaagcaagtgcattctgcttcagtaagactactgcttcataatgacatgtttgttgcgagtggtctgatagatatatattcaaagtgtggtcaggttggcatcgcactgatcattttcaacatgatgaccgagagagatgtggtatgctggaattccatgatctcaggtttggctatccattctttgagtgaagaggccttcgatttcttgaagcagatgagggaaaatgggatgttccccacagaatcctcttatgctagtatgatcaatttgtgtgctagattgtcatccatacctcaaggtaggcagatgcatgcacaggttctgaaggatggttatgatcagaatgtatacgttggctgttccctgatcgacatgtatgctaaatctggcaacatggatgatgcacgccttttctttaactgcatgattgtgaagaacttagtggcatggaatgagatgatccatggatatgcccagaatggttttggagagaaagctgtggaattgtttgagtacatgctaaccacaaaacagaagcctgacagtgtgactttcattgctgtactgacaggatgcagtcactctgggctcgttgatgaagcagttacattctttaattccatggagagcaattatgggattacaccattagttgagcattacacttgcctgatagatgcactggcgcgggctgctcgttttgctgaagttgaggcagtgataggtaaaatgccatacaaggatgatcctatactgtgggaagttctactagctgcatgtgttgtacatcacaatgctgagttgggggaattttctgccaagcatctattccgccttgatccaaaaaatccatcaccttatgtgcttctatcaaacatatatgctactttgggtagacatggtgatgcctcagctgttagggcgctgatgagtagtcgcggtgttgtgaaaggccgcggatacagctgggtgaatcacaaggatggttctcgtgcctttatggtagctgatgatcttggaacggatgttggagaacgcacaatgttcagtgataatggggacacttctgggatgacagaagtgcacatagatgaaacctgtgctggatgatttgaaatctggtgctgctgctagcctgctaccatcttcactgaaaccttaaaccaatattagttgaatccagcaggctcaatctggtgttgggagcctcaggtttcactgttgttttagcttcaagcgttactgcaaattaggcatggtctgaacgtttgggaggaaagtgtgaactgaaggaaatgtacattgcagattggtgcaaagacaacttcaagctggattgattagtttatttcatcatattctgcaaaaggtgtgttgagccatgacatgtggaagctcataccaattcctagcttcatgcaccatgatgagtgtaaatttcttcccagatgagtcaaggataaaattgcaattgttttttgaagtgtataatgggagaaaaaggtaacactaactgt

SEQ ID NO: 131265 - DNA, 1486 bp, Zea Mays
tcgggccagagaggaattaattgttaaacaccttctcgttatccatcgctgtgccgggtgcctccgtcagcacgggacgactcggtttcggatgcagtgcatgcatgcaaactacgcgcgcgcagctttgattatttcgcgcgtcgaagcacagcaggccgagcaggccgtgtccaagatgattaacacacgtaacgtacgcacgcagtcaaactagctaacacgcgcgctgtgcagcaccatgctgcaccaaccggctatatatacgtatgtccatgtacaccaagcctcaagaagctcgcatcgcaagccgatcttttactcctccttctctaattcaagccaagacatagcttgtaggctaaagcaatggcaagcgtcgtcgtcaggcccagcaagctcctccttgctctccttgtcgcggcaatggcagcgtctcctcgggctctcgcgtacgacccgagccctctgcaggacttctgcgtcgccgacaccgcctccaacgtgttcgtgaacgggcaggcgtgcaaggacccggcgcaggtgacggcggccgacttcgccttctcgggcctgcaggacgcgggcgacaccgggaacgcgttcggctccaaggtgacgctggtggacgcgcgggcgctgcctgggctcaactcgctgggcgtcgccatggcgcgcctcgacatcgcgccgggcggcgtcaacccgccgcacacgcacccgcgcgccaccgaggtgctcaccgtcgtggagggccagatgtacgccggcttcctcgccaccgacggcaagctcttcgccagggtgctcaaccggggcgacgccttcgtcttccccaggggcctcgtccacttcgagttcaactgcggcgccggccccgccgtcggcctcgccggcctcagcagccagaaccccggcctcgtccgcgtcgccgactcgctcttcggcgccgcccccgccgtcaccgacgaggtcctcgccaaggcgttcaggatcgacgccgccaccgtgcagaggatcaaggcgcagtttgccaaaaagtagattgttgttcactgctagtaaaatggcccgtcggtgtcctttattgttgtttgtgtatagattccctggctgaatattgcccgggtatcggtcctttatttgtcatcaaattctgatttggttactttttttttcttgtctgtattaattcatcatgtccttattggataaatatttctgttttttaagtagtcgaacaatgcaattataatctatcttgcacatcttattaaaacaattaatctatattccctttatccatttctttaacggcatcagcgctgctgttttgattatgtgtttagccgatcaaggtttgtttagttcattactatttactacggccctgtatagaacggcaacaaatggctccgactccctggcacagacgcacagtcgtagacgaagtggaacaaataataaaacaaaaagaatactccca

SEQ ID NO: 131266 - DNA, 1018 bp, Zea Mays
cgtgtcacggtcgccgccacagccccagttccaggcgcggccgtacgggcccggaccacggacgcagcacggcaccgcgcggacctcccagtcccactcccttcccgcaccgcagacgcagagcagccaaacgccacctcgagcccccgagcgcctgcgcagaccgcagccaggaaaccgccttctccgacatccggctctcctccacgctcccgctactccgctccagctccaccgccaccaccaccaccgacccacccatcccatccagccatgaagcggctcctgcggcggctgtcccgcacggtggtggcggcggcggcgtccagcgaggacggcggtgcggcggcgcggcccagcagcaaggacgacgggagcaggaggcgcaggaggaagaaggcggggtccgtgccggagggccacgtgcccgtgtgcgtgggcgaggagggcggccccgtggagcgcttcgccgtgcgcgccgagctgctgggcgagccgcccttcgccgcgctcctccgccgcgccgcgcaggagtacggctacgcgcaccccggcgcgctccgcatcccctgccccgtcgccgacttccgccgcctcctgctccgcctctcccgcgaccccgcgcccgccgccggacgctacgcctacgcctaggcgccgtccgtccctacttcgtgctctccgccgccgctggagaccgtctgcgcttccgcggttttagccctactactagggggcggcaggatggggctctcctttttatttttcctctttttttacggcttgctagtgtagtagccgtactagcagtagctgctcgatggaagaactacagccgggtgtcttatttttttacccccttctggttctaggactctcctcgcagtgtggtgcgcgtctgtgcttagaaaaaagttggctggagaattcggcattaaccgatgctcctccatttccatccaggccattcatattagtgttgcctgttgatgaggtaatcagtaatttcctctttttt

SEQ ID NO: 131267 - DNA, 99 bp, Zea Mays
gcacagcggctgtgtgccacagtggccgcaagccgtcaactttcccccttgtttgctcagctaaccataataaaaatcaaatgagaacactcttacttc

SEQ ID NO: 131268 - DNA, 2059 bp, Zea Mays
gaaccgctgcagcgtgatccgctggcgctcgcggtgaggcgtcgaaggtcaacccctatcttccacctcggggggactgcctacccggtggatcgacgcagcagctttattggttccccggagacctgcaagttgcaagacgagctagacctagcaaccgctccctgccgaccttcggcgtcttggagtaaacatttcggcgtccagtaccgaagatctcccatccgctctgtcgatttgcaatggagcccggcagcccagccccgaagaaatcacggctggtgcactcagcggactgcgaaatggaggaggcgcaggcgccttccagttccaatgcagcggggggcgtgaaccagagcttgcactggacccagtggcagatcctggactccatcctcccgaccggcggcttcgcgcactcgtacggcctcgaggccgccatgcagtcccgcgtggtgaacgaccaggaggacctgaggtcgttcgtcgtccaggtcctcgacagcgccggcagcctgctgctgccgttcgtgcactgcgcatgcgcaggcaagtcccccggcgacgcagcggcgtgggccaagctggaccggttgctggacgccacgttgacgaacgaggtcgccaggaaggcgtccgcggctcagggctcggctctgctgcgggtggccgcgtccgtcttcgccgaggttccggcgctgcaggagctccggcggacgttgctgggctccaagagcgtgtcgttccaccacgcgcctgtgtttgggctggtgtgcggcttggttggattcgacggcgagacggcgcagcgggcgtacatgttcgtgacgatgagggacgtgctctctgccgcgacgaggctcaatctgatcggcccgctggctgcttcggtgctgcagcaccagcttgcgccggatgccgagaggatggtgcggaaatggagggaccgtgatgtctctgaggcgtcacagactgccccgctgctcgatgccgtgcagggctgccacgcttacatgttctccaggctgttttgttcgtgacaacaaggatcacatcgacaggagccaacgacagctgtcttctcataaaaaaaaagcaccaggtgagtacaagaatcccaggaacagattcattatgcctcatactgaccctcgtcgttattttcatgcaaacttgtacaacagagatgcaatagtgcatcattagtatcagggttgtaccctctctaccatctattacaccatcatagcatcgtcccatatattcaacggttacagaacacaaacatttgcatgtcaagtgtcacaaagaacacgcttcattatttctgttccatgatacaaagtgccacagcagttgctcgtctccaagcactgtcctaggatccctgagctgcagctgctgcagcagcttgcttggcttcaagggacttctcataatcctcgatggacttgaacagctgcgagaagtttcccttgccgaacccgccgcagccacccttttggtattcttgccccttctcatccttctccatgcacccgatcctttggatgatttccaagaacagcgttggcctgaatgacgcagctggtccagttagattttggattgcataggggtcaaggaaaccatggcattgacactagaatgctgagctatgatcttcagaattaaagtgcaggggattaatgatgagaatggaatgttgaccatcatgtaatcagctgggacatgggagctcgaattatgattcacagcatgcaaaaaggatcctcttttttgctgtcacggtcttcataaagatgcatcatgcatggaggcacaaaaagagggtttgataccttcgtactgtatatatattctatatatgcctgcaatcctgaactagctgaataccttatcctggaattgttcctttgcaattctagatgcatcatgcacacttgtaaaacaaaaaaggtgaaaaagataacgattttacctgtcccccactggcttggtgaagatttggagcagcacgccctggtcatccctgtccaccagcacccctagctcctgg

SEQ ID NO: 131269 - DNA, 1948 bp, Zea Mays
tgatccgctggcgctcgcggtgaggcgtcgaaggtcaacccctatcttccacctcggggggactgcctacccggtggatcgacgcagcagctttattggttccccggagacctgcaagttgcaagacgagctagacctagcaaccgctccctgccgaccttcggcgtcttggagtaaacatttcggcgtccagtaccgaagatctcccatccgctctgtcgatttgcaatggagcccggcagcccagccccgaagaaatcacggctggtgcactcagcggactgcgaaatggaggaggcgcaggcgccttccagttccaatgcagcggggggcgtgaaccagagcttgcactggacccagtggcagatcctggactccatcctcccgaccggcggcttcgcgcactcgtacggcctcgaggccgccatgcagtcccgcgtggtgaacgaccaggaggacctgaggtcgttcgtcgtccaggtcctcgacagcgccggcagcctgctgctgccgttcgtgcactgcgcatgcgcaggcaagtcccccggcgacgcagcggcgtgggccaagctggaccggttgctggacgccacgttgacgaacgaggtcgccaggaaggcgtccgcggctcagggctcggctctgctgcgggtggccgcgtccgtcttcgccgaggttccggcgctgcaggagctccggcggacgttgctgggctccaagagcgtgtcgttccaccacgcgcctgtgtttgggctggtgtgcggcttggttggattcgacggcgagacggcgcagcgggcgtacatgttcgtgacgatgagggacgtgctctctgccgcgacgaggctcaatctgatcggcccgctggctgcttcggtgctgcagcaccagcttgcgccggatgccgagaggatggtgcggaaatggagggaccgtgatgtctctgaggcgtcacagactgccccgctgctcgatgccgtgcagggctgccacgcttacatgttctccaggctgttttgttcgtgacaacaaggttactgagatcaatgcgcaatctgttgtattcttgccgcaggatcacatcgacaggagccaacgacagctgtcttctcataaaaaaaaagcaccaggtgagtacaagaatcccaggaacagattcattatgcctcatactgaccctcgtcgttattttcatgcaaacttgtacaacagagatgcaatagtgcatcattagtatcagggttgtaccctctctaccatctattacaccatcatagcatcgtcccatatattcaacggttacagaacacaaacatttgcatgtcaagtgtcacaaagaacacgcttcattatttctgttccatgatacaaagtgccacagcagttgctcgtctccaagcactgtcctaggatccctgagctgcagctgctgcagcagcttgcttggcttcaagggacttctcataatcctcgatggacttgaacagctgcgagaagtttcccttgccgaacccgccgcagccacccttttggtattcttgccccttctcatccttctccatgcacccgatcctttggatgatttccaagaacagcgttggcctgaatgacgcagctggtccagttagattttggattgcataggggtcaaggaaaccatggcattgacactagaatgctgagctatgatcttcagaattaaagtgcaggggattaatgatgagaatggaatgttgaccatcatgtaatcagctgggacatgggagctcgaattatgattcacagcatgcaaaaaggatcctcttttttgctgtcacggtcttcataaagatgcatcatgcatggaggcacaaaaagagggtttgataccttcgtactgtatatatattctatatatgcctgcaatcctgaactagctgaataccttatcctggaattgttcctttgc

SEQ ID NO: 131270 - DNA, 2032 bp, Zea Mays
gcagcgtgatccgctggcgctcgcggtgaggcgtcgaaggtcaacccctatcttccacctcggggggactgcctacccggtggatcgacgcagcagctttattggttccccggagacctgcaagttgcaagacgagctagacctagcaaccgctccctgccgaccttcggcgtcttggagtaaacatttcggcgtccaggcaataccgaagatctcccatccgctctgtcgatttgcaatggagcccggcagcccagccccgaagaaatcacggctggtgcactcagcggactgcgaaatggaggaggcgcaggcgccttccagttccaatgcagcggggggcgtgaaccagagcttgcactggacccagtggcagatcctggactccatcctcccgaccggcggcttcgcgcactcgtacggcctcgaggccgccatgcagtcccgcgtggtgaacgaccaggaggacctgaggtcgttcgtcgtccaggtcctcgacagcgccggcagcctgctgctgccgttcgtgcactgcgcatgcgcaggcaagtcccccggcgacgcagcggcgtgggccaagctggaccggttgctggacgccacgttgacgaacgaggtcgccaggaaggcgtccgcggctcagggctcggctctgctgcgggtggccgcgtccgtcttcgccgaggttccggcgctgcaggagctccggcggacgttgctgggctccaagagcgtgtcgttccaccacgcgcctgtgtttgggctggtgtgcggcttggttggattcgacggcgagacggcgcagcgggcgtacatgttcgtgacgatgagggacgtgctctctgccgcgacgaggctcaatctgatcggcccgctggctgcttcggtgctgcagcaccagcttgcgccggatgccgagaggatggtgcggaaatggagggaccgtgatgtctctgaggcgtcacagactgccccgctgctcgatgccgtgcagggctgccacgcttacatgttctccaggctgttttgttcgtgacaacaagccatacacgatacatatccctggacaaaactagcagccttccatggccatggctgatggctccaagtgatttctgttactgagatcaatgcgcaatctgttgtattcttgccgcaggatcacatcgacaggagccaacgacagctgtcttctcataaaaaaaaagcaccaggtgagtacaagaatcccaggaacagattcattatgcctcatactgaccctcgtcgttattttcatgcaaacttgtacaacagagatgcaatagtgcatcattagtatcagggttgtaccctctctaccatctattacaccatcatagcatcgtcccatatattcaacggttacagaacacaaacatttgcatgtcaagtgtcacaaagaacacgcttcattatttctgttccatgatacaaagtgccacagcagttgctcgtctccaagcactgtcctaggatccctgagctgcagctgctgcagcagcttgcttggcttcaagggacttctcataatcctcgatggacttgaacagctgcgagaagtttcccttgccgaacccgccgcagccacccttttggtattcttgccccttctcatccttctccatgcacccgatcctttggatgatttccaagaacagcgttggcctgaatgacgcagctggtccagttagattttggattgcataggggtcaaggaaaccatggcattgacactagaatgctgagctatgatcttcagaattaaagtgcaggggattaatgatgagaatggaatgttgaccatcatgtaatcagctgggacatgggagctcgaattatgattcacagcatgcaaaaaggatcctcttttttgctgtcacggtcttcataaagatgcatcatgcatggaggcacaaaaagagggtttgataccttcgtactgtatatatattctatatatgcctgcaatcctgaactagctgaataccttatcctggaattgttcctttgc

SEQ ID NO: 131271 - DNA, 1958 bp, Zea Mays
gcagcgtgatccgctggcgctcgcggtgaggcgtcgaaggtcaacccctatcttccacctcggggggactgcctacccggtggatcgacgcagcagctttattggttccccggagacctgcaagttgcaagacgagctagacctagcaaccgctccctgccgaccttcggcgtcttggagtaaacatttcggcgtccaggcaataccgaagatctcccatccgctctgtcgatttgcaatggagcccggcagcccagccccgaagaaatcacggctggtgcactcagcggactgcgaaatggaggaggcgcaggcgccttccagttccaatgcagcggggggcgtgaaccagagcttgcactggacccagtggcagatcctggactccatcctcccgaccggcggcttcgcgcactcgtacggcctcgaggccgccatgcagtcccgcgtggtgaacgaccaggaggacctgaggtcgttcgtcgtccaggtcctcgacagcgccggcagcctgctgctgccgttcgtgcactgcgcatgcgcaggcaagtcccccggcgacgcagcggcgtgggccaagctggaccggttgctggacgccacgttgacgaacgaggtcgccaggaaggcgtccgcggctcagggctcggctctgctgcgggtggccgcgtccgtcttcgccgaggttccggcgctgcaggagctccggcggacgttgctgggctccaagagcgtgtcgttccaccacgcgcctgtgtttgggctggtgtgcggcttggttggattcgacggcgagacggcgcagcgggcgtacatgttcgtgacgatgagggacgtgctctctgccgcgacgaggctcaatctgatcggcccgctggctgcttcggtgctgcagcaccagcttgcgccggatgccgagaggatggtgcggaaatggagggaccgtgatgtctctgaggcgtcacagactgccccgctgctcgatgccgtgcagggctgccacgcttacatgttctccaggctgttttgttcgtgacaacaaggttactgagatcaatgcgcaatctgttgtattcttgccgcaggatcacatcgacaggagccaacgacagctgtcttctcataaaaaaaaagcaccaggtgagtacaagaatcccaggaacagattcattatgcctcatactgaccctcgtcgttattttcatgcaaacttgtacaacagagatgcaatagtgcatcattagtatcagggttgtaccctctctaccatctattacaccatcatagcatcgtcccatatattcaacggttacagaacacaaacatttgcatgtcaagtgtcacaaagaacacgcttcattatttctgttccatgatacaaagtgccacagcagttgctcgtctccaagcactgtcctaggatccctgagctgcagctgctgcagcagcttgcttggcttcaagggacttctcataatcctcgatggacttgaacagctgcgagaagtttcccttgccgaacccgccgcagccacccttttggtattcttgccccttctcatccttctccatgcacccgatcctttggatgatttccaagaacagcgttggcctgaatgacgcagctggtccagttagattttggattgcataggggtcaaggaaaccatggcattgacactagaatgctgagctatgatcttcagaattaaagtgcaggggattaatgatgagaatggaatgttgaccatcatgtaatcagctgggacatgggagctcgaattatgattcacagcatgcaaaaaggatcctcttttttgctgtcacggtcttcataaagatgcatcatgcatggaggcacaaaaagagggtttgataccttcgtactgtatatatattctatatatgcctgcaatcctgaactagctgaataccttatcctggaattgttcctttgc

SEQ ID NO: 131272 - DNA, 679 bp, Zea Mays
gagaagtgaaggcaagcaagggcactgggtgggaaaacctgtgctagcttgccggcaatggcgcgccgggtgctgccgctgcggtgcaagcgctgcaatgcattcacaactaggcacatgatgtgtttcaccagagtctctctgtgagtagtgagtgactactaactagggaacccctagatcgagctcgtcccatttcggagggggcagcacatgggatgggcgtggcagaatcggccgcgggcggccaaggggagcagctagatagcgggccagtgctctgctgccgccggagatggaaaggatattcgccgctgcgagcggacagcggagacaaggcctccggcgtccggggatgtgcatggctccagaaggaacgaaggcggttgtactagtcttgttgtagacctgcgaacacacgacgacgagtgtgccgtggtgtgggcatgcaaaacttgacgggtggagctgggcatggcatgggtactcgacgaaagtgttgctgaaccgtgccggcggagattcactgctacggccgttttttatatataaaaaagttaatctttcaaaatttcacatttacatatatatatcatgtgctcaaaatctcgggagcctttggaaggtgacgagacgagacatatgtccattgagcccacataggctgggttgggtgtta

SEQ ID NO: 131273 - DNA, 897 bp, Zea Mays
ccaccaccaccacaacgccgccagcaccgaacagtggcagtatcggcagaaaggcgcggcggttcggtccgaagagcacggtgacatcgctcgcgccggcgtccacggtcggcggctccgccctcgcgctgcactacgcgaacatcgtcatcgtcgtcgagaagctgctccggtacccgcacctcgtgggcgaggaggcgcgggacgagctgtaccagatgctgccgcggagcctgaagctggcgctgaggaagagcctgagagcccgcgcgaggagcacggcgatctacgacgcgttcctggcgcacgactggcgggagacgctcgagaagacgacgctggcgtggctcgcccccatggcccacaacacggtccggtggcaggccgagcggagcttcgagttcgaacagcagcagcagcgggtcgtgtcggagcggagcgtgctgctgctgcagacgctgtacttcgccgaccgggagaagacggaggcggcggtctgcgagctgctcgtcggcctgaactacatctgccggtacgagcggcagcagaacgcgttgcttgactgctctagcagtgacttcgatgattgtgtagaatggcaagtccaatagagccgaaagccaaggtcaggtctctgctctggtccgtagtgtatacaacaagtgatgtgattcagcgaagggtacttgtgatttggttttgcttgttttctctttttttttgctacgttgttcttggcgcatttttcacatgatatcatcgtctattgttagatgaaatgtagaggtttgtgaactggaaagaccctctccggttgtgcataattaatcttgtagaatcattgtgtgaagcaacctgaaaacaggtttggtacttagtaaagtacagctgacagac

SEQ ID NO: 131274 - DNA, 1067 bp, Zea Mays
ccattttcttttcttatccccagccgccacaaagacagccggccgcctgggaacttttttttcttttcttcttcctggccgaccgcacctcccacttctctctatttttttttccttgcaccatggcttggcaaacggatctaggctggcttcctctctttctgttcttctcctgctctgttctttgcttctttcttccccaccgaacagctcaaaccggtgagctagccgctgcctgagcgcgcagccggctcacatatccgaggatgaccggattaatgttcaggggcatgcgggttttaccgccggtgtgcgcgtcccctcagtagggcgcgccgccgtcggtcaaacgccgacagctgtccctgttgacagcagagaaaaggggtcgacctcttggtcgacttctgtgactgtgcacgcccagatcttatctcccttacctctttgactcgatctcgttctctgtgatgtatgagatggatctaatgtaatattcgggatcgagttatgagttgatagaacgtagattttctgtgaggatttttttgtaccttttctaatctgctctgtcatctaggccgtggatgtaaaagatcccgagccactgtgatctctgttgacccagatttaaaactgatcagggttaggttattaaaccctaaccctaaaacatcgatctgtttttactatctcgaatcttctgggtttggccgagaccaaatctctgttagtggccaaaaccctagatttagggttaggtaaaccctaacccgagagataaaaaatattctttctattttaatctatctgttctcgggtgataaacgaaaaaaatagttcaatcatgttgatccgagacttttctgtgatctcataaaactgatgcggattaggagatctagggttcttaggacggctttgataccattgttagaatctatactgcctaggatcgattcctaagtccctagaataccaatccgtctgtaactgaaagtaaaatcttgatgacgtgtagatctgatctactatctactgagaggaacggggaaacacacctttat

SEQ ID NO: 131275 - DNA, 1249 bp, Zea Mays
atcccaaggtcatttcggttaatctccacacgcatcgcggacacggagacttgccttccttttggtgcggaaaaagaaagagaggagaagcgaaggaggttctcagttggagcggctccctctccccgcgcgcgccaccgcctccgatccgagcagccgcctacagtcaacccattcaacctcaaatgttccttgtgaggtatcatgacagaacagcaggaaggtgttagcaagagctcttcctcaagtattagcagcagcactcaggagagtgaggaggaactgaccatcggtacccttataaccgaagcaacaaacacaacaaacagtgccaagagtcttggaaagcgcctttcacacttagattcgatcccgcacactccacgtgttaatgggaaaattccagattttaataatgcgacaattgatcatgaatcattattagaaagattaggcacttatggcttagctgaatatcaaatagaaggagatgggaattgccagtttcgagctctggcagaccagatattccgcaatcctgactatcacaaacatgtgaggaaggcggtagtgaagcagctgaaggagttcaggaaacactatgaaggttatgtgccaatggaatataaggtttacttgaagaaaatgaaaaggtctggggaatggggtgatcatgtgaccttacaggcagctgcagacaggtttgctgctaaaatatgtctgttgacatcgtttagagacacatgcctagttgagatagtccccagagatgccactccaacaagagagttttgttaagtttctggaatccacatgcacaatacaaggtcagtaaattttagtgtaagatttggtgcctcattatttgcttgtacctttttgcagagctttggctaagtttctggtgtgaagtacactacaattcattgtatgcagttgaagatcttccaacacggaaaactaagaagaagcattggctgttctagctcgccaggctttggtgatttcttggtatgctattggtcttctctttgtagtccagcagcatctgtaagcctgcttagttatgcctttgtttgttgtaagttgtaacttgacctggaatcaaattcatttaagatcatgcaaaatacagtgagctcttgcttcgtccttggctgaaatatttccagcacatagtaaacatgttttcagggacctattttttattttttttggggggggggggggggggtattttgcttcgtag

SEQ ID NO: 131276 - DNA, 1151 bp, Zea Mays
atcccaaggtcatttcggttaatctccacacgcatcgcggacacggagacttgccttccttttggtgcggaaaaagaaagagaggagaagcgaaggaggttctcagttggagcggctccctctccccgcgcgcgccaccgcctccgatccgagcagccgcctacagtcaacccattcaacctcaaatgttccttgtgaggtatcatgacagaacagcaggaaggtgttagcaagagctcttcctcaagtattagcagcagcactcaggagagtgaggaggaactgaccatcggtacccttataaccgaagcaacaaacacaacaaacagtgccaagagtcttggaaagcgcctttcacacttagattcgatcccgcacactccacgtgttaatgggaaaattccagattttaataatgcgacaattgatcatgaatcattattagaaagattaggcacttatggcttagctgaatatcaaatagaaggagatgggaattgccagtttcgagctctggcagaccagatattccgcaatcctgactatcacaaacatgtgaggaaggcggtagtgaagcagctgaaggagttcaggaaacactatgaaggttatgtgccaatggaatataaggtttacttgaagaaaatgaaaaggtctggggaatggggtgatcatgtgaccttacaggcagctgcagacaggtttgctgctaaaatatgtctgttgacatcgtttagagacacatgcctagttgagatagtccccagagatgccactccaacaagagagctttggctaagtttctggtgtgaagtacactacaattcattgtatgcagttgaagatcttccaacacggaaaactaagaagaagcattggctgttctagctcgccaggctttggtgatttcttggtatgctattggtcttctctttgtagtccagcagcatctgtaagcctgcttagttatgcctttgtttgttgtaagttgtaacttgacctggaatcaaattcatttaagatcatgcaaaatacagtgagctcttgcttcgtccttggctgaaatatttccagcacatagtaaacatgttttcagggacctattttttattttttttggggggggggggggggggtattttgcttcgtag

SEQ ID NO: 131277 - DNA, 1210 bp, Zea Mays
atcccaaggtcatttcggttaatctccacacgcatcgcggacacggagacttgccttccttttggtgcggaaaaagaaagagaggagaagcgaaggaggttctcagttggagcggctccctctccccgcgcgcgccaccgcctccgatccgagcagccgcctacagtcaacccattcaacctcaaatgttccttgtgaggtatcatgacagaacagcaggaaggtgttagcaagagctcttcctcaagtattagcagcagcactcaggagagtgaggaggaactgaccatcggtacccttataaccgaagcaacaaacacaacaaacagtgccaagagtcttggaaagcgcctttcacacttagattcgatcccgcacactccacgtgttaatgggaaaattccagattttaataatgcgacaattgatcatgaatcattattagaaagattaggcacttatggcttagctgaatatcaaatagaaggagatgggaattgccagacttaataggtcgtcgggagggggagtactattgcttcaatccatcttctacttagttgtttcgagctctggcagaccagatattccgcaatcctgactatcacaaacatgtgaggaaggcggtagtgaagcagctgaaggagttcaggaaacactatgaaggttatgtgccaatggaatataaggtttacttgaagaaaatgaaaaggtctggggaatggggtgatcatgtgaccttacaggcagctgcagacaggtttgctgctaaaatatgtctgttgacatcgtttagagacacatgcctagttgagatagtccccagagatgccactccaacaagagagctttggctaagtttctggtgtgaagtacactacaattcattgtatgcagttgaagatcttccaacacggaaaactaagaagaagcattggctgttctagctcgccaggctttggtgatttcttggtatgctattggtcttctctttgtagtccagcagcatctgtaagcctgcttagttatgcctttgtttgttgtaagttgtaacttgacctggaatcaaattcatttaagatcatgcaaaatacagtgagctcttgcttcgtccttggctgaaatatttccagcacatagtaaacatgttttcagggacctattttttattttttttggggggggggggggggggtattttgcttcgtag

SEQ ID NO: 131278 - DNA, 596 bp, Zea Mays
atcccaaggtcatttcggttaatctccacacgcatcgcggacacggagacttgccttccttttggtgcggaaaaagaaagagaggagaagcgaaggaggttctcagttggagcggctccctctccccgcgcgcgccaccgcctccgatccgagcagccgcctacagtcaacccattcaacctcaaatgttccttgtgaggtatcatgacagaacagcaggaaggtgttagcaagagctcttcctcaagtattagcagcagcactcaggagagtgaggaggaactgaccatcggtacccttataaccgaagcaacaaacacaacaaacagtgccaagagtcttggaaagcgcctttcacacttagattcgatcccgcacactccacgtgttaatgggaaaattccagattttaataatgcgacaattgatcatgaatcattattagaaagattaggcacttatggcttagctgaatatcaaatagaaggagatgggaattgccaggttagctttttgtatcatgtacagaattaccttttcatttgtatgaagtaaatttatcgagatatattattattactctacatcaataatct

SEQ ID NO: 131279 - DNA, 786 bp, Zea Mays
aatacaacaacagcagcagcagcagtcttttagcccaagtaagttagggtaggctagagctgaaactcaatagaaaccacaagtcaaggttcaaagttcaaacacattttgggtttcacctttattaaaatagctagctttaacatgggctggacaaacctatcaggctatcacaaccctcctcctgttcctccctttccacaagttcgagtggtaacaatctgtcattctatatcttcagtagaaactgtgaattcaacagaagtactgcagtttgaccatgtttatgatgcttttaacattctctgtaggttatgtattggagaagagtcgcggacagaattcagatgctgaagtcagcaattttacatcccgagctgaattccagagcataacctactggaatcacgatacagcgccatcagcagaggattccctcccgaggtgcttccattggcttaccgtcgctaatgcgatgcatagagcagtgactgctgaagacctgactaacatggcagcaatgcagaatcaggacaagtagattcgttctataacgaagccatgcaatttcgatttggtgaaccatctcgacaaaggatcttgtaacaaccaacatgttatttgaacgcatccagtaggtaatgtttaggctttggggtaagatgcttcaggagatccttgttcagtagcatctgaaaatgtctgggtaatttagattgggacctgtatcagactatcagttatctccaatattgtgaaagagtgccggtgttgcctttgtgttca

SEQ ID NO: 131280 - DNA, 785 bp, Zea Mays
gtttttcttcctgtggtcgctcgttgagtgcggaaattccacgaacgtgagctcaacatggagccggcgacccctccggcacccgccgccggcgtcacggctaccgtcgacctctcctcagtcgcagccgacctcggtggggcgcacctcctgccctgcggcatcaggcagaacggcggcgcccccgtatccgactacttcaagcctagggacacaggtgtggaggtggagggggtgaagatggaagaggccttctttcgtgggaggaaactgcagggcactaccctagctctcccggatggctaccgaggttatgtattggagaagagtcgcggacagaattcagatgctgaagtcagcaattttacatcccgagctgaattccagagcataacctactggaatcacgatacagcgccatcagcagaggattccctcccgaggtgcttccattggcttaccgtcgctaatgcgatgcatagagcagtgactgctgaagacctgactaacatggcagcaatgcagaatcaggacaagtagattcgttctataacgaagccatgcaatttcgatttggtgaaccatctcgacaaaggatcttgtaacaaccaacatgttatttgaacgcatccagtaggtaatgtttaggctttggggtaagatgcttcaggagatccttgttcagtagcatctgaaaatgtctgggtaatttagattgggacctgtatcagactatcagttatctccaatattgtgaaagagtgccggtgttgcctttgtgttca

SEQ ID NO: 131281 - DNA, 545 bp, Zea Mays
gtttttcttcctgtggtcgctcgttgagtgcggaaattccacgaacgtgagctcaacatggagccggcgacccctccggcacccgccgccggcgtcacggctaccgtcgacctctcctcagtcgcagccgacctcggtggggcgcacctcctgccctgcggcatcaggcagaacggcggcgcccccgtatccgactacttcaagcctagggacacaggtgtggaggtggagggggtgaagatggaagaggccttctttcgtgggaggaaactgcagggcactaccctagctctcccggatggctaccgaggttacatcactttcttccttctgccttcttcaagcctacaagatttctgagtttatcatcagtttgggacctttggagtgggaagcgtgttttttctcctttttcttcatcgattcgtagcaatgtacgttgatttatggcctgaatgatagtgaagctgtatagaatcagtgtaaccgtaactagatgcgccaaaatccgacattctctccaaattgcatgcacgcctttaagg

SEQ ID NO: 131282 - DNA, 99 bp, Zea Mays
ggtcgtgggcacattgctgctcaatgtccaagtaaaagaacaatgttgttgaatgaaaaaggtgaatgggaatcaagcagtgatctagaagacgatgga

SEQ ID NO: 131283 - DNA, 2313 bp, Zea Mays
atggcaagtagtccagcttctgttaatgactattgtgatccgaagactgatccagcaaggaaggcaaagaacacacgtgatcctggttggaaatatgggtactggacagacgatcctggttggaaatatgggtactggacagacttgatgttgtgacctgcactctttgtaggatcataagactgaagcaagaccttgctggtggatatgaagatgcaaaaatgtgtgccaaaacaactactgcaatcaggaaggaaatgagagcatacttggaaatgcacaagaggagaagacccttgagctttgaagatgatgatggtgatgtggatgtgctggaggtggtaccacaggaggggaacaacgttgatgtggtggaggagataacacaggacaggaacaagagcaatgcagctgtggcagagtcccaagcctaaggcagctagcaatgggaagtctattgtccaaaatcagggactgcagccaaaagaagacaatcagcaatgcaattcaagcccaagcctaaggcagctagcaatgggaagtctattgtctagttgcttagaagaactcctgaagaagtggttgagcaaagacactcggggaaggctcaaaaatacaattgaggccagctgcaagaccaaggaggagaagcactatgtagatatgcagtgtgccttatggttttatgaggctggcataccttttaatgtagcaacatcaagacagattgagattgcacttgaggccactgcacagtatgtctaggatacattccacctacatcatatcagcttggggagccattgctagaggctgttgtaaagatgacgagcaatgtgagaaaggaccatgagcgagcatggaaacattttggctatacactcatgtcagatgggtgtgccgataggaggggacaccatttgatcaatttcctagtgaacagccctgaagggacatatttcttggagtatgttgatgcatccgatgaagtgcacaatgatgaaatacttgcagatttattagaaaaaagaattgaagagattggaaaggacaacgttgttcaagttatcaccaataacggtgccaactacaaggcagcaattaggcttctaatggagagggttccaacactattttggagtccatgtgcagcacattgcttagaccttatgttggaagatataggaaacttaaaggactttaagaagcctattgcacgtgccaagcgtgtgacaactgaacattcatatataggcatggcagaattcttaatacaatgagggagaaaacaggtggtagagatcttgtgagggctgcagccacttggtttgcaacatcattccttactttcaagagtccgtacaagcacaaggatgctttgaaggctttaattgttagtgaagtatgggttggaaacaagttggcaagaaccaaagccagagcggatgtccatgacattgtcctatcaacccaattctggaattcaattgaagattgcctatgagcttgagctccacatcttatcatgcttagggtagtcgatggtgatgagaggccagcaatgccaaaatttcaagcactaatgagtcatgcaaaggagaccatcaataaggcctttgatatccaaagcaagaaatctttgcttaagaggatcatggacattgttgagagacaatggctgaagcaaatggaccatcctttgtatggtgctgtgttgtacttgaactcaggaaaatcgcactctctcattaaagaagatgatgattctgctgttggacaattaatggggctggttccttaatgtgcttgcaaaaatggtggaagatgatgaaactagaaacaagattgatgctcaagcaagggactatgaactttttagaggcactgccttatcaaataaaatacccatacaaaatcttgattcggtcagcccaatcgatcgctggggttcttatggtggacgtgctattgaattacaaaggtttgctaggcgtgttgttagtctttgtgcttcatcatctagttatgaaagaaaatggaacacattcggatttattcataagaaaagaaataggctgctccacaagagactgaattatattgtgtctgtgtcatataatcagaagatgaagagcagatttcatttagacgtgagaaaaggggggaaacattgaccctttggtcatttcagagtttgattgggacaatgagtgggcagactcattgcatgtgccctctcaaggtgttcatgggtcagatctaacatgggagcttgttgatgaagctatgggtgcagctaaagcactactaggc

SEQ ID NO: 131284 - DNA, 209 bp, Zea Mays
ttttttcctgtggtttttttgtttcctggttttttaattttttttgttttcctgtttttttattttttttgttttcctgactctttgcatgatgtgcggttttgtcgagctgtcagaagaaatccaaacagccatgacatttgcacatccagccgtactctgcgatttacacatccagctcttcttgggtcaggtgtcccccagatctg

SEQ ID NO: 131285 - DNA, 310 bp, Zea Mays
cccagattgctaaaagaacatgagatacaacaaaagctgaatggggctgctcaacatgagtggtagtacaagactctagcaggaactagtagtaggagaaaaaaagaagaaacaaaaacaaacccaacaacacactactttggcccttcggtttcaaccgaaagggtgccaactgaaatctgacaatgggcctcttatttttttcctggttttttattattttttattttcctgactctttgcatgatgtaaggttttgtcgagctgtcagaagaaatccaaacagccatgacatttgcacatccagccg

SEQ ID NO: 131286 - DNA, 228 bp, Zea Mays
atggagccggcgacccctccggcacccgccgccggcgtcactgctaccatcgacctctccctagtcgcagccgacctcggtggggcgcacctcctgccctgcggcatcaggcagaacggcggcgcccccgtatccgactacttcaagcctagggccacaggtccggatggctaccgaggtgacatcactttcttccttctgccttcttcaagcctacaagatttctga

SEQ ID NO: 131287 - DNA, 1779 bp, Zea Mays
cgaccagagccagtccgctccgctccaccccttgctcacctccgcgacccgcaccaatggcgacgcccacggccccatcccacttacccctcgccaccgcctccgcgtccacctccttccccgaccgcttcctccgcacgccgtgcgcgctgcggccccgctcttggccccgcctgcgggcgggctccgtcaaggagtggcgcgagttcgaggacgacgcgggcgccgtcaaggagtggcgggagttcgaggacgccgtcaggaggaaggacctcccccgcgcgctccaattcctgcagtccgtggagcccgcggcggtgcaggtcgcggtccccgtgccgccggggcgggactgggaggtgctcgacgcctgcgtcgacgccgacgacatgcgcctcgtcggccgggcgtaccagttcctcgtcgaccgcggggtcctcgccagcttcggcaagtgcaagaacatcgttctggaatggccaagagaagtgacaccaacggttttgaaggagatgaccggtttggaagctgaaaaacttgcgccgaagaaatggggtctgtcgggaagttcaccgtatgttctcattggatttcttggaggcgtatcctttctactaacacaaggggtcgatctacggcctaaactgagtgctgtattgggattagcagcagccgatgcaatgttgctcggtggtacttgtcttgctcaaatctcatgtttctggcctccgtataaacgtcggatccttgtacacgaagcaggccatcttcttactgcttatctaatgggctgcccgatacgaggagtcattttggatccatttgtggcattgcgaatgggcatccagggccaggcagggactcaattctgggatgaaaagatggaaaaagaactagctgagggccatctatcaagcacagcgtttgacaggtactgcatgattatgttcgccggaattgctgctgaggcacttgtttacggggaggcagaaggtggagaaaacgacgagaacttattcaggagtctgtgcattctactgaacccaccccctgctgttgcacagatggcgaaccgagctcgatggtccgtcatgcagtcttacaacctcctgaagtggcacaagaaagctcatagagccgcagtcaaggcgctggaagacgggcacagtctcagcgttgtgatcagaaggatagaagaagccatcgcttctgacagcaaataaatatgaccgttgatcctttacatgtgttcttgtcaaccaagctttgttggcagcttccacaggacgcggaagaaggagaactttcttaattcgcgcgaagggttagtgtgtgttggaacatgagtggcgcttttcaaagaaagaaaggcagaagatccttggagctggagggaatagcggagaccacgaccagggcgtctgatggacggactagatcgagtgatacatccgttggagattttaaggaagtcaaaaggccgttgtgaacttgtgattagtgtcgatgccagatatggcagatgtgcatagggagatatgactatatgatgtcttgatgagtatgcagacatgagctattttgcaatggatggataagtaccgttggtacttgaggtacttttattgtttattatttatttatttgcaatcagtttggtaattaagaaaggtcgggttgcctatttgagctgccgtccggcgtccgctagagatggatactgcatatccgaattatagaataaatttaatattatatatgtatatatatatatataat

SEQ ID NO: 131288 - DNA, 1277 bp, Zea Mays
gttttgtgtttgtgtggcttttctggttcgaaagacggattagaccaaggtatcaaatttggcttccgctagctgcccatctcgaaacagcatgaaccggcccgatgacgcgcctcaggaggaagacaaatgaaataccataaatccaggctcagcccgaaattaacccaatagcagcccaaagcaaaaccccagcaggaagcaacgtcgacggcccattaactccaacagtcccaggacccccctgcccatccgacggcgatcacgcctcgcgctcgccaggccttatagtacccctatcctagggtttactcgctcccatccactcccaagtcccaacacccgtcggcgtcgagcagcggcagcggcggcggcgatgacgacgagcctgaagaagaaccggaagaagcgcgggcacgtgtcggcggggcacggccgcatcggcaagcaccggaagcacccgggaggccgcggcaacgccggcggcatgcaccaccaccgcatcctcttcgataagtaccacccgggctacttcggcaaggtgggcatgcgctacttccacaggctccgcaacaagttccactgcccgtcggtcaacgtggagcggctctggtcgatggtgcccgccggcaaggccgcggaggcggccggcgcggaccaggccccgctcgtcgacgtgacgcagttcggctacttcaaggtgctcggcaaggggatgctgccgtccaggcccatcgtcgtcaaggccaagctcatctccaaggtcgccgagaagaagatcaaggctgccggaggcgccgtcctgctgaccgcttaggtccttttgcatcttgtttcaactatctgcgctaagaaatattctatctttttttgggtggatctatgagaccctggttttgagcacttggtaacgaatatgagttcgattatatcgatgctgcacacctcttgctgcatgtattattcattctatgcagttgcagttcatgtgggctgtgctactgagatatgaaatgttttggcatttttctgatacgtctaattgtggccttgtggtcaggcattgccctccttttttctggtgtattgttgcaaaacaacaaaatcaattgatttcagtcttgcccactaattttctggcgtatggctgcaaaacaacaaaatcaattgaaagttgtcgtctattttatctttttatgctatgctcctaagaaaatcaattgctggacaaccatgtgttgacaccagcgacggtagatacaaaaataacgagaaac

SEQ ID NO: 131289 - DNA, 814 bp, Zea Mays
aacacgaggctcccggactcctcagttccttcgctcctctgtaacccggggcggccgacgaggccgggaccaccgacggcgacgatgggcggcggcgagggcaagtccaagaaacgccgctcttctacctcctcagcggatgaagaagggggggaacggaagaggcgggacaagaaggagagcaagaggaggagccgagacgacagggaggatgacgatgacagacacaagaagaaggggaaacacatcgacaggaacaaaggaaaagagagagattcgaaggataggcattccaaggagaagacgagcaagagaaaagacaaggacgctgccttcaaagaaatatccaaggatgactactttgcaaagaacaacgagttcgctacctggttgaaggaggaaaagggcaaatatttctcagatttgtcttcagagtctgctcgtgatcttttcttgaagtttgtgaaacaatggaacaaaggcaagctgccatcacaatactatgaggggattacgagtggcccacgatcagcgcacaattggaacatcaaagcatgatacgttttctggttaatcgggtccttcggcttgagatgttttttgctttcctggcgagatttttctaatagttgcatctagcaactgcttttaatattctgggttgttgtatttaagctgatgttcagaatgtctgtctaagcaggagggtagatcgtgggtctctctagtatccagtgtttaacatcaacgctacttttccattgatcactactgtttgatcctacaatgagcaaacatattgtttctaaggaaa

SEQ ID NO: 131290 - DNA, 644 bp, Zea Mays
gcctttcaagcaagcgcctcacaaggtatgcacacatagcttagccctctctctctctctctctctagctacctccatcatctccatctctactcctctgattatttcaagaaaaaaaggtagccttttccagttcttcatccatggcaatgcgattagatagtttttctacttcggatcgtgtgcccttttattaggtttcctttatgtgactggtagtgctaggttcatttcgagctcatgcgcatatatgccccatgctaacaataattccaatcaagattcaagttgtccacccactagcgccgttaaccctttgtttgttttgtttgcttcactactcctcgatcatgtaggaaaagatctcctagcagctagccagctacagcctacagcaagagatcggcgcgttgattgcttggatcgaccgaccggccggggtggtcgccatgggacgcgggaagatcgagatcaagcggatcgagaactcgacgaaccggcaggtcaccttctccaagcgccggggcgggctgctcaagaaggccaacgagctcgccgtgctgtgcgacgcgcgcgtcggcgtcgtcatcttctccagcaccagcaagatgttcgagtactgcagccctgcctgcaggttggtt

SEQ ID NO: 131291 - DNA, 135 bp, Zea Mays
taaacttcgagaccgttcacttgacatcaaagctcgacatgagatattgtgctctagttgaggtttgtgcatcaagaatactttttactagagttcactcgaggaatgcaagaattagaataggccaattagatc

SEQ ID NO: 131292 - DNA, 621 bp, Zea Mays
gtccaccccggtccccggcactcatcagtcatcactcctccagcttgctcgagtcacgatccctccctcccccccacacaggcaggcgccaggaaagcaagcaagccgccgggacgcgcgggcgggcggcgcatggcggaaggaggcagctccacggcaccctcggccccgccgtgctgcggcctggcgcggctactgcggcgcctgcggcggcagggcagccgggcgctgtgcgcggccgcggcctcgcgccgccaccgcgcgtcgtgccgccagtacgacccgctcagctacgcgcgcaacttcgacctcggccgcgacgccgccgacgccgaagacgcgcgcatctactacgcctgctccttctcctcgcgctacgcgctcgtcccgccccccgcctcctcgtccgccgtcggccccgctgctgccctggatagcctgccggtcgccgccaacagatagtgcttgtgctgtcaaatcaaatgattctaggtagtatagggctataggcagcttggctggtgcaccgtcctccttcctgtacattaaccaaggagaagggtacaattttattcccttttccctatttttttaaagtttagacctatggatgaactaata

SEQ ID NO: 131293 - DNA, 103 bp, Zea Mays
caataaccctaagtttgacttgtaaaagcttagagatactagctattacagccacatgttggcttcacaatttgaagttcacttgcaaatttctcttttcgag

SEQ ID NO: 131294 - DNA, 955 bp, Zea Mays
ctagagcagcttcccatgtacaagaaaactagagcataaactgcaaagtgacatcattctttggatgaagatggatgatgtccaagaaattgaacaaaggtcccaaccacaaattttctggacacaagaaatgtctgcatgtgctttgaaatacttggcccagttggttgctgatggaattcgagtagacaaaggtttcaaaagctcgcactataatcaatgtgctaaagtggtaaaggaaagatttcaggttcaagtttctggttctcaagttaccaatcatcttaagacatggggaactcgctggtcaaacatctgcaattataagaagattagctcagcccattttgatgagcaaactggaacaatattacttgatgagaagaactacttggaacgggtgcagaaaaaaccatctgaagctaaatttttcaacaagccacttgagaactaccattacatggctgtcatatttgggaatcagcaagcaactagactgtttgcaaaatgcaccggtgatcccctaggtttcgacacatctgaaagtgcagatacatatggtgtgggttattctggagacttggctggtcatgagagtaacaatgcaagtccgactcgtgatagtggagaatcattgaacccaagtggtcaagttcgtgatggtggaggctcatctactcgaagtggtgcaagaaggaagagagggcgcatgatgttggaagatgaggatccattgatatgcactgtcactgaagcttttaagactctttcagatgcaatcaagcagtcagcaccacaaccacgtccggtaatcccacccaacctatggactgtgatgaaagaaattcctgtctttcaaagagagcatatagcacactattatggctacttgtgtgagaatccagtccttgcttatgcctttctagagatgggactagatgatcagatggtatga

SEQ ID NO: 131295 - DNA, 382 bp, Zea Mays
gcaaataatcatgattgatggcattgcttttctctgaaggccaaagttgagggacatccaagacaagatgcaagaagaagtgaggaagttaatgtcggggcagcagcgccctcccactgtcgggggaagcctctacactacgagatcacagcgtccccgaaggccaccactcgtggcctcttgcagcccgttcggccgcacgggaacaggcatggttgctcgggtagccgcggtgaacacggagctggcgtacatcttcctgaggcaccatctggccgcgctggagccattccttggcgctcccccctacgcggcgtcttgaatctggcggacaaactgagggaagcgctggtgaaagctggagctgaaagagggatccttg

SEQ ID NO: 131296 - DNA, 1171 bp, Zea Mays
gaacacggccttatcttagagtatgaaactgcggttgtaaacatgtttagcgccaactgctatgtacgtgatcaggtgcggcgctacgtgtaccatgacgtcgtccgcctcggcgacctagagaagctcatcgactgctcctgtgtccagacctacacaatcaacagtgccaaggtgatcttcctgaagccgaggccgcagtccaggcctttcaagggctccggcaacatctgcctcacgtgcgacaggatcctccaggagcccttccacttctgctccctctcatgcaaggtggaccacgtgatgacgcagggaggggacctgtccaacatcctgcagcactacggcgccggcggtggcggtggcggtggcacggcggacccggaccgcctcgcgttcccgaggttcgagaacctccgcgtcgtcgacggctcggacctcgacgacgacgtccaggtcgtcaccccagactccaccctcgaggacccgaccaacaacgcgggcggcgggtccagcgacaacggtactgacgacgccagacggcaggtcgtcgtccatggcggcggcgaggcggccaagcggaagaaagggggcggcttcttgccccagatcgtgctgtcactcggcggcggcggcggcggcggcaacaggaggaagggtgccccccacaggtcccctctggcctaagcagcgctaccttcatgcatgcgtccccctgctgctgctcgttatatatcacaagtcacaacacacgtagcgcgctgtggttgcatgcagtgatgatggtgtgggtggtagctacagtattaattagtagtagcgtgttataatagtatcttaatggtgattagcctcgtagagagacgacgacaagctggtagctggtcgatcggttttgcttgggggggaaggtcttggtggccttgtgatccgtctagcagctcgctaggaccaaccatggccgccgcgccatctcatgagactttagagagagagagagagagagagggtcatgggggaggtagaggggggagagacggttgtaaaagcagttcccattgttacaggcaccaggtagtaactggtcagtggggcccacttctgcaggcggtggggcccatacgatcgaggtggctaccaattttgtatttgatgtaccaagggttactcg

SEQ ID NO: 131297 - DNA, 977 bp, Zea Mays
gtcaatccccgaacgaggcagatgcgcctcgatctggttgacccgcccgccgcccccatcgcccgtccaatcgaaccgctctgtggcggtggtgttctggtcagccggcgatggcgacgccgacgccgatgggggcggtgcgggtggagagggtgcgggggaggtcggcgctgacccgctgcttcgccaggtacccgctcaagctcatcgccccgtccagggtgggcccctcctcctgtgacgccgtctggctctacgccctcacctacggcggcggcatcgtctccgtgagtccgaggacccccccccccgcacacaaccctccacttcccattctctccgttctcgcccgctgcgccgttgctgggcactcgcggttcggagatgcttgctgtagcgtgacggtctcctgtcctggtgccgcgcttgctcctgcgcccgcccttgcagggggacaccgtgtcgtgcacggtcagcgtcggcgacggctgtacggcggcgatcaccacgcaggcctcgaccaaggtacgctgattgctcgattcaagcctggctctgcgcgtcctgcctatactatacttataccatggcttgttacgtttggtgttatgatgcttacccgtgtatgctgtatggtactgtatacaacattgaccagagaatgtctggattccaattaccagctctgtaggaatgtatgaattatgataaactggagcctatgagccttctacgtgcactgtttaggctggactagtagtttggtactcgtttcccctcaacaaataaaggcttgggctaaaaaaatcctacctaatggggaagtcgttggcgaagtcacaaggccctccacttttcattataaaaccgataaaccagaaaaagatggattgttttgcgaaagaatctttggacccataaaaagcggaatttgtgcttgtggaaactctcgagcgagcgtagctgaaaacgaagac

SEQ ID NO: 131298 - DNA, 1746 bp, Zea Mays
atgtacgcacatacaggagagaaaaaaaaaagcaggacaattcgactcctccggtcctcccttgccttggtcagttggtcatctccgccggctcaacctcaacgcgggtagcacgaccaccaccagtccaccaccacgcccacctccccctctctcctcctcttctatagtcaaaccacccccctccttccacaaaccttcgcagaaggggcacaccggcaaggacgcagctttttcccgtctccttctgggttctacacttctacttctttccccacctcgccttcgttccgcccgccaccaaatcgcgaggcagcggagccagcgacgccgttcctttcgttgtgcttccttgggttcttgctgccggccgccggcgatttggcgaggtccgtttgggcggcaggtagaggtaggtagaggcgatcgtttcttggcggctggtggaatggatagccacgccgctgtgtcgagttccgtcggatccggggatggcgccgcgcagcccaggaggaactccaggaagcccaagtattccaagtttacgcagcaggagcttccagcttgcaagccgattcttactccaaaatgggttatttcagtatttgttcttgttggtgtgatttttgtcccgatcggtattgtttcgctgcgagcttcacatcaagttgtcgagatcgttgatcggtatgatgacgcatgcatccctgctaatgtcactgagaagcttgcttacatccagaatgatagtataccaaaaacctgcacaagaaatctgacgattacaaaggatatgaaacaaccgatttttgtatattatcagctggataacttttaccagaatcataggaggtatgtcaagagccgtaacgacgcacaactaagagataaaagtaaggcgagtgacactaccaattgtgatcccgaggccaaaacagtagatggaaagccaattgtgccttgcggtcttattgcatggagcctgttcaatgatacatataccctcatccacaacaataaaaccttgagagtggacaagaaagacatctcttggaagagtgacagagaccacaagtttgggagtgatgtcttccccacgaacttccagaaaggacctcttcaaggtggaaaaatacttaatccaaaaatcccgttgagtgaacaagaggaccttattgtttggatgcggactgcagcgcttccaacattcagaaagctgtatggtaggatacatgttgatctcaaggaaaacgatacaattacagttcagttggagaacaactacaacacctatagcttcagtggcaagaagaagctggtgctttctactgcaacctggattggtggaaagaacgattttctgggccttgcatatctcactgttggtggaatctgcttcgttttggcatttgcattcaccttgctatacttgataaaaccaaggaaaatgggagataacaactacttgtcatggaacagacccactttaggtcgctgatatggttttgaagttaaatgtttacacggacaacaaattcatttatggttcagatgtatcttgtaccacatcgaatttttattcatgagcattggtgtagaatacatacagagtaggcatgtgtatacgtgcgacaactttggatccatccttgcacagattgtacattaaactgaaacagatagctttatgttctccaaaattgtataatcagaagttaatgtcagtttcgatgctttgctcttctt

SEQ ID NO: 131299 - DNA, 1854 bp, Zea Mays
atgtacgcacatacaggagagaaaaaaaaaagcaggacaattcgactcctccggtcctcccttgccttggtcagttggtcatctccgccggctcaacctcaacgcgggtagcacgaccaccaccagtccaccaccacgcccacctccccctctctcctcctcttctatagtcaaaccacccccctccttccacaaaccttcgcagaaggggcacaccggcaaggacgcagctttttcccgtctccttctgggttctacacttctacttctttccccacctcgccttcgttccgcccgccaccaaatcgcgaggcagcggagccagcgacgccgttcctttcgttgtgcttccttgggttcttgctgccggccgccggcgatttggcgaggtccgtttgggcggcaggtagaggtaggtagaggcgatcgtttcttggcggctggtggaatggatagccacgccgctgtgtcgagttccgtcggatccggggatggcgccgcgcagcccaggaggaactccaggaagcccaagtattccaagtttacgcagcaggagcttccagcttgcaagccgattcttactccaaaatgggttatttcagtatttgttcttgttggtgtgatttttgtcccgatcggtattgtttcgctgcgagcttcacatcaagttgtcgagatcgttgatcggtatgatgacgcatgcatccctgctaatgtcactgagaagcttgcttacatccagaatgatagtataccaaaaacctgcacaagaaatctgacgattacaaaggatatgaaacaaccgatttttgtatattatcagctggataacttttaccagaatcataggaggtatgtcaagagccgtaacgacgcacaactaagagataaaagtaaggcgagtgacactaccaattgtgatcccgaggccaaaacagtagatggaaagccaattgtgccttgcggtcttattgcatggagcctgttcaatgatacatataccctcatccacaacaataaaaccttgagagtggacaagaaagacatctcttggaagagtgacagagaccacaagtttgggagtgatgtcttccccacgaacttccagaaaggacctcttcaaggtggaaaaatacttaatccaaaaatcccgttgagtgaacaagaggaccttattgtttggatgcggactgcagcgcttccaacattcagaaagctgtatggtaggatacatgttgatctcaaggaaaacgatacaattacagttcagttggagaacaactacaacacctatagcttcagtggcaagaagaagctggtgctttctactgcaacctggattggtggaaagaacgattttctgggccttgcatatctcactgttggtggaatctgcttcgttttggcatttgcattcaccttgctatacttgataaaaccaaggttagtggttttctagttctcatagattgcagttacatcaatatcaacatgccacaggacatatctggttgcctcacttcttgctgcgttgaagtactgatgtgattttcttctggtcactcacaggaaaatgggagataacaactacttgtcatggaacagacccactttaggtcgctgatatggttttgaagttaaatgtttacacggacaacaaattcatttatggttcagatgtatcttgtaccacatcgaatttttattcatgagcattggtgtagaatacatacagagtaggcatgtgtatacgtgcgacaactttggatccatccttgcacagattgtacattaaactgaaacagatagctttatgttctccaaaattgtataatcagaagttaatgtcagttt

SEQ ID NO: 131300 - DNA, 722 bp, Zea Mays
atgtacgcacatacaggagagaaaaaaaaaagcaggacaattcgactcctccggtcctcccttgccttggtcagttggtcatctccgccggctcaacctcaacgcgggtagcacgaccaccaccagtccaccaccacgcccacctccccctctctcctcctcttctatagtcaaaccacccccctccttccacaaaccttcgcagaaggggcacaccggcaaggacgcagctttttcccgtctccttctgggttctacacttctacttctttccccacctcgccttcgttccgcccgccaccaaatcgcgaggcagcggagccagcgacgccgttcctttcgttgtgcttccttgggttcttgctgccggccgccggcgatttggcgaggtccgtttgggcggcaggtagaggtaggtagaggcgatcgtttcttggcggctggtggaatggatagccacgccgctgtgtcgagttccgtcggatccggggatggcgccgcgcagcccaggaggaactccaggaagcccaagtattccaagtttacgcagcaggagcttccagcttgcaagccgattcttactccaaaatgggttatttcagtatttgttcttgttggtgtgatttttgtcccgatcggtattgtttcgctgcgagcttcacatcaagtatgacgaatactctatctgcttggtttgaaatataagctacgtcgttttgctt

SEQ ID NO: 131301 - DNA, 76 bp, Zea Mays
acattgtctccatttcatcagtcatttatcccatttacgtttaaacacctgtttcgcccatttaaatgactttagc

SEQ ID NO: 131302 - DNA, 1915 bp, Zea Mays
accacaagggcaagccctggtcctcgttctccgcgccccgcgcgaaccctattccttgttcttgaatctctcatccccaatcccacgccagtacacacgccacacacacaccctgcagctagctgcggctgagagaggagaggagagagaattaattcgggagatctctctagagagagagaaggagatagaggaggttcgtgtgcgaggcgcggggagaatagtagacagaatgttcccttccaagaaggccactagtagcgcagccgcagccgcagccgccgtgagctcaaatgatagcaggcagcaggcgatgtgcgtgcaggccgactcggggtcgggcctcgtcctcaccaccgaccccaagccccgcctccgctggaccgtcgagctccacgagcgcttcgtcgacgccgtcacgcagctcggtggccccgacaaggcgactcccaagaccatcatgagggtcatgggagtcaaggggcttaccctctaccacctcaagagccatcttcagaaattcaggttagggaagcagccgcacaaggagttcaacgagcactcggttaaggacgcggccgcagcaatggagatgcaacggaacgccgcctcttcttcaggcatgatgggaagaagcatgaacgaccgcagcgtgcacatgaacgaggctatcaggatgcaaatggaagtccagagaaggctacatgaacagctagaggtgcaaaggcatctccagatgaggatcgaagcccagggcaagtacatgcagtccatcctggagaaagcctaccagaccatcgccaccggcgacctggctgcgtgcagcccggtggctgcagggtacaaatccctgctaggtaacccgcaggcgatgctggacgtctgctcgctcaaggacatggccccgtccatgggcttcccttcgctgcaagacctgcacatgtacggcggcggcggcggccactgcctggacctgcagcagcagatggagcggccgatggaggccttcttcgccagctgcgacatcgggtcgctggccaagaagaggcccgtcagcccttacgccgacgacgacggcggcaagagcccgatgctgtggggcgaggacgacgagggcaagggcatcgtcgaccatttccagatggcgccgccgatgatggacgccgccggcatcgacgtcatggactccatcgccgacgtgtacggcgacgccaagcacatgaccatgtccagcgactccacggggagcaagggcggcggcttcgacgtcaggctcgagcggccatcgctgcggcggccgcacatgggcggcagcccgtcggtgctcggcggaggccagacgaggaacctgtcctacgggtaactagctcgtcgctctgatgatgattaaccatccgatccggcgtgcttaattaattaactcgcagtgaaactaaaattaattaaagcaggcgattattattaaccggtgcaaaacggctacaaataaataagtaaagctagcgctggagcaggcatgcataatataatggcggagatacatatatatatttatagcataagtgtcattaattcatgatcacgagattgatgatcttaccgtggcgcatcacttgctggatgatgctccaagataatctattttgagcgagaggagatgtatgttccatgtaattgtagtgctgttgatgggtgtaaatgcatgtgcaacttattaattggtaattttgcatgctgaggaaacaatctttctttggtctgaggcatcatatatatatatatatatatatatatttgcattgtatggagctagctagctgatgaggaacatgcatgctaataatggattaactgtctgataccttaagcttctttgtattattgtactgatgattagttctttttggtttatctg

SEQ ID NO: 131303 - DNA, 1155 bp, Zea Mays
aacaattaggcccgactagcacaacaagcggcacgcacggcgttaacctgcccagcgtgaaataattgctacctatttctctcgccggcgacgagcctccgcggaaaccagtgccaagccagagagtgcttctttctccgccagactgctgctccgcgcgagaagagccaccacggagtctgcgtgactcgggacagtggagaaaatcagcggcacagcgtgggtctcgcgacctccagcgaacgagatccctaagtttcgatccactgtcccagtggatttgggactgcgatggaggagcagttcatcctccgcgtgccgccatccgtcgcagagcggatcgagcgcctcatgaatgaatccgccgcctcctcctccaaccccgacgaggcctccctggacctctccttctcagaggatggaagaaatggcacatttatgatcggtaatgagagctttcctgcatctctcttggatctacctgctgtggtggagtcatacaaaacatatgatgattctgtactaattaaaactgctgatgttggtcagatgattatggtaagagaagaaaatgatcctgctccagaaggagtcgagtacaagcatgggcttactcctccaatgagggatgcacgcaggcgacgtttccgcagagaaccagacttgaacgcagagctggttaaccaagttgagaagcatcttatcagtatcatgcatggagtatctgtcaaccagaacgccagtgcgacaggaggcgaagaaggtggtgatcgtaagaaacctccagtagctcgtgcagcaaagcagcctggggttcaggagcccgccgcgaatggagaggaagctgatcctgagaggagcgacagtgatgattcagataactgaaatggaggacctggactgggtgcagcctcagtggtccaggcgagccatgccaaacttcgcaatttgaataaatcagaatgtatatatttgtaacaaacaatgtgtttgttgttcgctgaagcatgtactgtcacggtaaacatgatgtgacgctataatgccaaacaagatgatgttactgcatgtactagcaaaatagttataaataacaactgctaagtagcattttattggatttaatttgatttgaactcgttttaaaatcaagaa

SEQ ID NO: 131304 - DNA, 1035 bp, Zea Mays
aacaattaggcccgactagcacaacaagcggcacgcacggcgttaacctgcccagcgtgaaataattgctacctatttctctcgccggcgacgagcctccgcggaaaccagtgccaagccagagagtgcttctttctccgccagactgctgctccgcgcgagaagagccaccacggagtctgcgtgactcgggacagtggagaaaatcagcggcacagcgtgggtctcgcgacctccagcgaacgagatccctaagtttcgatccactgtcccagtggatttgggactgcgatggaggagcagttcatcctccgcgtgccgccatccgtcgcagagcggatcgagcgcctcatgaatgaatccgccgcctcctcctccaaccccgacgaggcctccctggacctctccttctcagaggatggaagaaatggcacatttatgatcggtaatgagagctttcctgcatctctcttggatctacctgctgtggtggagtcatacaaaacatatgatgattctgtactaattaaaactgctgatgttggtcaggcagagctggttaaccaagttgagaagcatcttatcagtatcatgcatggagtatctgtcaaccagaacgccagtgcgacaggaggcgaagaaggtggtgatcgtaagaaacctccagtagctcgtgcagcaaagcagcctggggttcaggagcccgccgcgaatggagaggaagctgatcctgagaggagcgacagtgatgattcagataactgaaatggaggacctggactgggtgcagcctcagtggtccaggcgagccatgccaaacttcgcaatttgaataaatcagaatgtatatatttgtaacaaacaatgtgtttgttgttcgctgaagcatgtactgtcacggtaaacatgatgtgacgctataatgccaaacaagatgatgttactgcatgtactagcaaaatagttataaataacaactgctaagtagcattttattggatttaatttgatttgaactcgttttaaaatcaagaa

SEQ ID NO: 131305 - DNA, 901 bp, Zea Mays
aacaattaggcccgactagcacaacaagcggcacgcacggcgttaacctgcccagcgtgaaataattgctacctatttctctcgccggcgacgagcctccgcggaaaccagtgccaagccagagagtgcttctttctccgccagactgctgctccgcgcgagaagagccaccacggagtctgcgtgactcgggacagtggagaaaatcagcggcacagcgtgggtctcgcgacctccagcgaacgagatccctaagtttcgatccactgtcccagtggatttgggactgcgatggaggagcagttcatcctccgcgtgccgccatccgtcgcagagcggatcgagcgcctcatgaatgaatccgccgcctcctcctccaaccccgacgaggcctccctggacctctccttctcaggcagagctggttaaccaagttgagaagcatcttatcagtatcatgcatggagtatctgtcaaccagaacgccagtgcgacaggaggcgaagaaggtggtgatcgtaagaaacctccagtagctcgtgcagcaaagcagcctggggttcaggagcccgccgcgaatggagaggaagctgatcctgagaggagcgacagtgatgattcagataactgaaatggaggacctggactgggtgcagcctcagtggtccaggcgagccatgccaaacttcgcaatttgaataaatcagaatgtatatatttgtaacaaacaatgtgtttgttgttcgctgaagcatgtactgtcacggtaaacatgatgtgacgctataatgccaaacaagatgatgttactgcatgtactagcaaaatagttataaataacaactgctaagtagcattttattggatttaatttgatttgaactcgttttaaaatcaagaa

SEQ ID NO: 131306 - DNA, 1474 bp, Zea Mays
cagaaataactcaagatcagtaactaagtatgactccaaacagttaaatttgtttcacgttgggcatggtaagtccttattgtgaagcttttagcttgagagtttgttttttttaggaatttttagcttcagagtgaggcaaagattatatgtgattcattggatattacatccactatgtgcatcacagcgaaacactatggcccctcttatttgtgagcatataacttgaactctacgctagactagatatgtatttaagaattgaaattttgaactgttcccttgtgcgttgatgagatatttgttcttacagaggatggaagaaatggcacatttatgatcggtaatgagagctttcctgcatctctcttggatctacctgctgtggtggagtcatacaaaacatatgatgattctgtactaattaaaactgctgatgttggtcaggtaaaagtgcatgtttaatgtatgtcacctgtttatttattaaacttcgtatcttcaaatcgtccactgaaaacaaactgaaacagatgattatggtaagagaagaaaatgatcctgctccagaaggagtcgagtacaagcatgggcttactcctccaatgagggatgcacgcaggcgacgtttccgcagagaaccagacttgaacgcagagctggttaaccaagttgagaagcatcttatcagtatcatgcatggagtatctgtcagtatccttttgttttcttcgcctgccacttgctaaatggtagcatgtgttgtattctagcagctgggaaaaaatggtatatagtactcttttttactatttatttaggtaatagttttctcagtatttttctggctactaacgttggttgacaaacggtttgcctacatggagctccctccctttttgacaagcacaatgacgtgtttctttgaatcttgtctgtatagtggtttcagatagatgtttaatgttttgaaagctacacttgaacaccagttatacttctgaattggttgcttataacatcgataagtctgacatgcatttggtctgttggttgaaggattctctgcctacagctttgtttcaccgttttttgcgaactctgtagatggcatttttccttgactactagtagaccagaacgccagtgcgacaggaggcgaagaaggtggtgatcgtaagaaacctccagtagctcgtgcagcaaagcagcctggggttcaggagcccgccgcgaatggagaggaagctgatcctgagaggagcgacagtgatgattcagataactgaaatggaggacctggactgggtgcagcctcagtggtccaggcgagccatgccaaacttcgcaatttgaataaatcagaatgtatatatttgtaacaaacaatgtgtttgttgttcgctgaagcatgtactgtcacggtaaacatgatgtgacgctataatgccaaacaagatgatgttactgc

SEQ ID NO: 131307 - DNA, 735 bp, Zea Mays
aacaattaggcccgactagcacaacaagcggcacgcacggcgttaacctgcccagcgtgaaataattgctacctatttctctcgccggcgacgagcctccgcggaaaccagtgccaagccagagagtgcttctttctccgccagactgctgctccgcgcgagaagagccaccacggagtctgcgtgactcgggacagtggagaaaatcagcggcacagcgtgggtctcgcgacctccagcgaacgagatccctaagtttcgatccactgtcccagtggatttgggactgcgatggaggagcagttcatcctccgcgtgccgccatccgtcgcagagcggatcgagcgcctcatgaatgaatccgccgcctcctcctccaaccccgacgaggcctccctggacctctccttctcagaggatggaagaaatggcacatttatgatcggtaatgagagctttcctgcatctctcttggatctacctgctgtggtggagtcatacaaaacatatgatgattctgtactaattaaaactgctgatgttggtcaggtaaaagtgcatgtttaatgtatgtcacctgtttatttattaaacttcgtatcttcaaatcgtccactgaaaacaaactgaaacagatgattatggtaagagaagaaaatgatcctgctccagaaggagtcgagtacaagcatgggcttactcctccaatgagggatgcacgcaggcgacgtttcc

SEQ ID NO: 131308 - DNA, 79 bp, Zea Mays
acgacgcactcagcaagaggcagcgcaacgagcaacccactcccgaaggcagtctccgcacctgcagctctggaggaca

SEQ ID NO: 131309 - DNA, 784 bp, Zea Mays
gactttgagccattggtcctcctcgtgatcatggaacccccgttaccgtgagtcgcgtggtcgttgaaacgaaagtgcctctgccgggaacaagagagagaaagcgggtagagctgtcatgaccccgacaccgcgcctcctttggtgcgcagccgaccctattgccgccgccgcgggactctactggcgggaggctcctcgtctctacctcacgccggcggacctcgtgcagtcggacccgaccaccgcccagccgcgcagtggacggatgcgaccatagagtgatggtgaagatgtcggagttcggcgctggccgtgacctgcgctccgctgtcgattggccctcctccatcggcggaagttttctcgggtgcgtgttggggcgaaggcgaagacgctacccttcgctcgatgccttcgccagtctcgctgcgccaacgaagacgacgatcgacagtcttcgctctttgtccggcacaccgaaggacgaagacctatggcgaggtcgccccatcccgcggtgtcgcccaacactggagcccacgtgcaatccggcccgtcataacgggccccgcgctatcactgcgcagtacgagcttaaattgtaaaggtttttatgttattacagtctgtaaccctgctttaatgagaatattccagggggaacctaggcacctgagggcacatgcgtccttaatccttgacgctgggcactcagacacctataaatacccccgcacagtgcccttgagaggctagattaacagagctattgccatctcaa

SEQ ID NO: 131310 - DNA, 751 bp, Zea Mays
caacaattaggatgcttctgaggtgtgatgattttttgaacagccagtaaaaacttagtgtgaggctgtgagctagtgataacatgagattatgcataagggcattctagcatgtgctactcacatgaaatttagtactatggatattgggatatgtctgtaacgatatctgagtcatatacatcttattcaactataatttttaacatgggcaatggtgatgacaatacagaggatgctgagatgcatataacactgcaaaaaagagagaaggggaaaacatggtcatccccaatacaagggcaagggattttggatccatatgctgcagatcaagagcaaaagcggcttatgctccaaaggtttcaggaagagaacccagggttcgacttttcgcaggctcagttcagtggaacctgccctgacccaagaaccttcatgggaggaatacgctctgagtgaagctccctacctgcccatgttggtgttgtattcccggttggtgtctatcatggaaataatcgtgatgtgtaaccattttgtgtgcaagctcattaattggctgtaaacccttttggcaacctttgcgtgctaaattctagttatagttgtgatcgtcattcagtgttcgtttttagatgtatattaataatatttaggaagagttgatggcaacctctgcatgctaaattctagttatagttgtgatcatcattcagtgctagactgctcgttttttgatgtatttata

SEQ ID NO: 131311 - DNA, 831 bp, Zea Mays
aatgtcaaaaatgtcgggtcctaaaaatcaattttctcctcggggactccactcggttgccggccatggcggagaatttggcccccgagaagcgccacaccttcgtgcacaacgggcagaaggtgttcgagtgggaccagacgctagaggaggtgaacatgtacatcgagctccccaagggcgtgcccaccaagctcttccactgcaccatccaggccagccacgtcgaggtcggcatccgcggcaacccgccatatctcaaccatgacctgatgcaccccgtgaagaccgactcgtcgttctggacaatagaggatgctgagatgcatataacactgcaaaaaagagagaaggggaaaacatggtcatccccaatacaagggcaagggattttggatccatatgctgcagatcaagagcaaaagcggcttatgctccaaaggtttcaggaagagaacccagggttcgacttttcgcaggctcagttcagtggaacctgccctgacccaagaaccttcatgggaggaatacgctctgagtgaagctccctacctgcccatgttggtgttgtattcccggttggtgtctatcatggaaataatcgtgatgtgtaaccattttgtgtgcaagctcattaattggctgtaaacccttttggcaacctttgcgtgctaaattctagttatagttgtgatcgtcattcagtgttcgtttttagatgtatattaataatatttaggaagagttgatggcaacctctgcatgctaaattctagttatagttgtgatcatcattcagtgctagactgctcgttttttgatgtatttata

SEQ ID NO: 131312 - DNA, 798 bp, Zea Mays
aatgtcaaaaatgtcgggtcctaaaaatcaattttctcctcggggactccactcggttgccggccatggcggagaatttggcccccgagaagcgccacaccttcgtgcacaacgggcagaaggtgttcgagtgggaccagacgctagaggaggtgaacatgtacatcgagctccccaagggcgtgcccaccaagctcttccactgcaccatccaggccagccacgtcgagcatgacctgatgcaccccgtgaagaccgactcgtcgttctggacaatagaggatgctgagatgcatataacactgcaaaaaagagagaaggggaaaacatggtcatccccaatacaagggcaagggattttggatccatatgctgcagatcaagagcaaaagcggcttatgctccaaaggtttcaggaagagaacccagggttcgacttttcgcaggctcagttcagtggaacctgccctgacccaagaaccttcatgggaggaatacgctctgagtgaagctccctacctgcccatgttggtgttgtattcccggttggtgtctatcatggaaataatcgtgatgtgtaaccattttgtgtgcaagctcattaattggctgtaaacccttttggcaacctttgcgtgctaaattctagttatagttgtgatcgtcattcagtgttcgtttttagatgtatattaataatatttaggaagagttgatggcaacctctgcatgctaaattctagttatagttgtgatcatcattcagtgctagactgctcgttttttgatgtatttata

SEQ ID NO: 131313 - DNA, 942 bp, Zea Mays
aatgtcaaaaatgtcgggtcctaaaaatcaattttctcctcggggactccactcggttgccggccatggcggagaatttggcccccgagaagcgccacaccttcgtgcacaacgggcagaaggtgttcgagtgggaccagacgctagaggaggtgaacatgtacatcgagctccccaagggcgtgcccaccaagctcttccactgcaccatccaggccagccacgtcgaggtcggcatccgcggcaacccgccatatctcaaccatgacctgatgcaccccgtgaagaccgactcgtcgttctggacaataggtgtggccgaactcatcgctcttgagcacctcatcattttttttcttctaaaccacaccttttctttttctgagcctgtactgtagatattgatttctgtagtatttctgacatcttcgtgagaagtgttcttgaaattgctgttcggttggtacaagctgtttgcgcttataattgttaaactggcacgatgcttttaccaattaatacaatggagagttgatgaaagcaattctcctgcttcgctgatgcaaataaactacttagcagccatactgataatcattggatagtattgggtggctttagtttttgccagggttagttgagagctagatagcagacattgttgatgagtacaactgtacagctgctcctgatttggtacccttttgtgttttactagtcactttagacaacaaaatatgtctccagcacacatctttgacctttatagtcttacttttgctgtatagttatcaacttatcataattataatgatatggatatatctttcatggcgaatgcgatattagttccattccgatgatcttatcaagttatcagtctgtatagtttattgtagaaacttgctagcatcaagtattcgttgttgttgactgtttttt

SEQ ID NO: 131314 - DNA, 1008 bp, Zea Mays
aatgtcaaaaatgtcgggtcctaaaaatcaattttctcctcggggactccactcggttgccggccatggcggagaatttggcccccgagaagcgccacaccttcgtgcacaacggtgagccgcttcccctccctggtatcctccacagcctgccttccccgggcacccgacccctctgccttaggtttcgatctccatccccgccatgagcagggcagaaggtgttcgagtgggaccagacgctagaggaggtgaacatgtacatcgagctccccaagggcgtgcccaccaagctcttccactgcaccatccaggccagccacgtcgagcatgacctgatgcaccccgtgaagaccgactcgtcgttctggacaataggtgtggccgaactcatcgctcttgagcacctcatcattttttttcttctaaaccacaccttttctttttctgagcctgtactgtagatattgatttctgtagtatttctgacatcttcgtgagaagtgttcttgaaattgctgttcggttggtacaagctgtttgcgcttataattgttaaactggcacgatgcttttaccaattaatacaatggagagttgatgaaagcaattctcctgcttcgctgatgcaaataaactacttagcagccatactgataatcattggatagtattgggtggctttagtttttgccagggttagttgagagctagatagcagacattgttgatgagtacaactgtacagctgctcctgatttggtacccttttgtgttttactagtcactttagacaacaaaatatgtctccagcacacatctttgacctttatagtcttacttttgctgtatagttatcaacttatcataattataatgatatggatatatctttcatggcgaatgcgatattagttccattccgatgatcttatcaagttatcagtctgtatagtttattgtagaaacttgctagcatcaagtattcgttgttgttgactgtttttt

SEQ ID NO: 131315 - DNA, 2072 bp, Zea Mays
cggcgaggtggcattagagattggaaggagggagggaggaggcgaggtgagagaggacgaagagggcgcatcgtgggttgggtgatcacggcctgatggggtcgtggcgcaaggcctacggcgccctcaaggactccaccaaggtcggcctcgccaaggtcaacagcgaattcaaggaattggatattgcaattgtgaaggcaaccaaccatgttgaatgccctcccaaggaacggcacgtcagaaaaatactcttggcgacctcagcaaaccgccctcgcgcagacctctcgtactgcatatacgcattgtcaaggagattgtccaagacaaagaactggatagttgcgctcaagacattgatagtggtgcataggcttctgagggagggcgatcccatgttcaaggaagagttcctggcctactcatccagagggaacatcttgcacatagccaatttcaaggacgactcgagccagtcagcttgggattgctccgcatggattcgcgcctatggatgcttcctggaggaacggctcgagtgcctcagggttctcagatacgacatcgaaaccgagcgtctcgtcagatatccccagacttccagcaaggtacatagtaaaaccaggaccctgcctagcccggaactcttggagcagttgcctgcactgcagcagctgcttttcagggttgtcggcgtccagcctgaaggcgctgcctgctcaaattaccttattcagtacgcactagccctggttctgaaggagagcttcaagatctactgctcaattaacgatggcatcatcaatctcgtcgatatgttcttcgaaatgccgaagtacgacgcaatcaacgctctggcgatttacaaacgagctggcctgcaggcagagaaccttgccgagttctatgacttctgcaaacagcttgagcttgccaggacgttccagtttcctactctcaggcagccacccgcatcgtttcttgcaacgatggaagagtacatcagagaagcaccccgaccctcgatcaagagtgaggagagcgaggagccgaagctactgacctacgagcaagaagctccagaggaacccgaaaatgctgtggaagaggagaaagaagaaccgagtcaaaaaccagaacctcagcctgtgcctgatccagaaccccacccacagcaaacgactggagatctactaaacctggaagcagaggtgaatccttcggctctggaactcgaacaaagcaatgcattggcactcgctattgtagcaccaggtgactacaagccgccagcatctcaaagtatgtttgatgtcaattcgtctgggtgggagctggcactggtcaatgctccaagcacccatacaagccaagcagttgagaccaacttggctggaggctttgacaagctgctacttgacagcctctacgaagacgaggccaggaggcagcagatcgccggcgcgacctacaccggtagcctaggagcagccaaccctttctgcaccaatgccagcgatccgttcaccatgtctagcagatttgcaccaccggctaatgtgcagttggcactgatggctcagaaccaacagcagtattaccaggcgcagcagtattaccaggcgcagctgtatttccagccacagcagcagcagtattttcagcagcatcaacagacgttggcaatgccaatgccaaacatgtatcaccaccagtatcagtactctgtgcctacatctggagcttcgaacccatttggtgatcctttcagtgaccttgccccaatgggtgctcctgcaaaacagagcaactcagtttttctctgaactggttgctacttctgagtctgatcattcaattggtagagcagcaaacctgtacagcacttgttccttcgctaagtggaggtgttgtatattgtctttcttttgcaatatccaaatcttgaaatataacattagtaccagtactatgctgaatagtttttaatgaactagaagttccggtgtactataatgtaaccatgctgtcatactcatcacaagagtaaaactgtcactgtaactcac

SEQ ID NO: 131316 - DNA, 288 bp, Zea Mays
atgcatgcactcctttgtttgaagttacttatgacaagacgcgaggaacaagacaataagctggacagtttcttgctgtctgggtacaaaaccaacgaccaaagtaacatgactccagtagctcaacagcagaagaaaacagaagccatcagcctgaatggaccccatgaaagtcacccgtcctcccgcgctgccggcgagggacggggcagcggatctagtgcttcccaccggtcctctccatctcctcgaggtgggcgaggtgggcgcgctcccagggcagattga

SEQ ID NO: 131317 - DNA, 357 bp, Zea Mays
agaaatacaattgatgccgagattgttttaggacaacatggagggaagagagtttttctaccacgcattcctttatgtccttatgatgatgagatctttcctttcaagtttaagaggactcaattccctcttagactcagctttgctatgacggtgaataaagtacaaggacagacaataccccacgttggagtatatctaccaaatccggtcttctcccatggacagttatatgttgccttatcatgagcaacaacgagaagcaatgcaaagatacttgcggctggagaaatggttctgagcaaaaactcgaatgagacatatacaaagaatatagtgtacaaagaagtcctcact

SEQ ID NO: 131318 - DNA, 1756 bp, Zea Mays
aagagaaaaaaacgaataaatattggcaccgttttcatctctagcgcgcgtcgccggcttctacgtttcttctccggcgaccgaagccaccgccccagcctcgccatggactctctcctcgccacctacgcctcttctgacgacgacgctgactccgacgaggccccgtccaccgcccccgccgcctcctccggtggccgcgccggcggactcttctcgctcccgcagcccaagtcagcccccgccctgctcttctcctccctcccggcgcccaaatccacccccgagccgctcttctcctctctctcggcgcccaaatccgccaacgcccccaccttctcctccatcccggcgcccaagacttccggaggaaaccctaagcgcgtcgtccagtaccgcccgcagccgatcctgcagtccgcaggcgacagctccgacgacgacgaggacgacgccaagaagcgccgcgccagcaacaacgaggcgagcttgccgcacgtgtctgctggcttggggcccgtgtcctcgttcctcccgccgccgaagcactcgctcgggctcggctccggctctggcgctggagccaggaggtcggcaatcgatacggctgcgccggagaagccaaatctcagcaacgccgtgccttcaagctcggttaccaatacaggagccccggaaaggcccagcactggcgcgtccgatgacgacgattcggaggatagcggcagtgagggcgacatgcctgcgccagagctggaggaggaacatcaggagcagccgagttttaatgctgcagctgcagagcagcagcaaggccatgatgctggagctgggagcactagtggatatggaacctatgcatgggatccaaactactatgcccaatacggtgcgaattatggctgggatcctagtgccagtgcaagttatgaggatggaacacagtatgccgcatatgaagaaggccaaagtggagggtatgctcattcgcacggaggagagcatggcagtggatacgagcatgttgcggcagtgccatatggggtagattatactggagggtatggtcatgaggtagcagcaacggcgttgccaccggtgcaagaaccagtactgccaccagagatgggtaggattggagggaagagaggtaggaatgatatgccggcccagattttagaggtaaatcaagcagagctgatgaagaacagaccgaagcaggataagtccaagctcactgggctggcctttggtcctagttatcagcctgccccttcagcaaaaggaaagccatcgaagttgcataaaaggaaacaccagattggttctctgtacttcgacatgaagtcgaaggagatggagcttgcagagaggcgctccaaaggcatccttacgaaagcagaaactcaagcaaaatatggctggtgagcatgtaagaaaaactcaggatacctatatgggatctgttgaattgaattggccgaggttttgttgcaactgttatggactttgtaaacccaatgcagaacagatagttcgatgatcagtcgattaatgagccaacacttgtgttaacccagctttccttttttctacttctactctcaacttgtattgtgatgttggtatgaatagtagtaaaagaatgctggtagtgtactagtatgtcactgtccatcccaatggcgataggaagtgttgtaaaaaaactgaagaggccagtgttataaaaaaacgcggaaatgctgcgtacaca

SEQ ID NO: 131319 - DNA, 1269 bp, Zea Mays
agagccacgctgcttcccggccgaagcctccgtccgcggctccgcgcccacggtttccattccaccccccaggccccaggcttgcgccgactcgccacttgtaccgccggccggtttcgccgaaggacgaaacgcctcgcgcgcggagacctgcatataagccggccgcgtgtcgtccggcgctcccggtacaggcgatccgttcatcatccgctgcaaaccaccaggcaccagctccgcgcgcagaggccggaggactacgaccgacgagggcgacgaacaccaaggctccgaagtccgaggaggcaggaagcgggaggacgtcgggaatgggcgctgctcgtgactccgcggcggcgggccagaagcacggcaccggcacgcggtgcgagctctgcgggggcgcggcggccgtgcactgcgccgcggactcggcgttcctctgcctgcgctgcgacgccaaggtgcacggcgccaacttcctggcgtccaggcacgtgaggcggcgcctggtgccgcgccgggccgccgaccccgaggcgtcgtcggccgcgtccagcggctcctcctgcgtgtccacggccgactccgcggagtcggccgccacggcaccggctccgtgcccttcgaggacggcggggaggagggctccggctcgtgcgcggcggccgcgcgcggaggcggtcctggaggggtgggccaagcggatggggttcgcggcggggccggcgcgccggcgcgccgcggcggcggccgccgcgctccgggcgctcggccggggcgtggccgctgcccgcgtgccgctccgcgtcgggatggccggcgcgctctggtcggaggtcgccgccgggtgccgaggcaatggaggggaggaggcctcgctgctccagcggctggaggccgccgcgcacgtgccggcgcggctggtgctgaccgccgcgtcgtggatggcgcgccggccggacgcccggcaggaggaccacgaggagggatgggccgagtgctcctgagttcctgatccagacgggcccacgtccgttgctgccgtgccgccgctgcacctgcactgtgtaccgagccggacctccgagatagactcgggagaaaaatgtaacaacgtgtgggcgacgtttgtttgtttgttctttttcttcttaatcaaataaatatatcgtaggcgtacgagcgagggtccaagggattgatcgtgtggctggttggctgcctctcgtcaagccgatttgatttgacttgattacacaacataca

SEQ ID NO: 131320 - DNA, 3639 bp, Zea Mays
cttttcacgcccgttgcttgctcccccacgcttgacgctcccccatccctcctccgctgcctttctctcacttcgccgccactcccagtctctctctatctctccactccttacagctagattctagaagccaacaaaaacagacgggggcagagcgtaaggggagaatcgtgctccgggaaagcaaacctcagagaatccacctctcccccaccctctctctctctctagatctacgcaagccgcctcggtatccgcgatcgccaccgcccgcggcggctgatgcgtccgtgctgctgcgcggaggtggcgctgcgctgttagctggcgcgagagttcgtccggcccccgaccgagtgatgggggcggcggggggcggccggtgcgtccgcctcggggcggcgccggtcctcgtcctgctgctgatcgccgctgccacattgccgcggctggcgcgcgcggtcaccgacgccggcgacgtttctgctataaatggactttatgttgcacttggatcaccaaagctgccaggatggtctgctagtgctggagatccctgtggtgagagctggcagggtgtcacatgtaccggctcaagtataacctcaatagttttcaatgctgcaaatctgggaggacagctaggcagcctggggaacttcacttcaataactgaaataaatcttagcaacaacaatatcggtggaaccataccagaagatctacctgtcacactgcagaatctgtttctctcagataaccaactaactggaagcattccaatgtcattatcagaactccatagtctaacagccatgtcactgaatgataaccatctagatggaaagctaccagatgcatttgattccctcacgggacttgtaaatctggatatttcttccaacaacttcagtggtccattaccaccttcattgggaagcttgacatcactgactacattgcacatgcaagataatcaactatctggtacccttaatgtcttgcaggatctccccctcaaagacttaaatgtagagaataatatgttttctggaccagttcctccgaagctgctgaacataccaaacttcaaaaatgatgggaatccttttaataccagcatagctccctctacctcaccctcttcaacacctacaggctctagaccaacacaaacaccatcgtcttcttcatccccttcaggatctccgccaccatctagtgcagcatcaaactcttctagtggatctactgctcgaaatagcaactctccatcatccaagaagaacaagtcttcacccctcagaactgttggatatgttcttcttgctattgtactattcatagttctagtgctgttggtaatcttttgcctgtccaagtatcaagaaagacagtctagacgtgattattccacgtctcaattaggtagggtgcaccagagggttgaggagccaaaaagcaagcaagcttcggtgcagtctaaacatgaagccaaaaaaggttcatctgaggttcctgaaagaaagaagccccgagaaataaatttagctgtaccagttgccattgagaagcctcctgaaaagagaaaagagcgtgtaattaatttggaacgaacagaatcagagatctttgctgcagcaccacctccacctccacctccgcccccaccaccaccgcccccaacaccgccaccgccacctccgcctccacgactgccatcaccacctcctgttgaaaaagtaactgtaaatcccattgtacttccagaaaaaagagttagcaccccgccaaggactggtccctcgacatctgcaacatccttttcggtggcatcacttcagcaatatacaaatagttttcaagagcaaaatttgataagggagagtagattggggaaagtgtatttggcagaacttcctgaaggcaaattactggaagttatgaagattgataatgctaatggaagaataccagtagatgactttctagagttggttgctcgtatatcagatattagacaccctaacattcttgaattagttggatattgtgctgaatatgaacagcggttactcgtgtataactacttcagtagaaaaacattacatgatgtactacatgaaggggaggatctagatgaaccattatcctggaatgctcgcctccacattgttcttcatgcagcaaaagccttagagtatctccatgacacctgtgaacctcctgtagtacaccagaattttgaaccagccaacgtgctcctcgacaatagatgctcagtgcgtgttgctgaatgtgggctggcacaattgatggcgtctggttctgttacacagctatcaggccgtatgagagctctactcaattatgaagcacctgaaatccatgaatctgagccttttactcgtcaaagcgacgtatatagtttgggtgtggtgatgctagaacttcttactggtcgtaagccatatgacagttctcgtccacgtgatgaacaacatcttgttcgatgggctaattctcagcttcatgacatggagtccctgtcaaagatggttgatccttctatccgaggagagtgttctgtgatactgttgtcacgttttgcagacatcatcagtcagtgtattcagccgggaccagaattcaggccagcaatgtctcaaatcgtccaagacctagctaggattgtaggtgctagtggtgcggtatcagagtgacagataaagggggaacagtaaacatctagcttgactgtatgcacttgtggagacgccagaacgtttgtttcctttatctaaaaaaaaggtaaaacatctagcctcagtcgtgtggccagtgaagattcatacatcctcagcgcagtgccaggggcactctcagtatttatgttggacgatattgcggctagtgtacatgccattttggagccccatttgcttctggaaaggtgtagtggtactgtggtagtatggcacaaccagtgagatatggcttctcattgttgctagcagatattcctgagctcctctagacatgataatttcacctgcaggcagtgtatctcttgtaactaattccaattttttattactttattattacattatagctagttatgtcaaatatggtgcttttagcttgtcttgagacctatgtttctcctgggaaaagaactggcttgctgattctttgcagaggcaaagcaacctttttctgacctgtacatgaagattctcctccttgaagcgaaagcacctctgctaggtatgcgtggtgtgcttggttcctgacttttcttcgtgtggtttcttcaagatgtagaataagttatgacagtgttcaactatgctgattggggattagataaacttttgtattgatccgttcttaactgatagatggcaccctgtggttgattgcaagcttgatctgtcatgttgcgtcttgtagcatgcactgtcaggttctggatttctggctgttgtctgttgaacacttttttagcttatttcttcttcgtttccccaggttacactggtaacagaaaactcgattctagttaccactgcccaggagtatattttggcttacagttttgtatgcttgaactgatagtatcatcttttgcctttt

SEQ ID NO: 131321 - DNA, 524 bp, Zea Mays
ggtgaatatagtttaattggacaaattgcaaaaaatagaccctagaaggatcgaacccagcaccctaaacaccttaccactgacacaatccacaacgctatatgtaagtgacatatgttctaacaaagaaaatttatttgaccaatcacatgtgtgcggattcaaggagcaagcaacagcgcgagatgaccggagctcaggacgccgagcagcagaggcacggatccgctggagacacggagcagcagaagcagcggagtcgctggaccgcggatccgtccgcccggagctcaggccgcggagcagctggagatcgaccgcggatccgtccgcccggtaggccgccacgccggtgaagaagaggctaccgggccggtgaagatccacccgcctggagaagaccggcacgcctgcctgctccagctcgaggagcgctggagatccacgccggtgaagaagcaggccgccgcgccggtgaagaagcaggctgccgcgccgccgaggatgtgccaggcgaaggagag

SEQ ID NO: 131322 - DNA, 206 bp, Zea Mays
ttccttgaaatttgtactatttgttcatctagcctctacaaacttacttcatgcatagatgtcccttgtttggaatatttactattttttgtgggttaaatgccttcctagccaaaaataaataaataaatagcaaatttggtcaaaaaatagtgaaacttggcatggactcatgttttggccttatttgcttaaggtaaaaaatt

SEQ ID NO: 131323 - DNA, 520 bp, Zea Mays
aagaaaacaaacaaaactaagaaatgtaaatcaaaccatgtagttgttgtccaatgtcatgaaacttagtgagatatgtgtccatttgtgaagcacctatattcaaactttcgcatagtcctctgaattttttaccttaagcaaataaggccaaaacatgagtccataccaagtttcactattttttgaccaattttgctatttatttatttatttttggctaggaaggcatttaacccacaaaaaatagtaaatattccaaacaagggacatctatgcatgaagtaagtttgtagagtctagatgaacaaatagtacaaatttcaaggaagaaaacaaataaaactaagaaatgtagctcaaaccatgtagttgtagtccaatgtcatgaaacttagtgagatatgtgttcgtttgtgaagcacctatattcacacttttgcataattctctgaattttttaacttaagcaaataaatccaaaacatgagtccatgccaagtttcactattatttgacc

SEQ ID NO: 131324 - DNA, 1180 bp, Zea Mays
cgaacgatttagcggcttttgttagggttttttacattggtccctttagtatcgccacactactcattgctatccttagtttttcttcttactcagttttacccagcgctcgttccatttgctcagaaatgcgcttagacgtcatctccgtccactttaacattacttacaggacgggcccactacaaactttttactctctcctgcgcttgcgcagcctcttcttctccgatcccgactccaactctccctctctccttcgcctggcacatcctcggcagcgtggcagcctgcttcttcaccggcgcggcggcctgcttcttcgacgacgcggaggcctgcagcggcctaccgagcggacggatccgcggacgaacggatctccggcgcctggcagatcttcggcgcgcggcctaccggttgtggacggatctccgctgcctggtgccctggtatatcctcggtgtcgcggcttgcttcttcaccggcgccgcggcctgattcttcgaaggcacagcgacctgattcttcgacggagcggcctgccggttttgtccaggcaggcagacgcggcagcctaccggtcttctccaggcgggtggatctccagcgctcctcgagctagagcaggcaggcgtgccggtcttccccaggcgggtggatcttcaccggcgtggcggcctaccgggcggacggatccgcggtcgatctccggctgctccgtgcctctgctgctccgtggcctgagctccgggcggacggatccgcggtccagtgactctgctgcctctgctgctccgtgtctacagcggatccgtgcctctgctgctcgacatcctgagctccggccgtctcgcgctggtgcttgctccttgaatccgcacacatgtgattggtcaaataaattttctttgtcaaaacatatgtcacttacatatggcgcagtggattgtgtcagtggtaaggtgtttagggtgttgggttcgatccttctagggtctattttttgcaatttgtccaattaaattcacctataaacttttgcataatccactgaatttttaccttaagcaaataacgccaaaacataagtccacgccaagtttcactatttttgaccaaattttctatctatttgttttttggctaggaaggcatgtaacccacaaaaaatagtaaa

SEQ ID NO: 131325 - DNA, 306 bp, Zea Mays
atggagagatatatgagaaatcataaaacaaggccagcgcactttggaacattcactgaggagttggccgtagttgattggcgtgccgaccgggtgatgagcgtggtgcaccggcggctaggaatggacgcaccggcgggtggggaggaatgcgccgatgagtctgggctcatcgtgcaggtggcacgtcagtcggtctgcctcgtcgtgcgggtggtgagggaggcggccggcgggtccgggggcagagctccctgtgcggaacgagaccatggcacctgggagatgggaatgatgcgggtgtag

SEQ ID NO: 131326 - DNA, 1021 bp, Zea Mays
cacccgcgcaaccctgccgtgcttcttgctcgcctcggcctcgacctcagcctcctccacgcgcgcaccggcccaccgccattgccacctctcgatcaatcactgctccagctccacagctcccgcgaccatttcctcccggttcgttattaattaatatatgggcctcgaactcgagctgacgccgcccacccacctgcagctaccgccgatccggacggcggcagcagcgccgccaacgccgaggccggacggcggcgctgacgataatgccgccaacctcgacggcggctgcaccacgcccaagtccgcggccagcgtgctgcgggcgccgtcgacctgcccgccagcgccgaggaagccgaggccggccaagaggaagctgccgccgccgacgcatcaccgagcgtgcagctgctctgctactgctggcgggtcggcgacagcgctgcgccccgcgcccctgcggtggttcgacaccgtcccgcccgacgttcttgccgcggtgtttgtcgcccggcccgcctcttcgccgtgcccgccggcgtcgtcgcccgcgagcaagaagatccgcgtgcacgtcgtgggctcatgagacggcgcgcgcgcgcggccgtaggcgtgcgtgcacgtgtacgtacgctagctgcttccttggtcacgtcgtagttgatggctgactagctagcttgtagccttgtactatgcgatatatgcatgcagatcgatggatgcatcgaggtcactggtcaggcactcacgcgtcgtccatggcgccgtggctagctgttgtccatggctccatgcatgccgtgccgcagctccaggctctccaggaaccaggaccagaggagagctgaagcgatgaccaacagcatgcatgtctaggttagtttagtctagtttatcatgcaactaaactccagctagcttactccagtctagtttaagttggggcggtttgaatggccacaattgtacatgtattatcgctgaactgaacttgaacccagagctctgg

SEQ ID NO: 131327 - DNA, 1676 bp, Zea Mays
ggagcaaagaatcaactggcaattgccagataatgaattgactcttattggaatcatagggatgaaggatccttgtcgccctgaagtaagagacgctgtcgaactgtgcaaaaaggctggtgttaaggtacgaatggtaactggagataatctgaagacagctaaagcaatagctcttgagtgtggaatactcgatgactcagaggcatctgcacaagctataatagagggaagagttttccgtgcttacgatgatactgaaagggagaatgttgctgacaagatttctgtgatggcacgatcctctcctaatgacaaacttctcctagtaaaagctcttaagaaaataggccatgttgtagctgttactggtgatggaacgaatgatgctcctgcattgcatgaggcagatattggtctttctatgggcatccaaggaacagaagtagccaaagagagctcagacataataattctggatgacaatttttcttctgttgtgaaggtggttcgctggggtcgctctgtttatgcaaatatccaaaagtttattcagttccagcttaccgtaaatgttgcagctcttgtcatcaatgttgttgctgctgtttcctcaggaaatgttcctctaaatgctgttcagcttctctgggttaatctcatcatggacacactcggtgctcttgctttggctactgaaccaccaacagatcaacttatgaggcggccaccagttggacggagagaacctcttgtgactaatatcatgtggagaaacttgtttattcaggctgtctttcaagttgctgttcttctgactctcaactttaggggtcgggatcttttgcatttgactcatgacacactaggacactctagtaaagtgaaaaatacacttatattcaacacatttgtattgtgccaggtgtttaatgaggtcaattctcgtaaaccagaagaactgaacatcttttccggagtttcaagaaatcatcttttcttggcagtagtgagcataactgttgtgatgcaggtgataattattgagttcctcgggaaatttacatcaacagtgagactcaactggaagctttggcttgtttctgtagttattgcttttctaagttggcccttggcttttgttggaaaattcattccagttccgaggactgaattgaaggatctcattgtaaggtgttggcctaaacgtggcgagagtgcagcacaacagactcaggatgacagaatggaagtaccagtgtgaagctgttcttgagcaacttctcgaaattatcaggtgttagtgttggtgcacatagatggtgttggctaattttgggtgctgatttttctaaccatcctaccttgttgcctggctatgaattctatggctgtagtcagcaatcggggaggtaaacctctgctgactcgtgatctagaatttgaacactgtaaacaaaatatgtttattgtagcctaacgaaggtcaggacctccagtggtttattgcacaagttgtgcagtcggtcccagaatcatttggggaaggcgctataaacagtttttcttggcaggagtggagtgtagctccttttcgctaatatcatttttacttttagatgcaatcaagaacattttgtcaaacactctaatagtaattggctgattttgttaga

SEQ ID NO: 131328 - DNA, 1362 bp, Zea Mays
atgccggcgggaggggccattgtggtcgtggaggtggtgcaggtggtcgtgccgggggcagtggccaagccgccagggagcaaggaagaggcggccgcgtcgacggggatgaagagcgggctcgcgcgcttggtccggcgcacgggcggcgcggagaggccgacgtcggcgtggtctgttgctggcgggcgcgtgctctgggctcgagccgccatccccttgccggcgacgcagatcccgatgggggggggctggctcgacaatggcggcacgcagattcggcacggggcggcgccgcgaccaggcggaggagggaggcgagcggcgcattggcgggtccacgaccgagggggaggagagccagtggaggcggaagacgagtggaggttcgccagagtgacgtggaggctgacggtaacggctgttggccttaacaccgaatggggtttattaatggccagcatttcagaagacaacaatgaagaaactcctctgcaggtgcggttgaatggagtagcaacattcataggtattgcaggcctttctgttgctgctatggtcctcgtagtcctctttgcaagaaattttttctttgcttccagatattttacaggacatactacagattcagatggctctgttcaatttgttaagaggcacactagtgtgaaatctgcaatatttggttcaataaagatactaactgttgcggtaactattgttgtcgtcgctgtacctgagggcttaccactggctgtcacactaactctggcttattccatgcgaaaaatgatggccgacaaagcactggttcggaggctttctgcctgtgaaacaatgggttcagcgacaactatttgtagtgacaagactggtacattaacattaaaccagatgactgttatgcaatcgattgtcggtgaagtaaagctgcaacctcctgctaatgttgataaactgtcatctactgtagcctcacttctacttgaaggaattgcacagaatacttcaggcagtgtgtttgaggcacaggatggtagcgtcgaggtaactggttcaccaacagaaaaggctatcctatcttggggtcttgatcttcgtatgaaatttgctgaggagagatcacgatcttctataattcatgtctctcctttcaactccgaaaaaaagcgcgctggggttgcagtggttgcgagagattcaaatgttcatgtacactggaaaggagctgctgaaattgttcttgccttgtgcacaagttggctcaatgtggatggctcaacacatgaaatgacacctgataaggaccctgtagaagagcaacaacaaggcacacatatagaagactataacttcacctag

SEQ ID NO: 131329 - DNA, 864 bp, Zea Mays
atgtctgttgcagtccaaaatggccttgcacaattgaaatcattgatgactgctacaactgcaaacaacatacaagactgtcctcagcaatcagggagtttatatgatggtgaagacaccgatggttctaatgaagaggaatcccaaagtcgtaagggtgttcgtgccaacatctccaacgatggtgatcagatctcaacaaaagagtacaagaagaaacagaatgaacctacaataagaaactatattggaaaagttactgctcaattcaccatgtacaatgaaagcaaggcagtggaagatgcatgtctagatatgctaaagggtggacagcgccaaatgagatatagactgaaacaaaaatatttcaatgggatacctgctaatgaagtcaggacttcatcgcctattccaagcatgtctgatgaggactggagaaggggtctaccacaaaacacaagatcccagttctacattgcaaaagcttatttattgatgtattatttggttgacatggaagcaatggtgacagcaccggctgaggatggacaacaacagatgtctcctacggaagttgtttctgaagtgctatcaggctctagtttgttcctacggaatgttggtctgcaagctacctccaagaaaagcttcacaactatttatgcaaaggttcaagaacttcaggatcaattggagtctgagaggcaagaaaaagacggacttcgggaggaagtcgaaaccttaaaggctcaggcgcaggcctcaaaggagactatggacaatatgaagagatcgatggaagaaaataatgttttcctccgccaaatgataagcttcaatcgaagccaagtgcctccatcttaa

SEQ ID NO: 131330 - DNA, 2216 bp, Zea Mays
tcttccacttcccgaatcccgatccatccgcatagcactgagggcggcggccgcttcctctcctccgcggccgaggtcgctcccccgcccgccgcctcttgcccgcggccgatctcttccctccgctcgcagcgtcgcagcccgtaacgagaccgcgctcggttgagcaccacctggggcccagcgccccagcgtcctcgtgaccacctcggcgcggcatccgccctctgcagccccggtgtctccgcgaccggctccggtgcgtccggaacgcagctccacaggagcatcattatttatagaatacgatctactttatagctgatgacaatgtctgcttctactgctgcaattcgtactgcgaatacaaatggaaaccatgcagtaagttcggattcacattctagccaagatgctaggcagcgaacagctggtattacaaaaagaaaagcattgccttcgattcttcaaaaaattcctagcaatgatctgagtcatactatccgaggagaatcagttcttcaaaagtcaaattattcttctgaaggaagaaaagatgtggttgcttcagcaactgctgaacgccaaaacaaaaacactacaaatgtggttgcttcagcagctgctgtacgccaaaagaaaagccctactaaacaagaaaacgccaactgggtaactgccttaagtgtgctggtgaagctgtgtcttcttatttcagctactgcttggatggggcaggtgttctggagatggcaaagtggtgaattatcatttacaacactggatatggagaacaggctatccagggtggaagggttcaagaagacagccaagatgcttcagctacagttggatgttttggataaaaagctagaaaatgagattgacaaagcaaaaggggtcattgctaagcaatttgaggataagggtaataagatagagaaaaagatgaagattttggaagacaaaactgacaagttggacaagtcactggctgagcttagtgacatgggatttctttctaaaaatgagtttgaggagattttgagccagttgaagaaaaagaagggattcggtggtacagatgatgaaataagcttggatgatataaggctatatgccaaagatgtggttgagatggagatagcaaggcattccgcagatggccttggtatggtggattatgcattgggatctggtggtgctaaagtggtaagtcactcagagcctttcatgaatggcaagaactatttacctggtcgcagcaatgtgcacacaacagcccaaaagatgctggagccaagttttgggcagccaggagagtgttttgcagtgaaaggaagtagtgggtttgtgaaggtgaagctaagaacagcaataattcctgaagccgtcactctagaacatgttgacaagagtgtggcctatgatagatcaagtgctccaaaggatttccaggtccgtggatggtaccaaggaccacatgatgattcagaaaaggattcaaatgtgatgtctactttaggagagttctcttatgaccttgacaagagcaatgctcagaccttccaactagagagaaccgctcaatcacgtgttgtcaacatggttcagcttgatatctcctcaaaccatgggaacttggaacttacatgcatctatcgcttcagggtgcatggcagaaagcccgtctcccccagcactggaggatgaagccctgagctgtgacatgcgtgccaaagcgcgacaacattcttgcagcatttctgcctataggagctttggttcagcggttagcggttagtcggagcatttcagccagcgccgctgcaccagtgttgataatgttgattctattctcgcacattgttgtgaacagctcggaaataccttgcgaggtttccttaagctgttcctagtttggcatcaagttcgcctgttttctctgctcctcctcccctcctgttaagactgcagcttagtattccgtttgaaattggtcgtctcatttcaccaggactcgctcttaaaaagaagactttgccattatatggcctactcagctagggaggaaaagaaggggaatgctggggccaactgccaagctagttatgcacttatatctaatctattgatttgaatatgagagcatgccaagctagttatgcacttatatctaatctattgatttgaatatgagagcacgcaagttcttc

SEQ ID NO: 131331 - DNA, 119 bp, Zea Mays
gtgcaattactaggggcaacaacgtccaaatcccagacccacgcgcgctatgacttctttttgtgcacgctcggtcacgcgcaggatgacttcttttactgcaccggagggagtatgtg

SEQ ID NO: 131332 - DNA, 1993 bp, Zea Mays
atggaaacaagaggtcacaaagatatatacgaacagacatttggacggattcagaactcaatggctggtccagcaccatactcgcaggacagtcatggaaatatgcagatgcaattgtttttaacacttgctgtcaatcctagttcgctgtatgcttcggaaagcaatcccacgcgcaaccggcaaccgcctcggagtcggaggatcatctcggtcgctcgtctggagaattcaaaattttccccacttcgtcaccagcaacgcaaccgaaagtccgcaacaccgcactctccctcggcagttggcagtcggcagcggcactcgtctccgcgcttccactcgccaatgaaagcctccgcagccgcggcctctccgccgcctcctcctcctcgtgggtggctctccggcctcgtctccggcgccggccgcctcctcgccgccattctcgacccggaatcctccgcctccgacacaacgtcctcctccccagagtcgtcgcagtcaccaccgcgccgcgatcaggcaactgccggtcatggtattgggaagtgctttccttctgacagccatcagttaaatttgagtggcaaggagattgttttgaaagattccggtgaaggttcacttgcaattgtctcagaggtacatccaaaggatgctgtaaagcagttgcttatgcaggaaacctactcatggtcggagtgtgatgcattaataaagataattcaagagcgagttgtggactcagacgatgaacctgctgctattcttccaattgcttggcatgctaacacacagctacatcctgttgcacactcttcaaacccgaacaccaccgctgtccctgcagtttctaatcctgcttgtcgtctagagtttgacaacattgttgagaaagaatggctgaagaaaagttcagctgttgctgaaaatcgttgcaccaatagccatgaccaaattcagcatgctatgaaaagaagttactctaacacaggggatactattgaagagtctcgaagaatcaggccaaagcgaaacagatcaaattctcttaggaatcagggagcttcgtccaaagaggccgccaccaatgctagtagtgcacgaagggaatttccagaaggtttcaggacactatttaaagataatcctcttcttgggactaataacctgacattttcggacttggtttcaaagggtctgttcgatgatgaaccttctgtagctgctgctgctgaacacttcacttcaacctcttgtcaagctgactgggacaaacgtggatctggcatgtcatatccgtattctagtcagaatcagatggagatgtctcgtgtcaaggcagaacttatcgatgaacctgtcgctcttgagactgacatgacaaatatggtgcaaaagaatgataaactcatagtgcgcaatggctcttgttctgtcccaaacaaaactgtgtttcaaggtgacattgaggctgcaccgagctcaccaatgggcttgcagacagaaaagagctccagaaattgcacgaggggattcaacttgcagaacattccgacgaagagaaggtcacctgccagcagaaatcttccctcaaacaacgggaatgggaagacggtgagatcatggaatgggcctccacggcaaagcaattcggcggcgggacaggaatcggagatggggcgcgttaaggcgaagaggccagttggaaggccgaggaaagtgcggaggtctcaaaaggcgaacgatacaattgtaatgggcacccgagattacagctaacatcaggtaattgttgatgccgtatatatttaggtccataaaaaagaaaaccgaaatgttctgtgtagtaaggagcacagttggaacttgaacttgcagtgagtgtatgctgtgttgggttcgcacgtgttgccccacccttggtggtgtgattcatccgattactgtttgctcttcaatttcatattcaattctcagggaacattgatac

SEQ ID NO: 131333 - DNA, 1063 bp, Zea Mays
gatctttggtggcatctagctgcgcagggtgctttcggcgacgcctccttgctttgctctctttatttttaaaacaaaattaaatttcgccatgacaaattccgtcgtcccgccatcatcactgagtttgctgtattggtcagaggtgcaaactaactccatcgatgccgcggattaatgaaccggccgtctttctgcaggttacctgaacgaccccgagtcgacgaagaacaccatcgacaaggacggctggctgcacaccggagacatcggctacgtggacgacgacgacgagatcttcatcgtcgacaggctcaaggagatcatcaagtacaagggcttccaggtgccgccggcggagctggaggcgctcctcatcacgcacccggagatcaaggacgccgccgtcgtatcaatgaacgatgaccttgctggtgaaatcccggtcgccttcatcgtgcggaccgaaggttctcaagtcaccgaggatgagatcaagcaattcgtcgccaaggaggtggttttctacaagaagatccacaaggtcttcttcaccgaatccatccccaagaacccgtcgggcaagatcctgaggaaggacttgagagccaggctcgccgccggtgttcactgaggcccgtatgcagcttcttctcggacggccaccacgctgctgcgaaaaaaaaggcgatgtaatggcggtaacactactattcatgaactggcaacagaagggacacgtattcctgtggaacacatgttgccagaaagaggttttagtttgtctgtttgttggccctgtgtgtaatgttcataaacgatatagacgtcgtctctatgttgtttttgacccaaagaacaagcctgattacggcaatacagctacggagtaccgtgtttcatatgcctagatgtttgtcataagttattatagccggagatggcgatgggcctcgatctctccttcactaggactagtttggcaacgaggagagaaaaatcccttgaaaattaatctaggaggggattttagatgccaccttatttcccccctcttcggtgt

SEQ ID NO: 131334 - DNA, 2235 bp, Zea Mays
gccccggcgaggtcgcaccgcaccagccatcgtctccttccttccttcctatactaccatccaaccagctgcccagcgcaacgttacctgcccgacatccgacaagccagtccatccggcagcgagcaaaggtctgagatgggttccgtagacgcggcgatcgcggtgccggtgccggcggcggaggagaaggcggtggaggagaaggcggtggtgttccggtccaagctccccgacatcgagatcgacagcagcatggcgctgcacacctactgcttcgggaagatgggtgaggtggcggagcgggcgtgcctggtcgacgggctgacgggcgcgtcgtacacgtacgcggaggtggagtccctgtcccggcgcgccgcgtcggggctgcgcgccatgggggtgggcaagggcgacgtggtgatgagcctgctccgcaactgccccgagttcgccttcaccttcctgggcgccgcccgcctgggcgccgccaccaccacggccaacccgttctacaccccgcacgaggtgcaccgccaggcggaggcggccggcgcccggctcatcgtgaccgaggcctgcgccgtggagaaggtgcgggagttcgcggcggagcggggcatccccgtggtcaccgtcgacgggcgcttcgacggctgcgtggagttcgccgagctgatcgcggccgaggagctggaggccgacgccgacatccaccccgacgacgtcgtcgcgctgccctactcctccggcaccaccgggctgcccaagggcgtcatgctcacccaccgcagcctcatcaccagcgtcgcgcagcaggttgatggcgagaacccgaacctgtacttccgcaaggacgacgtggtgctgtgcctgctgccgctgttccacatctactcgctgaactcggtgctgctggccggcctgcgcgcgggctccaccatcgtgatcatgcgcaagttcgacctgggcgcgctggtggacctggtgcgcaggtacgtgatcaccatcgcgcccttcgtgccgcccatcgtggtggagatcgccaagagcccccgcgtgaccgccggcgacctcgcgtccatccgcatggtcatgtccggcgccgcgcccatgggcaaggagctccaggacgccttcatggccaagattcccaatgccgtgctcgggcaggggtacgggatgacggaggcaggccccgtgctggcgatgtgcctggccttcgccaaggagccgtacccggtcaagtccgggtcgtgcggcaccgtggtgcggaacgcggagctgaagatcgtcgaccccgacaccggcgccgccctcggccggaaccagcccggcgagatctgcatccgcggggagcagatcatgaaaggttacctgaacgaccccgagtcgacgaagaacaccatcgacaaggacggctggctgcacaccggagacatcggctacgtggacgacgacgacgagatcttcatcgtcgacaggctcaaggagatcatcaagtacaagggcttccaggtgccgccggcggagctggaggcgctcctcatcacgcacccggagatcaaggacgccgccgtcgtatcaatgaacgatgaccttgctggtgaaatcccggtcgccttcatcgtgcggaccgaaggttctcaagtcaccgaggatgagatcaagcaattcgtcgccaaggaggtggttttctacaagaagatccacaaggtcttcttcaccgaatccatccccaagaacccgtcgggcaagatcctgaggaaggacttgagagccaggctcgccgccggtgttcactgaggcccgtatgcagcttcttctcggacggccaccacgctgctgcgaaaaaaaaggcgatgtaatggcggtaacactactattcatgaactggcaacagaagggacacgtattcctgtggaacacatgttgccagaaagaggttttagtttgtctgtttgttggccctgtgtgtaatgttcataaacgatatagacgtcgtctctatgttgtttttgacccaaagaacaagcctgattacggcaatacagctacggagtaccgtgtttcatatgcctagatgtttgtcataagttattatagccggagatggcgatgggcctcgatctctccttcactaggactagtttggcaacgaggagagaaaaatcccttgaaaattaatctaggaggggattttagatgccaccttatttcccccctcttcggtgt

SEQ ID NO: 131335 - DNA, 732 bp, Zea Mays
aaaccactttcctggtggtggttcgtttctgatctctgagagtccgcccccctaaacaccgcttgggctatcccgaaccctaaccccgaccgccgcgccagctactcccgtttcgtcctcgcggcattcgcggcgttttctccctctgctcgaaccgcgccgacgagcgacgacaagaactgctctattcttcaaaacaaatggcgaccgttccagttaacccaaaaccttttctgaacaacctgacaggaaagcctgttattgtcaaactcaagtggggtatggagtacaagggttatcttgcttctgtggactcatatatgaatctccagcttgccaacactgaggagtacattgatggtcaattctctggaaacctgggagagattctgatcaggtgcaacaacgtcatgtatctccgaggcgttccagaggatgcagagatagaggacgcagagtgagaagatgcgatcaatgttagattgataaatgtaatatggttctgacatctatgttcgaatatgccggtgacaagtagatctatcggatcgctttgttctcttgagtgatgaaacatgatggcgtcgggccaagggtgaagctgctttcagttagactatgctgtcattctgctgaatgtatatcagatttcttgaacaattcttcttgcctcattgcctactatcacggattaagttatatcagggaaaaatgaccggctctttttttttc

SEQ ID NO: 131336 - DNA, 610 bp, Zea Mays
atgtttgcaatccataataaagtatggtcttacggtatatactcacttatcagctctcgttttgtgcagaccgttccagttaacccaaaaccttttctgaacaacctgacaggaaagcctgttattgtcaaactcaagtggggtatggagtacaagggttatcttgcttctgtggactcatatatgaatctccagcttgccaacactgaggagtacattgatggtcaattctctggaaacctgggagagattctgatcaggtgcaacaacgtcatgtatctccgaggcgttccagaggatgcagagatagaggacgcagagtgagaagatgcgatcaatgttagattgataaatgtaatatggttctgacatctatgttcgaatatgccggtgacaagtagatctatcggatcgctttgttctcttgagtgatgaaacatgatggcgtcgggccaagggtgaagctgctttcagttagactatgctgtcattctgctgaatgtatatcagatttcttgaacaattcttcttgcctcattgcctactatcacggattaagttatatcagggaaaaatgaccggctctttttttttcccgttgagaaaacaa

SEQ ID NO: 131337 - DNA, 747 bp, Zea Mays
aaaccactttcctggtggtggttcgtttctgatctctgagagtccgcccccctaaacaccgcttgggctatcccgaaccctaaccccgaccgccgcgccagctactcccgtttcgtcctcgcggcattcgcggcgttttctccctctgctcgaaccgcgccgacgagcgacgacaagaactgctctattcttcaaaacaaatggcgaccgttccagttaacccaaaaccttttctgaacaacctgacaggaaagcctgttattgtcaaactcaagtggggtatggagtacaagggttatcttgcttctgtggactcatatatgaatctccagcttgccaacactgaggagtacattgatggtcaattctctggaaacctgggagagattctgatcaggtgcaacaacgtcatgtatctccgaggcgttccagaggatgcagagatagaggacgcagagtgagaagatgcgatcaatgttagattgataaatgtaatatggttctgacatctatgttcgaatatgccggtgacaagtagatctatcggatcgctttgttctcttgagtgatgaaacatgatggcgtcgggccaagggtgaagctgctttcagttagactatgctgtcattctgctgaatgtatatcagatttcttgaacaattcttcttgcctcattgcctactatcacggattaagttatatcagggaaaaatgaccggctctttttttttcccgttgagaaaacaa

SEQ ID NO: 131338 - DNA, 889 bp, Zea Mays
gaggaaaacagaaggaagctgaagctagcggccggcctaccgcacgcaacgcaagcagagtgcagaggaggattacagatcgaggcgtacggacgtcgagcgaggagtggtacatatggcagcgggaccgccgtcgtcggtgagggcggagcgcgtcctgcgggcggcgtgcgcggccatggcggcggcgggggcgctgctgctggggttcagcgcgcagaccaagaccgtgctcttcatccagaagaaggccgtccccaaggacgtgcaggccctctgttctttttaccacgcttgcgcggtcgctgatcgatgtccttgcgtcgcgcgcgcgtgcctgcctgcctgcgccgtgcatgccagggtgctgatcgtggcggccgcggcggcggcggcgtaccacgtggcccagctcgcccggtgcctctgcatggagcgcctcgccatcggcggcggcggatgccggcgtctcgggagagccgtcgcgtgcgcctccttcctcctcgacaagggatgcgcgtacatggtgttcgcgacgacggtggcggcgctgcaggcgtgcttcgtggggctgctcggcgtcgacgccctgcagtggagcaagctctgcaacatctacacccgcttctgcgagcaggcggccgccggcatggtctgcagcctgctggccgccgccggcatggccgtcctctccgcgttctcggctcgggacctcttccgccgcccctgctccccggagtatagatgaattccagtagtacaagaaacctcaccaagatatatagccacactttctgatgtgtaagaattggcgcttgggctttgatcaagttcataagaaaaatgagaaacagatctttatggaataatactttaattgcttctaaga

SEQ ID NO: 131339 - DNA, 805 bp, Zea Mays
gaggaaaacagaaggaagctgaagctagcggccggcctaccgcacgcaacgcaagcagagtgcagaggaggattacagatcgaggcgtacggacgtcgagcgaggagtggtacatatggcagcgggaccgccgtcgtcggtgagggcggagcgcgtcctgcgggcggcgtgcgcggccatggcggcggcgggggcgctgctgctggggttcagcgcgcagaccaagaccgtgctcttcatccagaagaaggccgtccccaaggacgtgcaggccctctgggtgctgatcgtggcggccgcggcggcggcggcgtaccacgtggcccagctcgcccggtgcctctgcatggagcgcctcgccatcggcggcggcggatgccggcgtctcgggagagccgtcgcgtgcgcctccttcctcctcgacaagggatgcgcgtacatggtgttcgcgacgacggtggcggcgctgcaggcgtgcttcgtggggctgctcggcgtcgacgccctgcagtggagcaagctctgcaacatctacacccgcttctgcgagcaggcggccgccggcatggtctgcagcctgctggccgccgccggcatggccgtcctctccgcgttctcggctcgggacctcttccgccgcccctgctccccggagtatagatgaattccagtagtacaagaaacctcaccaagatatatagccacactttctgatgtgtaagaattggcgcttgggctttgatcaagttcataagaaaaatgagaaacagatctttatggaataatactttaattgcttctaaga

SEQ ID NO: 131340 - DNA, 2298 bp, Zea Mays
aactgtgtgcgcggtcggtcgcttcccttcccttttgtccgcgatctgggctggccctcgtggcctcgtcccgtctccgattccggcgtccgaaccagattcgcccgggccttcgtgccagcgatgaaggagaagcgtgggctcgaggacgccggcgggggcgccggcgacggacgtcctgatgccaagaggtcgcggcctccggcactggccagtgttattgttgaagctttaaagatggatagtctgcagaggctctgctcatcactggaaccaattcttcgtagagtagtcagtgaagaagtggagcgcgcactgggcagacttggccctgcaacaatcgggggaaggtcttccccaaagcgaattgaaggtccagatggaagagctctgcaactccaattccggacaaggctgtcacttccccttttcaccggaggaaaagttgaaggggagcagggagctgcaattcatgttgttttgcttgatgctggcactggtggtgttgtatcatctggaccagagtcgtctgccaaacttgacattgttgttctcgaaggtgatttcaacaatgaagatgaggagggctggacaggggaagagtttgacagccatgttgtgaaagagcgcgagggaaaacggcctattttaaccggcgatctacaagtcacactaaaagaaggtgtcgggacaattggggagcttacgttcacagataactctagctggataaggagtaggaagttcaggcttggcttgaagcttgcctcaggattttgtgagggtgttcgcattcgtgaagcaaaaacggaagccttcatggttaaggaccatagaggagaattgtacaagaagcactatccacctacgctaaaagatgaggtctggaggttggaaaaaataggaaaggatggctcattccataagaggctgaacaaatctggaatatctacagttgaggatttccttaggctcgtagttcgggacccacagaaattgcgcagtatacttggaagtggtatgtccaacaaaatgtgggatgcccttgtggaacatgcaaagacttgtgtcttaagtgggaaatattacatatactattctgatgagagcagaagtattggtgctattttcaacaacatctatgcattctgtgggttgatttctggcgaacagttctattcatccgagagtcttgatgatagccaaaagctgtttgctgatgcattggtaaagaaagcatatgataactggatgtatgtcattgaatatgatggcaaaggtctattgaaccttaaaccaaagaaaaaggctgcatccactggtcaagctgagacgcatgcttctgcgggtggttcgacttcgtatcaacaacacctctcctcaacgagcatgccagggtcatcaccatcaggtggaactgattccgtagggtatggtgtcgaccaatcagcaacacatctatctcaactccagagttcatccaccaatctccagacgccatacgatgacacattttcgttcctaccacctaacctgctgacagggtctgcaaacgatgccatgggtctggaactgggccagttgcaccaagtaatttctcagggccagccaattcagccagcaaacgtgggatacgttgactggcccaggaaccgcgacagccagtacgccgacgacttcacagaggacattcgcgtgaagagccaccagatgctcgagagcgaggacatgcagcagctgctgagggtcttcagcatgggtggagcctccgggagtttgtcagacgacacgttcaacttccagccctacatgccctctcccttgcccaaccccgggttcgaaagcgagcgcagccattcatccggcaaagctgtcgtcggctggctcaagatcaaggcggcaatgaggtgggggatcttcgtcaggaagaaagctgccgagagacgggcgcagctcgtcgagctggaggattagcgtcgtcgtggctttacaacggtcaaggctgcgttgtaaattactagtagtcatctgtgcccccacataccctcttgataccccattgaaacaggtttctgaaactgttctgaaatgtacaacgagtagttctgctatcttgtacagattacagaattctccttgcttgcttgtgttagtggtgtaacatagctctgctaagtttgacacatgactggaccagcttgtgtatctttattttttcccttccctagctcttcagtgcagaatataccgttacagtgcgaattaatccagagattgtgtgtgtgttgctttttctat

SEQ ID NO: 131341 - DNA, 1268 bp, Zea Mays
actgcctcagttcgtatatcatccatactggtggctggtgccatttatttccattcaccaccaacctgacgagcactgttccgtctccctcgtctctgttctgttctgttgtgttctgtcccaattccagttccagacgagagaaacgcaggcggggcaggcacactgctaccgagcctggcgtcgtcgctggcagtggcatgcgctgaaagaccaccgaaaccacatgtggccagcaggcgcggaggacccgatgggcgtgggcgtggcgggcacggcgggcatgagccacggccccgcggcgccgtcgccgaggtcgtcgagcacgatgccggcggcggggcagtcgccggtgccgtacctcttcggcgcgctggcggccatgctggggctcatcgcgctgtcgctgctcgccctggcctgctcctactggaagctgtccggcggcggccaggaggcgtacgacgacgacgacccggaacgccaggccggcgccggcgcgggcgcggaggcccggcccggccacggaaaggccgcaccgaccggcaagggcaccggggagcgttggcgggagcacgcggtggtcatcatggccggccacgagaggccgacgttcctcgccacgccagcgtcgtcgcgccggggcccgaacggcgcccgtggcgtcggcgtcagcgtggactccggccctggcgactccgaggacggcgacgaggcgaggtgcgtggagtgcggggcgcggtcttggccggctcgcgcggccgacagcgagggcgagccggggcggaccgagcagagtggtgcaagtggtagctcggtaactgtaatcagtgagagatgagagctccttttttttggcgtgtgagtgtgtgtgcctgcgttcggttcgccgcagcccgcaagtaatgggtcgtcggtccagccaccagctcctgcaacggacgccgacctgattttgggagggaaagaagagaaggcaggctgcagctcgtgtactgccgcgtgcgtacatgttttctttttactcgtagaaaatgttgggccttatttttctacgagagccggcaaaacattttctgtcgcatgcaacagatccctgtgacccttgtctgcttccttcaagcgactgcctcctacgagccaaaatcaaaaggctgatatgagagctaccttaccactttattatgggaaaatatatactccctccgtttctttttatttgtcgctggatagtgcaattttacactatccagcgacaaataaaaaaa

SEQ ID NO: 131342 - DNA, 378 bp, Zea Mays
atgtggcgtgggcggtgtgccccggggatcggcgtggcggcgctggccctgctcgccgtcgcggctgccgcaggagccgccgcggggatcccgatcccgacgacctcgagcgcgcgtaagtgtctccgctctgcgacgccggcggaagcaagggaggccctggatgcctggacttcgacttctcgtctcgctactcgtaaccttcggtcgctgcgatgtcgtctgcccatgagcacagacctgccacccaaagttctgaccctccctgcccacgtcgcagcgggggaggcagttgcagctttcgcggggatatggggcttgcgcagagcgggaggcgggggcatagaaaatggtctacactattgtcttaatagttag

SEQ ID NO: 131343 - DNA, 2795 bp, Zea Mays
atgggggttctcggttggggcagcaaaaggctaagaaagcgacagtcagacgaagcagaggccaatggaagcagctgcgctgccgctgtcgtcctcgacagcgtcgtcacctcctgctatgataccgtcaagaagacgtgcaagcggcaacaaagacgtggtcaagatcccccctctttaatacaatctaggacagcacaggagatgaagcgatctctcccactagtccccaacctgcagactgcagtcgcagcgcaaaacggccaaagggccccatttctcccatcacctctcccaaattcaaattcccgcacgctcctcctcccctcccccaatctcacctcctcgccgaaaccctatcagcctccgccgccatgggggggctcgcacagccgcgaggacctcgacctatccgattccgactccgacgacgccgagtcccgggcctccgacaattcctccgactacggcacgcctaccccggcatctgcctcctccaagttggccagcggcgcaggggcggcggccacgcccgcctccatcgacgccatcgaccgccacctccgccagctccacctcaagtacaacgagcccatctccccgaaccctagccccgggctcaccctcagcgccaaccccgccgcgctcaacgccgtcaagctatacctccacatcggcggctcctccccctccgccaagtggatcgtctccgacagcctcgccgccgcctccttcgtacgcaccggcgacgacgaggacgacgacgcgcccgccggcgggccgtggtgcctcgtcgtgggctcgaagatccaggccagggtcgggcccgagctgcagctcaagaccttccccgcgcagcgtcgggtggatttcgtcgccgacggcgtatgggcgcttaagttccgccacgctgacggcttcggtgacttctgcgcgaagtaccacagctgtatgtttgagaacagctacggcgtcgccgccacggacgagggccgcgccaaggtgtttgggaaggacttcgcggcgtgggcgcgcccggaggacggcgacgagtcgatatgggaggacgccaccgacggcttcttctctccgggtcccaagggcagcccgatgcccccgcggacaccagtactgaagcctttgttagaggatctgcgcgagtttgaggagcctgttgaggaaggcagcggaattaacagtcttgcgcttggcgcactggataacagtttcctcgttggagacaaaggcattgaggtcgtgaggaatttcgagcatgggatacacggcaagggcatgtccgtgaagttttctggagggagcacaaacttctcgacaccgaaaaaggctcttcttatgcgggccgagactaacatgctcctgatgagcccagccactgatggaaagccacatgccaagggggtgcatcaatttgatatcgagacggggaaggtggtttcagaatggaagtttgagaaggatggagcggatattaacatgagggatatcacgaatgatagcaaaggtgcccagttggatccatccgaatccaccttcttgggactggatgacaaccggttgtgccggtgggatatgagagatcgcaggggcattgtacagaacttggcaagtgcaactgagtcgccagtattgcaatggactcaggggcatcagttttcccgggggacaaacttccagtgcttcgcttcaactggtgatggttcgattgttgttggatcattggatgggaagatccgcttgtattctaagagttctatgaggatggcaaagacagcctttcctgggttgggttcacccattacccatgtcgacgtgacatatgatgggaagtggattcttgggacaacagatacatacctgattcttatatgcaccatcttcattgacaaagatggaaaggagaagaccgggtttagtgggagaatggggaaccgaattgctgctccaaggctgctgaagctcaacccactggattctcatctagcaggagcaaacagcaggttcagggagggcagattctcatgggtgacagagaacgggaagcaggagcggcatctagtggccacggtggggaagtacagcgtggtgtggaacttcttgcaggtgaagaacagccaccacgagtgctaccagtaccaggaggggcttaagacctgctattgctacaaggtgatccccaaggacgagtcgattgtggccagccgctttatgcacgacaggtattcggtcagcgactccccggaggctccactggtggtggctacccctatgatggtcacctccttcagcatatcaagcggtcactagctctgtgctgcgcctatgaagctcaacctccttcagcatatcaagcagtcactggctccgtgctgctaacttctcagcatgattgctagggtcggttgattgcttctaatgttggggtgtaacatcatactaatagatgaatcttgttttgtttccttttcttggtggactatatatgataatctcatcataatttgtcggagaaccaaaatatatgtttgttgaccaactttgtgcttgtttttttatatatattgtgactcttttgatgctgttagtcgtgtttatgtttatgaaatcaactaggaaaagagatgtattcatgaaatcaacttgtgacttttaaactaattctaattaatcatactactttaaaattatgaggttatcatatagttatccatattataagttatgctgaaagttatataacttcaataatatctagaactaataagtcataattattc

SEQ ID NO: 131344 - DNA, 932 bp, Zea Mays
attccagccaaggacgacgatcgcctcatccatccaaatggccacgcctgctccagccggcgccgccatgcccgagctcgccccggggcagggaagagaagccaagcacgggcgcgccggcggcgggccacgccagagcgccggcgcgcgcctcctatcgctctccgtgcaggcggccgtgatggcggccacgctcgcggtcttcctcgtctttgccgccgcgtccgccttactcctcctcgtcctcgtcctcgccgcgcgcgccttccgccgccaccaccgcatcacgtcgctcgaccttgccccttcgccgccgccgcctctacgcgcggggctctcgcccgtcgacatccgccgcctgccgagcttcgccttcccctccacgcgtggcggctccggcgacgagaccgccgccgcctccccctcgtgcgtcgtgtgcctcgatgccgcgcgcgccggggagcggtggcgcgcgatgccggcctgcacgcacgcgttccacgccgcctgcgtcgaccggtggctcgccaggacgcctgtctgccccgtctgccgcgccgccgtcgccgtcccgatatgagctaaggccgacgccgcgaacctgcccacgcgtgcccttcgtcctggtcgtgtagtcatggaggccgatatgagcggtggctgttgtaaagaagaatgcgggggaaagaaaagaatgaacccacgaaaccttaccatcgcagatacagtacttgctattttgaatgccaaaactcctccttggattgcaacatgttacttgtacattacatgctgcattgggatccagcattagaattggatgatccagcatcagaattggatttgatgtgatacttgtgctaatgtgctgtacaacgatattgtatcgcagtgaggtagaaagattggagaaattgttagaactgatgatt

SEQ ID NO: 131345 - DNA, 99 bp, Zea Mays
aaccaagtcaagccaactttcccaaaacactctatatgaactctacaacaaaagttattaagggttcttgtagagaaaatgccaaaaaaatgtcgagaa

SEQ ID NO: 131346 - DNA, 727 bp, Zea Mays
atggttacatttactatagaactggagttattttttgatgcaaaggctgccagctatctaaaaggacagaaaggcagacatgagcaacaaatcccgctccatgggctgaaactgggattcgtgatggctaggggattgaagaagcacttgaagaggctcaatgcgcccaagcattggatgctcgacaagcttggtggagcttttttcatgctctgcaaggtaaggtctgttcagtttggccagaaaggcatcccctgcctaaacacctacgacgaccgcaccatccgctaccccgacccgctcatcaaggccaacgacaccatcaagatcgatctagagaccaacaagatcatggacttcatcaagtttgacgtcggcaacgtggtcatggtgatcagcgggaggaacaccgggcgtgtaggagtgatcaagaacagggagaagcacaagggcagcttcgagaccatccacgtgctgcttggagctttttgctatatctagttttctcctatttgttgtacaggaaaacatagaatggaattcaactttggtggccgcaaaagtgtagagacttgatttcatataaagttaggcttaacattagtgcaaacagttgtattttagtttagatttagagtacacttatgtatgtgttgtttgacaatgcttatttatgatatattgaatggtacttatttatattatattaattataatgttgttcaat

SEQ ID NO: 131347 - DNA, 1938 bp, Zea Mays
atttaaatcctccctccaaatcacccaccaataaacaacaaatcgtccactagtcactggtaactggtcactcactgctcaccactcaccagtccgtccggcgtccacaccacacccccgccccgcgtctccggcttgccaacagacagagcgcctgcacggctgcactgcaccgcgcgctactgcagcctcgtctcgtcaggccacgcccgctcggggatggcgaccgtcccaaaccccaagacgaccagggccaggagggagccggcgctgcgtccccgaagcaacaacgtcgcggcggctccggctccggctccggccgtggcgagcgtcaggcgcgggccggcggcatccgccgagaaggagaaccagccgcccaagagcctcggccacgggaaggcggcggctgcggcgacggccgccgagccgccgaagcccgcggagccggcgccggttgtagcgccacctccgccgccgctgaggccgtcgtcgctgcagctccgcatgaaggacgaggcggcggcggcggcgctgcccgcgttcgtcgtcgggcccaggggcagggagctgctcccgccgccgtcctccaactacgaggcgtgggacctctccgacagcgagtccgcgccggcctcctcctgggccacgctccccaacagggcgctgctgtgccggcctctgcctcaggacgtcggacggtgcacgtgcgtcatcgccagggaggcggccaccggcgccagaggcgtcgcgctctactccctctataccaatgaggggcaggggcggcaggaccgcaagctggcggtggcgcggcaccggaggaggaggggcaggtccgagttcgtcgtggcgcagaaccaggacggcatcttctgcaccgccgacaccagcttcctcggcgcggtgcgcgccaacctggtcggatccaagtaccgaatctggggccagggtgacgagctcaagaaccagtcgaagcggctccttgccgttgtcgcgtttgcccccaccatcaccacgctcaccgggagtttcaggagcttgagggcatggatccccaagaaccagtccatgcagctcaaggcaaacagttctgctcagatccagcatgtcagtgggctcccaaaggattggcaggagaagaagagcagagctgaccagttgtgctcaagagccccgttctacaaccatatgacaaagcgctacgaactggacttcagagaaagggcaggaaggatggggtacaaggtgcaaacatcggtcaagaattttcagatgactttggaggtagcagcatttcatttctgtggctcatacgtagcacgtatcagagatcatcagatccataacacacatttaactttgcttggcaggaaaatgggaggcagacggtgttgcagcttggtagggttggcaaatccaagtacataatggactttagatacccgctgaccggctaccaagcgttctgcatctgcctggcatcgatcgacgcgaagttgtgctgcaccctgtgaaatagggagccgttcgaggaagaagtgtttgtttgttatgctgcactctgtacttgcagcttctccccttgagaaggcaattgaataatagaccatgctataatgtgcgattatccttttgcaacttctgttgcttaatcggtcaagcagtatttaccatacttgaggacagcgtgtcgcaaacacatcgtcagtttgtaatcccccttttacactgacgaaagcaccgatgggaaggcacacctgtagcatttctatactgaatgtaaggcaacatgtaacattgcacagataaaccaattcaaatgactgtcagctccatatcaactctgagtagtccactcggaacttccaatcttggtcaatgtggctcagatgttgacgaaaggctgccaaggttcaaaagaaagatagtttacaagaa

SEQ ID NO: 131348 - DNA, 1852 bp, Zea Mays
atttaaatcctccctccaaatcacccaccaataaacaacaaatcgtccactagtcactggtaactggtcactcactgctcaccactcaccagtccgtccggcgtccacaccacacccccgccccgcgtctccggcttgccaacagacagagcgcctgcacggctgcactgcaccgcgcgctactgcagcctcgtctcgtcaggccacgcccgctcggggatggcgaccgtcccaaaccccaagacgaccagggccaggagggagccggcgctgcgtccccgaagcaacaacgtcgcggcggctccggctccggctccggccgtggcgagcgtcaggcgcgggccggcggcatccgccgagaaggagaaccagccgcccaagagcctcggccacgggaaggcggcggctgcggcgacggccgccgagccgccgaagcccgcggagccggcgccggttgtagcgccacctccgccgccgctgaggccgtcgtcgctgcagctccgcatgaaggacgaggcggcggcggcggcgctgcccgcgttcgtcgtcgggcccaggggcagggagctgctcccgccgccgtcctccaactacgaggcgtgggacctctccgacagcgagtccgcgccggcctcctcctgggccacgctccccaacagggcgctgctgtgccggcctctgcctcaggacgtcggacggtgcacgtgcgtcatcgccagggaggcggccaccggcgccagaggcgtcgcgctctactccctctataccaatgaggggcaggggcggcaggaccgcaagctggcggtggcgcggcaccggaggaggaggggcaggtccgagttcgtcgtggcgcagaaccaggacggcatcttctgcaccgccgacaccagcttcctcggcgcggtgcgcgccaacctggtcggatccaagtaccgaatctggggccagggtgacgagctcaagaaccagtcgaagcggctccttgccgttgtcgcgtttgcccccaccatcaccacgctcaccgggagtttcaggagcttgagggcatggatccccaagaaccagtccatgcagctcaaggcaaacagttctgctcagatccagcatgtcagtgggctcccaaaggattggcaggagaagaagagcagagctgaccagttgtgctcaagagccccgttctacaaccatatgacaaagcgctacgaactggacttcagagaaagggcaggaaggatggggtacaaggtgcaaacatcggtcaagaattttcagatgactttggaggaaaatgggaggcagacggtgttgcagcttggtagggttggcaaatccaagtacataatggactttagatacccgctgaccggctaccaagcgttctgcatctgcctggcatcgatcgacgcgaagttgtgctgcaccctgtgaaatagggagccgttcgaggaagaagtgtttgtttgttatgctgcactctgtacttgcagcttctccccttgagaaggcaattgaataatagaccatgctataatgtgcgattatccttttgcaacttctgttgcttaatcggtcaagcagtatttaccatacttgaggacagcgtgtcgcaaacacatcgtcagtttgtaatcccccttttacactgacgaaagcaccgatgggaaggcacacctgtagcatttctatactgaatgtaaggcaacatgtaacattgcacagataaaccaattcaaatgactgtcagctccatatcaactctgagtagtccactcggaacttccaatcttggtcaatgtggctcagatgttgacgaaaggctgccaaggttcaaaagaaagatagtttacaagaa

SEQ ID NO: 131349 - DNA, 277 bp, Zea Mays
tagcatgttaaaaaggataataaagatttcaagaacagacgaatcattctgaatgtcatgtgaggatctgggatgtagcaaacataaaaattgggggcagtttaacataattcattcgttttcacagtgctctaatgctacacagggaaaccaaaagtagaacctcagtcaatacattatgtgtagagatagaaaactatgaaacttcatgcgccagaattgatgaccagacacatgctcatccaactggggcccaaggggcaggaagaataatgag

SEQ ID NO: 131350 - DNA, 384 bp, Zea Mays
atggaacagggcactaacctcttaatgaatttaaattttgaaaaggtagaaacttcacaggaagatcctccttattctatcacgagcaaccttcatggagttcttgcccaccatcccggtgaggaggtgctaagcgccaaggttggatgtcatgatgaccatggtgttcctgaagtccaccgtcctgtcttgcccatccatcagcctgccgccgttgaggacctagagcagggtgttgaacatggcgacatgggccttctctacctcatcaaagaggatcacgttgtacggcctcctcacttgttcagtcagctacccaccctcttcacggctgatgtagcttcagtcataggtaaaaaaattctagcccatgtcagaacatga

SEQ ID NO: 131351 - DNA, 4101 bp, Zea Mays
gagaccgaatcaaacccattcgtgatcggtggattgcttcccgcctctcggaggtcggttccatctgttaatcaacaaatcccaaacttctcgcccgacaaatccgtgcgggcttggtgaagcggggtaaattggtccagtagacgtcggtccaacgaagtccccgtccctcgccggaattccaggccgttcttgttggggcagttgaggatttggtgcgtctgatcggaggcgtgggggagataaggcctcggcggacgttggctcgtgctctttttcgacgggcggaggctatcccgtcggagaggttaaagagttcggtgtttcgtgtttggtggtacggtagaactgtagattaatctgtactgtgtgaagaaaaagaagaagaagattcggttttggagtggaattgtgggctgtagtcgaatcgcgaggaagatgagttccgggtcggcggtgacaggcggtggtgcggaggaggcggcggcggtgccgctggggcagaagttgatggtgcacgtggcggagaacggccacaccttggagttccagtgcggcggcgacacgcttgtcgaggccatccagcactccatccaccacctctgtgtcataccgcccagcgaccagctcctcctctgcggcaacacctccctcgacggcgccaacgcgctagcctactacaagcttccgcgtgacgaccgtgaggtcttcctctacaacaaggcccgcctccttgcggactcccgccccccggcgccggagtccatctacatccctgagccaaatattccaccaccaccgccccggccgcaggactcatcacctgtgggcgcatctgcagacccggctctgaaggctctggtatcttatgaaacaagattcagataccacttccaggtcgccaatgcggtgtaccaatctagcttggcaaaatttgagctgtgcaggcggcttctgcgggaggggcaggtgcaggagcgagcgctggacacagcacggagcaacctagagcacacgttccggaagctctcacagcggtactcagaattcctgcggtgcttcacgcagcagcaccgttcacatgttgagatgctggccaatttcgagagagatgtgcagaagctgcgtgctgttaggctgcacccagcgctgcaaagcgaggggaggcattgcttgatggaccttctcaaggagaatgacctgaggaaactggctgacggatgcttgagctcacataagaagtttgaggtcaaggtgtcacagctgaaggcaaacttcttggagctgaagaagagggtggaaggcttattcaatgccatgaactcaggtgggtgcaaggatgttgagaagcttataaaggagcatcagggagtcattggtgaccagaagatcatcatgcaggctctaagtaaagatgtggacacctcaaagaagcttgtcgatgactgctcaagttgccagctatctgcttctctccgtcctcatgatgcagtctcagccgttggccgtatctatgaaatacatgaaaatgataacttgcccagcatacagaattttgatcacagtctaacaaaattgcttgagaaatgcaaggacaagaagaatgaaatgaatactttggtccatgtttgcatgcaaagagtaaaatcttctcagattagcatcaaaggcatgatgagtgagctcattgcgttccaagaggtgatgggtcatcaagaagattttgataatctgaaaatagtcagtggcttgggttatgcatatagagcttgtgttgccgaggtagccaggaggaaatcatattttaagctgtatactggatttgctggaaaacatgccgaaaagttggcaatcgagtgtcaaaacgagaaaacaagacgagaggatttccataggacatggagcaggtacattccagatggtgtcatgtgttccatggggctctttgattctccaagccagtgtgatgtaaaagtcgctccttttgattgtgatcttcttcccattgatgttgatgatgtggaaaagcttgctccccagtctatactggggtcttttctgaaatctgagagatcacagatagcaaagcctttgctaagcaattctagtatcagtggaaatttgaacaaatctgagcaaaattctctgagcgctgacgataagatggatttccaagattttctggggggctatgatactattgacattgcaggaactagtaagttagaagtggaaaatgccaggttaaaagcagaacttgcttctgcaattgcagttctctgcaatatcagtgctgaatatggatacgagtctattgacgaagggcaaattgatgctgcattgaaaaaagcaagggaaaaaacagctgaggcacttgctgcaaaggatgagtttgcttaccagcttcagtcattgctcactgcaaagcaggaaaaatgcctggcatatgagaagcggatccaggatcttgaggaacgcttagccaaccagtacattaaaggtcacatggtgtcaggaagcaaagacacttctggttccctgctttcagcatttaaaagtaatgactgcaacctggatgtatctggaggaaggcaaacccaaatacgtgatgaatcaagtgtggccatggatgaggcctcttcaacatctgaacagccatctaaacaagcagaaggtggcgatgagaatatgactgacatttcaggtgcactgaacttgcagttgcttgattcagcagcatgtactaatctggatgctttcatgacagaattgccacgtgataatgaacataagattgtaaacattgataaggaagggcacatgttgacacaacttactatggctgatacttctgatgtccgtatagaagatcctcttagcatcttaaactcaagaactaatgagcatcacaccttagagttgaggaataaggagctccttgtgtcagagctgcaaagtaccctagatcaaaagtcaaagcagttgggtgaaactgaaattaaacttagcgctatgatggatgaggttaactccctgatgaaagaacttgaacaaatccggggtcttcttgatgaatctcagatgaattgtgcacatcttgaaaactgtttacatgaagcaagagaagaggcccgaacaaacaaatgctcatctgacagaagggctgttgagtatgatgctctgcggtcatctgctttgaggatacatggtttattcgaaaggctaaataattgtgtcactgcaccaggcatgactggttttgcagagtcactgcgttctctggctctttccttggcaagctctgtaaagaaggacgaagctgataccactgtacagtttcaacaatgcatcaagatcctggcagacaaagtttatttactgacacgacagagtgctgagctgctagaacgctattcagctatgcaggcggtacatggagatatcacaaaagagttggatttgaagaaagtgctgattaagaatctctacaataaacttcaacaagaaaaacaggccagcaaggagaagatatcatttggtcggtttgaagtccatgagcttgctgtcttttttcgaaactctgctgggcactacgaggcgatcaaccggaactacccaaactactttctgtctgaggaatctgtcgccttgttcaccgagcaccacctgcggtacccagcgtacataatcgggcagatcgttcacatcgagcggcacatagcgcacccaggccaaatgagaggagctccacgccctgatagcagtggcggccgtcggtcgcccgcagccatgctcaccccctacaacctacctgggggccgtgagtacttcgtggtgactgttgccatgctgcctaatgctgcccgttgaaacaaaacaccttcctgatcctgcctgacaatggtctgctgaaatgatgggggaaaactttcaactgtatatatactgaaatttattactatactctcaattctcagttgcttcctcaagttatgtttgtatatatgatcatcttcacggtgtaaaaagactcggctactgatgctaggcatctcttcgttcaagcagactgaatattctttcagctagcatcacattatt

SEQ ID NO: 131352 - DNA, 119 bp, Zea Mays
ttctttttttattttcatttccaattgggctgaagtttgtggtcgtccgtttcaacctctcgcatgtgcgtccaagccgggaggttgtacatctctaatccaggggcccacactccaga

SEQ ID NO: 131353 - DNA, 1859 bp, Zea Mays
atggcgactctccccagtcgaccaggcacctcttcgtcctttgggcccgtaccctccgcttcctcgggcgtgtccgccggccatttggacgccgtcaaaccggttggccgtgtccgggtcatctccgcgcccctcctccaaatggccaaaccctaccttgttgtagctagcctacccctccagacgccattatcttcttggtcagtcctgcccactactcgtctcatcaggaagcacggtgctattggcaaattcgttgaattctatggtgttggtgtgggcgagctatctttgcctgctagggccacaattgccaacatgtctccagaatatggagctaccatgggcttcttccttgtgtcgatgattgaagcatacctgcgagctaacaaaatgtttgtggacaagcatgagcctgagacggaacgagttttctcttcatatctggagctggaccttagtgaggtggagccttgcgtttcaggccccaaaaggcctcatgatcgtgtccctttgaaggaaatgaagtcagactggcatgcttgcctggacaacgaagttggtttcaaggtgaagccatgggtaaagacaagccttacccctggatctgtggttgctactgagtacttgaaacatagatatcgttgctgctgcggtgctgtatcctactacctgctcaaccttggggacagcatcaccacggaccacatctcctactcggggaagatccccgagggcacacctgcggccaagtatctgctcgagtatggcgtggagcccaagaacttcagctcctatggtggccgccgcgggaacaatgaggtggtgatgaggggagcgtttgccaatatgaggatcgtgaataagcttcttaatggcgaggctggtccctggacaatccatgttcctaccggggagaagctctacgtttacgacgcggcaatggttgagaagatggtgcttctggcatgtggatggcgctatacgattactgtttgtgactcaagtaatctatacacttatggttggcgcaaatacgttcaactaggacatattgattttgaagatgatttagttccacataaactagaagcattgaaagatagcactatatctcaggtaataccttttacaaacattccatgacatggtttcaaaacttcaatttcgcttttctaggatacttacaaagactagttccatacttctatgcacatgttgacatcgacataccttatactgatggctataatctactttttacatattggtatatgtagtcaggtttacattaaaagtttaggaaactcacaaacaaataggaatatatctaatgctacttagcccaaagccccatacaaaaatatccctgccagaattaattagcatgtcctcagatgggacataccagtatttcataaaaatgattgtctctccaattgtcagcagacttacttccagcaaagttcctaagaagataagttcttttgacagatacaaaatctagcattactctattcttttttatatatctatatgacactcatgatgtcacaatgtgaggtgttcaactgtgtctaactaataattattgtcttctcctatttgttgtacaggaaaagatagaatggaactcaaattttggtggttacactggtgtggagacttgaattcatgtatacacttagttagactcaatgttagtgcaaacagttgatgaccaagttttttaattagtattttagtttggatgtatagtacacttatgtatgagttatttgacaatgcttatttatgagatattgaatgacacttgtctatgttatattaattataatgttattaaatatatgggcatc

SEQ ID NO: 131354 - DNA, 1865 bp, Zea Mays
cagccaatgggcatggttttgcctggtgtggttggattcaagttgagtgggaagttataggatggtgtcactactactgacattgttcttactatgacccaaatgctaaggaagcacggtgctattggcaaattcgttgaattctatggtgttggtgtgggcgagctatctttgcctgctagggccacaattgccaacatgtctccagaatatggagctaccatgggcttcttccttgtagacaagtagcattggactatctcaaattgacaggccgaagcgatgaaactgtatatttcactatgtgcagactactcttttaccatacccgttccatcattctgatatgtatatatttttattaataaagcaaagttgtatatattgcattaaatgtgattcaggtgtcgatgattgaagcatacctgcgagctaacaaaatgtttgtggacaagcatgagcctgagacggaacgagttttctcttcatatctggagctggaccttagtgaggtggagccttgcgtttcaggccccaaaaggcctcatgatcgtgtccctttgaaggaaatgaagtcagactggcatgcttgcctggacaacgaagttggtttcaagggctatgcggtgccaaaggaacagcaaggcaaagttgtgaaattcaacttccatggaaggccagctgaaatcaagcatggcagtgttgttcttgcagcaatatgcagctccacaaacacatcaaatcctagcttcatgattggtgctggccttgtggaagaaagcatgcgaattgggccttgaggtgaagccatgggtaaagacaagccttacccctggatctgtggttgctactgagtacttgaaacatagtggccttcaagattatctgaaccagcaagggttccatgtcgctgcgcatggctgcgccacttgtgtgggcaactctggtgacctggatggatctgtatccgctgctatcatagaaaatgatatcgttgctgctgcggtgctgtatcctactacctgctcaaccttggggacagcatcaccacggaccacatctcctactcggggaagatccccgagggcacacctgcggccaagtatctgctcgagtatggcgtggagcccaagaacttcagctcctatggtggccgccgcgggaacaatgaggtggtgatgaggggagcgtttgccaatatgaggatcgtgaataagcttcttaatggcgaggctggtccctggacaatccatgttcctaccggggagaagctctacgtttacgacgcggcaatgaaatggaaggagatgctgtcagttttacccaattatcgagtgaaggagtatatgaagaaactttacaagacatctgtacaaccctagatgagttgcagtagattccacccattaaggacaaatggacaataatccatcatcgaagccaaatcataagctaaaaggttgagaagatggtgcttctggcatgtggatggcgctatacgattactgtttgtgactcaagtaatctatacacttatggttggcgcaaatacgttcaactaggacatattgattttgaagatgatttagttccacataaactagaagcattgaaagatagcactatatctcaggaaaagatagaatggaactcaaattttggtggttacactggtgtggagacttgaattcatgtatacacttagttagactcaatgttagtgcaaacagttgatgaccaagttttttaattagtattttagtttggatgtatagtacacttatgtatgagttatttgacaatgcttatttatgagatattgaatgacacttgtctatgttatattaattataatgttattaaat

SEQ ID NO: 131355 - DNA, 1715 bp, Zea Mays
ttgcgccgcggcagcagaacaccttcctgacccgaattcaatccgtgcgcaggcaccctccgccggcgatggctcacgcatcgctcggcgcccgccccacgtccccgaggcgacgaccggcacaacgcgccctcgcggcgctacccgacacctgcgacgaaacgcgccaagttcaggagcgcgtcgacacaggggctcgggaacacggtgtcgccatcgcggaaccctagcgagatcgtcgggaaggtccgaaggtgtcgatgattgaagcatacctgcgagctaacaaaatgtttgtggacaagcatgagcctgagacggaacgagttttctcttcatatctggagctggaccttagtgaggtggagccttgcgtttcaggccccaaaaggcctcatgatcgtgtccctttgaaggaaatgaagtcagactggcatgcttgcctggacaacgaagttggtttcaagggctatgcggtgccaaaggaacagcaaggcaaagttgtgaaattcaacttccatggaaggccagctgaaatcaagcatggcagtgttgttcttgcagcaatatgcagctccacaaacacatcaaatcctagcttcatgattggtgctggccttgtggaagaaagcatgcgaattgggccttgaggtgaagccatgggtaaagacaagccttacccctggatctgtggttgctactgagtacttgaaacatagtggccttcaagattatctgaaccagcaagggttccatgtcgctgcgcatggctgcgccacttgtgtgggcaactctggtgacctggatggatctgtatccgctgctatcatagaaaatgatatcgttgctgctgcggtgctgtatcctactacctgctcaaccttggggacagcatcaccacggaccacatctcctactcggggaagatccccgagggcacacctgcggccaagtatctgctcgagtatggcgtggagcccaagaacttcagctcctatggtggccgccgcgggaacaatgaggtggtgatgaggggagcgtttgccaatatgaggatcgtgaataagcttcttaatggcgaggctggtccctggacaatccatgttcctaccggggagaagctctacgtttacgacgcggcaatgaaatggaaggagatgctgtcagttttacccaattatcgagtgaaggagtatatgaagaaactttacaagacatctgtacaaccctagatgagttgcagtagattccacccattaaggacaaatggacaataatccatcatcgaagccaaatcataagctaaaaggttgagaagatggtgcttctggcatgtggatggcgctatacgattactgtttgtgactcaagtaatctatacacttatggttggcgcaaatacgttcaactaggacatattgattttgaagatgatttagttccacataaactagaagcattgaaagatagcactatatctcaggaaaagatagaatggaactcaaattttggtggttacactggtgtggagacttgaattcatgtatacacttagttagactcaatgttagtgcaaacagttgatgaccaagttttttaattagtattttagtttggatgtatagtacacttatgtatgagttatttgacaatgcttatttatgagatattgaatgacacttgtctatgttatattaattataatgttattaaat

SEQ ID NO: 131356 - DNA, 729 bp, Zea Mays
ttgcgccgcggcagcagaacaccttcctgacccgaattcaatccgtgcgcaggcaccctccgccggcgatggctcacgcatcgctcggcgcccgccccacgtccccgaggcgacgaccggcacaacgcgccctcgcggcgctacccgacacctgcgacgaaacgcgccaagttcaggagcgcgtcgacacaggggctcgggaacacggtgtcgccatcgcggaaccctagcgagatcgtcgggaaggtccgaaggtgagcacgtgtttgtgtaacctttggctccggttcgcaatggtggacggcgatggtgacagggaacaccagcaatagccggttgtggcagctgccgccgcgtcacatagcgccgagttggaggggcacatcacgtgaatagatctgcgcagtctcgcatcatggcagtgccggcggcctcccgggcatggcgactctccccagtcgaccaggcacctcttcgtcctttgggcccgtaccctccgcttcctcgggcgtgtccgccggccatttggacgccgtcaaaccggttggccgtgtccgggtcatctccgcgcccctcctccaaatggccaaaccctaccttgttgtagctagcctacccctccagacgccattatcttcttggtcagtcctgcccactactcgtctcatcaggtaacactttgtatatggcagtcaacaaggaaactctagtcagtgcaaagctagcctt

SEQ ID NO: 131357 - DNA, 450 bp, Zea Mays
atggacacatgcgagaggtggtctgacggccaggatgcagaggtgcgagaggatgcaaacatacttgatgtgtttgtccccagggtgcggcaaacatttgatacaagggaagaagtctacctcttttaccttgactatgcaaagttggctgattttagtgtcaggacaaagagatgcaactgctggtatggttcgaaaattgtagcattctgtcgggagcgtgcggaagggacgaagacgaagtgtcggttcggcctgggtggggcggttggctcggaccaggatgcaaacatacttgatgtgtttgtccacagggtgcggcaaacattttatacaagggaagaagcctacctcttttaccttgactatgcaaagttggctggttttagtgtcaggataaagaggtgtaattgcaactgctggtgtggtgtgattgcaaccccgcattag

SEQ ID NO: 131358 - DNA, 606 bp, Zea Mays
agtcaaccacaaacagatctttcattattttcagataagatgggtacaccatgcaactaaaatcagattcatcatatacttacaacccgaaatagcgagcgggcaattcaggtttcgagtattttgcacctaaccgccagcaaaacacactaacgtcacggttcattctcgcaacaaaaaactggatttgacaccattttggacaacgaaaacacgaggaatgctacacaccacacaaagaatagacagactcagccatggttccgagggctggagagtggagatgaccgaaagctggcacaagaaaggttgtgatctgaagatccaccactgcactaggcaatgccattgtccggggtaacttaggcaggatttgcatggcatgccacgtacagttgagatacgtacactgcaggtttcttcgttcctttttttcacctgccttatgaaagcaaatggttgcgccctggtgagtgccagccatgcttcactcctcagcaacactggtccaaagaattttctgttctgttaatgcgctacaaagatacgagaaaggttccagctaggaaagcaagcaaggcatgcactcaccgactcttggcttcg

SEQ ID NO: 131359 - DNA, 1354 bp, Zea Mays
actccgaccatttccaccaacggtctggacgggtggactgaccacaagtcgccgactcgccatccgcgtcaacaccactgcaaccaccaccgccgtgtgggaggcccaaaccacgcgcctttccccactgcaccaggcaacccaccagcaggccgcagttcacgcttggctgacgaccgacccccattcgttctagccctccctccgacactccgatccattactcgctatggacgcggcgggcggcgaccagctaagcctggccgcggtgcgcgacgcgctggtgcggctggaggactccgtggtgttcgcgctcatcgagcgcgcccggcatccgcggaacgcgccagcctacgcgcccgccgccaccgctggagaacattcgctcgtggagttcttcgtccgggaagcagaggccctcaacgcaaaggctggacattatcaaaagccagaagatgttccattcttccctcaagatctaccctcacctctctttcctacaaagccttccccaaaggtcttgcacccttttgcttcattggtcaccgtgaatgatgcaatatggaaaatgtattttgatgaattgctcccgttattcactgttgatggtgatgatggcagctatgcacaaacagttgcactggatttagcgtgtctgcaggttctatcacaaagaattcatattggtaaatatgttgctgaggtgaagttcaaagacgctcctcaagaatatagtcgactaataaaagaaaaggacagcaattctctgatggatatgctgacattcaaggctgtggaagagaaggtcaagaagagagtagagaagaaggctaggacgttcgggcagaacgtcaccttggatgacaatgccactgctggtgacagcgagtgcaaggtcgatcccaaagtgctctccaagctgtatgatcagtgggtgatgccactgaccaaggatgtcgaagtcgagtatctcctgcgccgcctcgactgatcagtgatcacccgattagctgtagctgcgaactttatgtacgcgtgggtttcagtttgctttgcacatgccctttatggctttatcgttcaaactcaactacgagagaacgttaccaggatctggccttcgtctttgtcagcctgcttgcccgtcatctgcatgagtagtccaactgtaagtgacgcttggtatggaatgtaagaaaagtaatacaactggttacatgttatctttaatctcctgttgttcgtctgtaagtgactggcaacacagtagggtaccaattctctggttcagaaacgtattatgtttcttgcttacgtgacaaataccaaacaaaatagttacagctttgacatg

SEQ ID NO: 131360 - DNA, 534 bp, Zea Mays
cgctgaaatcaccctgcagacttcgcattttgctatgtaaagaacagactacccagacaaggatgtgtatagttgtagtgcaaaagcaacaggatgcaccatagacagagacaagacatttttgctattttgagcacgtgtgcagatccacctcaaagtttcgaaacgatttcgggtggtggctgtgatgtcgtttgaggcaggcagctgcgtcgttcaggcacctggaacaacaaaaaaaggcaacatgttattaccttggcgccagatgtcttcgggaggaaccccttgtcttgaagggacttcactgcttcgtacaggtacccatgcactggcgtgaacttgacgccaaggtccttcagaggttggttcgtaaacttgtagcccttcttcagtgggttcacctgatccttgcacctgcaaaaacaaaacaaaaaaatagcatgctatcagtgtagtgctgcaacagcaaagagcaaatgcatttgtctcgaagcagtttgggactccagacaggcagacaccatgtatata

SEQ ID NO: 131361 - DNA, 460 bp, Zea Mays
aaatttttcatcttgcagtggtacccttcgccttgggagctgaaagcatggggagatgctgccggccggccggccagtacactgcaacactgagaggtcatggacgaggacgactcatggtggtgggtggggtcgatcaagttcttgttgttgggtcgaaaatggagcacggagacgagccatatttagcaaggaaggtagtgtcctcacttcgccccggccccctgcgtgccatgccagctgataagcttgcatctaggttatagccgcccctttctctctctctctcgtgcacatcgttttagcctacagatcgaagcaaaagcgagcatggtgttgtacgtgttgcagctacctttactgatgcgtggggtgcataagagagtgtgtgtgtgtgtgtccggccgtacgtctctttgttcgcattccgtttggttttatatcgcttggaattttgctt

SEQ ID NO: 131362 - DNA, 377 bp, Zea Mays
gagactgttaaacggaaccatatcgtgaaaaaattattcaacttcgtcaagtgtatcggtcctacatgtatagacatggataggttctaaacccacatgaacctagcaggacccaaaaaaatttggcagcataaattcgctgccactaaataatattacttatatacaaaacaaacaatgatataatactaatcaaatcaaactaagtaccacattcactaattatgcaactattatacgtaccaatataatataatattaaagctaataatataattagtaccacatattaatatgaaattaatgcctaaatacaatatacctctaatcactaaaccacatataccactaatacattaatgaaatcgaactaaaca

SEQ ID NO: 131363 - DNA, 274 bp, Zea Mays
attgacagcaagtccggagagagtagctgggtggagatatcgccacgtctcaagtctcgggggcgaattcaggagctttggtcgcgttgaagggtctcgcgcgaggtgttgccgtgtatggtgggtgctcggctggtcgggaactcgccgccgtcgtgggatctccgtgtccggccactgcgggtcgtgccggctcacccaccatctcctcggtcgtcgacgagccagtgaccaaggatctaggtgtttagcaggtttgctgagcaggagctca

SEQ ID NO: 131364 - DNA, 201 bp, Zea Mays
atggcgacagagagttgtggcagtgatttgaggtgcttgcctgtagagaaagttaatggttgcactgtgggtggggcgtggcagcggttggtgatacgtgcagggagaaaaacatatctgcgcgcttcgtgcgtgaagcatgacgcggtacggaagaatctggatgaggaaggcagagacgaggaaagagatgaaagttga

SEQ ID NO: 131365 - DNA, 1065 bp, Zea Mays
gtcagctcttgcgggaagcactcaattgtaatactgtgaagtctgaaccggctggcctggccgttgctgagggagaggataaagaacaccgaaatgccactcctgctgctcccaccaccggcgtgcaccacggcagcgacgtcgctcgctttctcgcggccccggccttcgcgggcgcgttgggccaacctctcttacgcgttcccccgcctgaggaaatacgggcgtcgccaccgcgagcccgtggccggccccagcctcgatgatgacggcggcgaggaggatgagacggaggcagaggactgggagtccgacgatggcgatgaagagatggagatagacgaggaggagtttctgacgatgcggcccaaaccggcgggatttggcgaggggaaaacatattccactgacattgaggagcagcttctccgggagatgggctttggcgggggcgcggcgcggcgaggagaggcggccccggccaatcgccgcgccggggatagttccaccaaagtagctgccgcagatgtcagtgatgatggtgttcaagttcgtgtttggaacctcccaaaaaagaaaaacatacacaaggacctgaagcaagcttttaaagggtttcatggccttttatccattgatccagcagtttccgcaaataagaaaacccgtgatcctatttgtaagggttttgcatatctcaaactagagtctgctgaagctgcaacaaggttcgtggagatatactctcatcaaactgtgtcatttggcaagattcagaagccaatcagttgctgtatcatcgataaacgcagctctgttgagcattcaaataagcatccactagtcaggcaatccctcaattaatgtccaagcaccaaaacttggtagcggcaagttgagtaacacatatctgccatctagcacaagtaatcacgcacttctaggggtctcaagttttatgaaaaagctttgataaacagatagattagacagttctctgtattccaaataactgtttgtatcaagcaatttggtcttgtttttttaggggaagcaatttggtct

SEQ ID NO: 131366 - DNA, 2337 bp, Zea Mays
ttcgcctgcgctgccggcacaccttctttccccttctccaagcgtcgccactcctctccgctgtgccctcccaacaaccgtcgccgccgccacaaataaccgagccagcatcttcgcggcgtattgtacgaggagatgttcctgaacctctaatgaatagaaggcttatttcgttggatatgggagcattacttgctggagctaaattccgtggtgattttgaggagagattaaaggctgttctaaaggaggtcactgcttctaatggacagatcatcttgttcattgatgagatccatactgttgttggtgcaggagctgctggtggagcgatggatgctggtaacctgttgaagccaatgctaggccgtggagaactccgctgcattggagcaacaacattggatgagtacaggaagtacattgagaaggatgctgctcttgagcgtaggttccagcaggtttattgtggtgagccagcagttgaggataccatctccatattgcgcggtttgcgagaacgatatgaactgcatcatggtgttaagatatcagatggggctcttgttgctgctgcagttctatccgatcgatacatcactggacgttttttgcctgacaaagccattgatctagttgatgaagcagctgccaagctcaaaatggagataacatcaaagcctattgaattggatgaggtagacagagaaatcataaggcttgaaatggaaaagctctcattgaagaatgatacagataaggcctccaaagaacggctgagcaagcttgaagctgaactagaatctctcaagcagaagcagaaaagtctttcagaacattgggaatatgagaagtctttgatgactcgtataagatcaattaaagaagagactgacagagtgaacctggagattgaagctgctgagagagaatatgatttgaatcgtgctgctgaactgaagtatggaacacttttatcacttcagaaacagctggaagaggctgagaataaacttgttgaattccagcaatcagggaagtcaatgcttcgagaagaggtgactgacgtggacattgctgagattgtgagcaagtggactggtattccagtgtcgaaccttcaacagtctgaaagggaaaagctgctgctgctggaagatgtacttcacaagagggttattggccaagacattgcagttaaatcagtggccaatgccatccgccgttctagggcaggcctatcagatcctaaccgtccgatagcaagcttcatgtttatgggacctacaggtgtgggaaagactgagctgggtaagacactggctgaattccttttcaacactgagaatgccctaatacgaattgatatgagtgagtacatggagaagcacgccgtctcccgtttggttggtgccccacctggatatgttggttatgaggaagggggccaattgactgaatcagttcgtcggcgaccttactcagttgttctgtttgatgaaattgagaaagcacaccaggaagtctttaacatattgttgcaactgttggatgatggaagaatcactgattcacaaggcaggactgtcagcttcactaactgtgtcataatcatgacatcgaacattgggtcaccattgatccttgacacacttagaaacaccacagacagcaaggaggccgtgtatgagataatgaagaagcaggtgattgagatggcccggcaaacattccggccagaattcttgaacaggatagatgagtacattgtgttccaaccactggatacaaccgagatcaaccatatcgtggagatccagctgaatcgggttcagaaccggctgagacaacagaagattcatctccagtacactgcggaagccgttgagcttctggggtctcttggctttgaccctaactatggtgcgaggcctgtcaagagagtgattcagcagatggtggagaacgagattgcccttggtgtcctgaagggcgatttcaaagaagacgatactgtcctcgtggatgtaagttcggcggcgatcgcaaaaggactcgctccgcagaagaagcttgtccttcagagggtagaaaacggaaacgacgagttagttgctaatgactaggtcagatgggatcaccttttagcgagaatgttcaagtgtgatgaaacgcagctgttagctctgcgttttcgcgtatgagaaacttggccttttatttaggttctaccatgaagtcgtgtccagtctccggtggcaaaactcaatgttcaaatctctctgaatataatcttgagagctctacctcaagagctgtgaatatctgttcaggcaa

SEQ ID NO: 131367 - DNA, 3350 bp, Zea Mays
ctgccggcacaccttctttccccttctccaagcgtcgccactcctctccgctgtgccctcccaacaaccgtcgccgccgccacaaataaccgagccagcatcttcgcggcgtaaccgcttggccagtccagtgtccgcagcaaagcgctaaacccagacccaaaaccctccgccacgatggcgcgctccgccgcgtccaggctagcgcgcgcagcccgcgcggttgtggtcgccaccaaacgccgccagggccccggcgttagccgcgaggtactcccgcggtccctcgcgccgctcgcgggtgatgcctccgccttcggcgccaccacggggaggccggcgtggtttgccgcgcctttggggcggtttcccgtcggggccggcggagctgggctccaggtgccgccgcgccggctgttccactctactacgcccgctcagtacagcgccgccggcacctcgtcctcgtctcagataacaccaggagaattcactgagatggcctgggaggggattgttggtgcggttgatgcagcaagattatcaaaacaacagatagtagagtcggagcacttgatgaaagctcttctggagcagaaggatgggctagcacgcaggatattttcaaaagcgggtgtagataacacatcagtcctgcaagctactgacgactttatttctagacagccaaaggttgtcggtgatacaactgggccaattataggatcaagttttgtgttgatattggataatgcaaagaagcataaaaaagaacatggtgatgaatttgtgtcagttgagcacatcctgcaagcattcacttcagataaaaggtttggacaacagctcttcaaagatctgaaaattgtggagaatgatcttaaagaagctatttcagcagtacggggaagccagcgagtcacagatcagaatccagaaggaaaataccaggctctagagaagtatggtattgacttgacagaatcagctcgacgtggaaaacttgatcctgttataggccgtgatgatgaagtgcgcagatgcattcagatcctatgtagaagaactaaaaacaatcctgtaatcattggcgagccaggagttggcaaaactgctattgctgaaggactggctcagcgtattgtacgaggagatgttcctgaacctctaatgaatagaaggcttatttcgttggatatgggagcattacttgctggagctaaattccgtggtgattttgaggagagattaaaggctgttctaaaggaggtcactgcttctaatggacagatcatcttgttcattgatgagatccatactgttgttggtgcaggagctgctggtggagcgatggatgctggtaacctgttgaagccaatgctaggccgtggagaactccgctgcattggagcaacaacattggatgagtacaggaagtacattgagaaggatgctgctcttgagcgtaggttccagcaggtttattgtggtgagccagcagttgaggataccatctccatattgcgcggtttgcgagaacgatatgaactgcatcatggtgttaagatatcagatggggctcttgttgctgctgcagttctatccgatcgatacatcactggacgttttttgcctgacaaagccattgatctagttgatgaagcagctgccaagctcaaaatggagataacatcaaagcctattgaattggatgaggtagacagagaaatcataaggcttgaaatggaaaagctctcattgaagaatgatacagataaggcctccaaagaacggctgagcaagcttgaagctgaactagaatctctcaagcagaagcagaaaagtctttcagaacattgggaatatgagaagtctttgatgactcgtataagatcaattaaagaagagactgacagagtgaacctggagattgaagctgctgagagagaatatgatttgaatcgtgctgctgaactgaagtatggaacacttttatcacttcagaaacagctggaagaggctgagaataaacttgttgaattccagcaatcagggaagtcaatgcttcgagaagaggtgactgacgtggacattgctgagattgtgagcaagtggactggtattccagtgtcgaaccttcaacagtctgaaagggaaaagctgctgctgctggaagatgtacttcacaagagggttattggccaagacattgcagttaaatcagtggccaatgccatccgccgttctagggcaggcctatcagatcctaaccgtccgatagcaagcttcatgtttatgggacctacaggtgtgggaaagactgagctgggtaagacactggctgaattccttttcaacactgagaatgccctaatacgaattgatatgagtgagtacatggagaagcacgccgtctcccgtttggttggtgccccacctggatatgttggttatgaggaagggggccaattgactgaatcagttcgtcggcgaccttactcagttgttctgtttgatgaaattgagaaagcacaccaggaagtctttaacatattgttgcaactgttggatgatggaagaatcactgattcacaaggcaggactgtcagcttcactaactgtgtcataatcatgacatcgaacattgggtcaccattgatccttgacacacttagaaacaccacagacagcaaggaggccgtgtatgagataatgaagaagcaggtgattgagatggcccggcaaacattccggccagaattcttgaacaggatagatgagtacattgtgttccaaccactggatacaaccgagatcaaccatatcgtggagatccagctgaatcgggttcagaaccggctgagacaacagaagattcatctccagtacactgcggaagccgttgagcttctggggtctcttggctttgaccctaactatggtgcgaggcctgtcaagagagtgattcagcagatggtggagaacgagattgcccttggtgtcctgaagggcgatttcaaagaagacgatactgtcctcgtggatgtaagttcggcggcgatcgcaaaaggactcgctccgcagaagaagcttgtccttcagagggtagaaaacggaaacgacgagttagttgctaatgactaggtcagatgggatcaccttttagcgagaatgttcaagtgtgatgaaacgcagctgttagctctgcgttttcgcgtatgagaaacttggccttttatttaggttctaccatgaagtcgtgtccagtctccggtggcaaaactcaatgttcaaatctctctgaatataatcttgagagctctacctcaagagctgtgaatatctgttca

SEQ ID NO: 131368 - DNA, 1945 bp, Zea Mays
atgaccgtcgacgagctgaagctgcaggcgagggccagcggcggccacggcgccaaggaccagttccccgtcggcatgcgcgtgctcgccgtcgacgacgacccgacctgcctcaagatcctcgagaacctcttgctccgctgccagtaccatggtatgccacgctcctctcgctcccctctctctctctcttcccctggcaatgacaacgatgattcgggtaaaaagttgcaggtggtgagcgctgaaggtgacaatggcggtgttaatcgcaacaagagaatttcacgcaagggtagggatgataatggtgatgacggtgatgattctgatgacaacagtaatgagaatggagactcgtcgagccagaagaagccaagggttgtgtggtctgttgaattgcaccgaaagtttgtggctgctgtcaaccagcttggcattgacaaggctgttccaaagaaaatattggatcttatgaatgttgagaacatcacaagggagaacgttgcaagtcatctgcagaagtatcggctgtatctgaaaagactcagcgcagatgcaagcaggcaggctaacctaactgctgcatttggaggaagaaaccctgcttatgtgaacatgggactagacgccttcaggcagtacaatgcatatgggagataccggccagttccaaccactaaccattcacagccaaacaacctccttgcaaggatgaactctcctgcatttggtatgcatggtctgctgccttcgcagccacttcagattggacacaaccagaacaatctgagcacttccctagggaatgtcggggggatgaacaacggcaacctgatcaggggtgcgcatatgccactgcaggatactagcaaatgctttcctactggcccttctggtaattcgttcgcgaacatatcaaacagcacacaactggttacgacaaacaacttgccattacagtctcttgagccaagcaaccaacaacaccttggtcggctgcattcctctgcagaccctttcaactcatttgttggtgagcccccccagtttgcagatcttggaaggtgcaacaccacctggccaaccgcggtctcatcatccaatgttcaggagattggccagaaggacaggatcgtgaataggcccaagcttgagcctctctcaagctttacagaagcatccagtcagatccctttgctgggaagtgaaatgcagagccaccaagtagcatcactagccagcaacggtcttccgatgccgttcactcaggaagcggtgcccttcgcttatggaagcagcacgaactcgagagagatgctgaataacaaccttgcgcttagtaattcaggcgtcaactctacattgccgaaccttcgcatagacggttctgttgttccagggcagacactgggtggtagcaattcaggtggttgtgttgtcccccctctgcaagatggcaggattgatcaccaagctgtcagcagtcatctaaactacaacaacgaactcatggggacaggtaggctgcaaaggggacttagtggtggtctggatgacattgtcgtggacatgtttaggccggaccgcgcagacgatggcgtctccttcattgatggggactgggaactggtctagcaagtttcagttctctacatcaagtctgccttcgtgtgagattttccgcatttgtggttgtggaggggttcggcgcttgattggtccaaagttgtttatagtagcaagattgcatcacaaatgccctttgcatttggtttttcagtttagcgaccaggttccagtgtcacgtccgaatatcaactatgtggtatttgctaccttaactcgtatggctatgttttcaagtcaggtgttaactgtggctatcgtgatatatacagcatggttatgagccaaggaatgctgtcctgtttcctcttggaaa

SEQ ID NO: 131369 - DNA, 1216 bp, Zea Mays
atgatgaaattcacgatcactctgatgggctccgcgcaagcgagggcctctttcgagcatttgcaactcttcacagtcagtgcaatagtgaataatgggccttccgtcaaaaaggtctggaacgagctggttacctcttcagagcccatagtccggataggcccagcatccagtcacagtccggagtccggttggtactccgcaagttcgttttttttacgccggcggaaatcaacctgcgccgctgccttctccgttctcgccgtcgcctccgcctccgctgccgccgcgcaggtcagggtcatgtcgatcttcgagtacaacgggagcgccgtggtggcgatggtggggaagaactgcttcgcgatcgccagcgaccgccgcctcggcgtgcagctgcagacgatcgccaccgacttccgacgggtgttcaaggtccacgacaagctctacatcgggctctcggggctcgccaccgacgcccagacgctgtatcagcggctggtgttcaggcacaagttgtaccagctgatggaggagagggacatgaagcccgaaacctttgccagccttgtttcagccctcctctatgagaaaaggtttggaccatacttctgccaaccagttattgctggcctaggagacaacgatgagccgtttatatgtaccatggactgcattggtgccaaggaactagcaaaagattttgtggtctccggtactgcttcagagtcactttatggtgcttgtgagtccatgtataagccaaacatggaacccgaagaacttttcgagacaatctcgcaagcattgcaggcatctgttgatcgcgactgcctcagcggctggggaggttatgttcttgttgtcacacacactgaagtgcaggagagagtgctgaagggaaggatggactgatgagtgctgccatgtagttattctaggagagattgtttcttcattcgccctgacatactcgcccctgtcctacggcgtacagaattcagagaacctgtgcaccacgtttacttctcattctgaatgaacattgattcagtagttgccttcgcctttaatttctatgctgcttccgcctcagcattttggaattgcatggcttgtggcacttcagttctggtgatggacggcatacctgtttgaccagttaacagggacgtccgtgccgcacgggtttgtcttggaagaatgacagttt

SEQ ID NO: 131370 - DNA, 1579 bp, Zea Mays
atgatgaaattcacgatcactctgatgggctccgcgcaagcgagggcctctttcgagcatttgcaactcttcacagtcagtgcaatagtgaataatgggccttccgtcaaaaaggtctggaacgagctggttacctcttcagagcccatagtccggataggcccagcatccagtcacagtccggagtccggttggtactccgcaagttcgttttttttacgccggcggaaatcaacctgcgccgctgccttctccgttctcgccgtcgcctccgcctccgctgccgccgcgcaggtcagggtcatgtcgatcttcgagtacaacgggagcgccgtggtggcgatggtggggaagaactgcttcgcgatcgccagcgaccgccgcctcggcgtgcagctgcagacgatcgccaccgacttccgacgggtgttcaaggtccacgacaagctctacatcgggctctcggggctcgccaccgacgcccagacgctgtatcagcggctggtgttcaggcacaagttgtaccagctgatggaggagagggacatgaagcccgaaacctttgccagccttgtttcagccctcctctatgagaaaaggtgacaaacccacaatttttgacagattcatttgtaggcatggtgtatctgtgatttccttggtgtgcatggaggtaaatcacattcacatgccgaatgaaggataccctggaaatgtgaactgtgaagtactaatgtcgttatctccacttcagaaattgagaaccattgggcttttgggaggccagtatttgaatgcttctccgtgctctgctggctgatattaagcttatgctattcacttatttctcggttatcttaaggaagtgtgctgtttcggatatttgtgtggattcagtctgctgtttgtcaccttacatatcctttttcgaacctctgacagaagtattttgtcatatgtaggtttggaccatacttctgccaaccagttattgctggcctaggagacaacgatgagccgtttatatgtaccatggactgcattggtgccaaggaactagcaaaagattttgtggtctccggtactgcttcagagtcactttatggtgcttgtgagtccatgtataagccaaacatggaacccgaagaacttttcgagacaatctcgcaagcattgcaggcatctgttgatcgcgactgcctcagcggctggggaggttatgttcttgttgtcacacacactgaagtgcaggagagagtgctgaagggaaggatggactgatgagtgctgccatgtagttattctaggagagattgtttcttcattcgccctgacatactcgcccctgtcctacggcgtacagaattcagagaacctgtgcaccacgtttacttctcattctgaatgaacattgattcagtagttgccttcgcctttaatttctatgctgcttccgcctcagcattttggaattgcatggcttgtggcacttcagttctggtgatggacggcatacctgtttgaccagttaacagggacgtccgtgccgcacgggtttgtcttggaagaatgacagttt

SEQ ID NO: 131371 - DNA, 2140 bp, Zea Mays
ggactttaccgggctaccattcctgatccctccctccccctctcctcttcttgtcgccgtctccctgcagcgttacgctggcggaaaagaaacggagcgagcgagatcaactggcggctcaagaaaccagagggaggagtgagtgcacgcaagggtcagagaagagccgagagagcgcgcagcagtgcagtggtgctgtatccgctgcattcttcctccccctttggattccctgactcgcatggtatctggtcagaaaggcacaggctttagtgtgcccgttgctgttgtaacgcccctgtctgctcctgcggaggagaggtgcgcgagacgagagacgcgggaaggagagggacggaggcggggaggagtagtggtgaagtcaatgccgccgccatcgccgctcctccgttcctccgccttcgtcgtcttgctgctcctggtgtgtcgcccgttgttggtcgccaatgggagggccacgccgccttctccgggatggccaccggcggctcagcccgcgctgcagcctgcacccaccgccagcggcggcgtggcctccgtgcttccttcggccgtggcgcctcctcccttaggtgtggttgtggcggagaggcaccaccacctcagcagggagctcgtcgctgccattatcctctcatccgtcgccagcgtcgtgatccccattgccgcgctgtatgccttcttgctgtggcgacgatcacggcgagccctggtggattccaaggacacccagagcatagataccgcaaggattgcttttgcgccgatgttgaacagctttggctcgtacaagactaccaagaagagtgccgcggcgatgatggattacacatctttggaggcagcgacagaaaacttcagtgagagcaatgtccttggatttggtgggtttgggtctgtgtacaaagccaattttgatgggaggtttgctgctgcggtgaagagactggatggtggggcacatgattgcaagaaggaattcgagaatgagctagacttgcttgggaagattcgacatccgaacatcgtgtcccttgtgggcttctgcattcatgaggagaaccgtttcgttgtttatgagctgatggagagtgggtcgttggattcgcaacttcatgggccatcacatggttcagctctgagctggcatattcggatgaagattgctctcgacacagcaaggggattagagtacctgcatgagcactgcaacccaccggttatccatagggatcttaagtcatctaacatacttttagattcagacttcagcgctaagatttcagactttggcctggcagtgactagtgggaatcacagcaaagggaatttaaagctttctgggactatgggctatgtggctcctgagtacttattagatgggaagctgactgagaagagcgatgtatacgcgtttggggtagtacttctagaactcctgctgggaaggaaacctgtcgagaagatggcacaatctcagtgccgatcaatcgttacatgggccatgcctcagctaactgatagatccaagctcccgaacataattgatcccatgatcaagaacacaatggatctgaaacacttgtaccaagttgctgcagtggccgtgctctgcgtgcagccagagccgagttacaggccactgatcaccgacgtgcttcactcactggtacctctagtgcccacggagcttggaggaacgctgaggatcggcccggaatcgccctacctacgctactaagaagcagtctcccatttgagtcgaatgaaactatctctcatggagtttggaattgctggttcagtatggctcgtccaagtgtggtccagataagttatgaggtcgaccacgagggttattgctccttgctttgcattgccttccttccatggtgttttgtcttgagtgccaatccgagacatgtcggagtgaattggcacggtttttggatttgtggaggagggctatgtatttcttttggctatataagaaagtaaaaaaaaaaaaagaagcccccgtatggttctgttaacttgtgtatagattgaagattttccacactaactcatctgtatcaccttttgcacctacgaaaccatgtcgattcatttcaactgc

SEQ ID NO: 131372 - DNA, 1372 bp, Zea Mays
ggttgatctccttcccagagatactaatttgaattgtataggcgactgggttgtcgagtcagttgtcaagaagaagcttaagtaggaaacctttcctcacttcacggtactttcgtccggtcagatgattttaccaatttaaattttgtgtatgcggcgtccttagtgtccatttgacaagctcaaagtcattggtcggtatcacaggggttacatcagagattcatcaggaaagaaatgtaagcatttctgtttgtttttgtgatgattgcagttagattgtccacttcatggccatgctcgaatcgtatagtctcaagttctatagatcttcacttcccctgcttgttctacatttcacgatcctgagtgatatttctttttatcatattagggccgagatgtaaatatactgggttccgcaaatgttggaaaaatctgcatttatcagtgcaatgctaagaacaatggcgtacaaggacccggtggcaacgacagctcaaaaatacaagccaatacagtctgttattcctgaaacaacccttggccctattcaaattgaagcatttttaggcggagggaaatagtatgatacacctcgagtccaccttcaccataggcagacagcaattatccatgctgatgatctgccttctcttgcaccacaaagtcatttgaaagggcgatgttttcccgtatgtatattccatttggttgaacacatgttcctttctctaaattttcgcactaatctttttcttcagaacatgatgttatgtttaggctaatgatacagatgttgaattgaacaatgctctctttgtatatgaacaatgctctgtaaatatacgtttgtgataattttctatgatatttaataaatagtagctactgtgaatgttttattttgtttttcttaggttgttagttctcgtgaatgtcctgttatctcgaaatacagagcttctgtccacacctaatcgcctaaaatggaaatgattgaccattgtttaagtcaggggaagctgaagatgatggtctgatccggtaagagatcttaatctgcatttatacttgttggattttgatgtcgcttctgagagtgtctgattgaattctacaccagttcttggaagagaaagcctcaccaagtcatcatctctaggaacgatgttagtgaaagtcaatttaatctagtggtgaacattgagttgcaacaaatcatcgatggagtctgagtcaccgcagctagaaaccactgtctcaaggtgttgaacattgagttgcaacaaatcatcgatggagaccgagtcaccgcagccagaaaccactgtctcaatttgaggagattttccatctatgtttgttagaa

SEQ ID NO: 131373 - DNA, 783 bp, Zea Mays
gtcaaccctatgcgcccttatgaaattgctgtgaaaataatgttgttctaatatttaacagctatatattttagtaaaaaaagatcataataggcactcacaaaataaataaataaatatgcttacaagttccccctatttccttttattagtcaggctttcttgaaaaggtcgcaagctcacacttgtttggctctatagcacttcttgcgaaaagtgggaatctttctctaactgaattaatgttagaatggagccgaacaagtttatgtttttatgcgacttcaagagttgacaaaggtttaagttctgagctccagaatcagaactggagagttctttctgtagctaatgaatgtagcatagaggttcctggtgttttaaatgttcagaggcttcagcagttgcttctcaccttggctactctaataaaaagggaactatgtgactcatctgttctggtgattggatatataatgaaaaaaatcctgtgaggaaaacttcgcaaggagatgtggttctgtcacttctgtgaccgttgccgtgtacggagacgaggacaagccagcgcttataatgtttacagagatgtggttctgtgactgttgccgtgtactcaggctttatttcaacaggatttaaatatgagatgtagagtgattgatgtacatcacttcactaatcatgaaatctgtagaaggcgaaactactagccatatatgcataatccgtgtggtaaacattatcaatatcacacaaattatttctaatggattttgcatt

SEQ ID NO: 131374 - DNA, 801 bp, Zea Mays
catacttcggtccgtgctcgcctgaggcgaggtggacttccccctttgctaggatcaattggatcatccattgagatacaaatgctctatggctgcagaatgcttctaattgatctgcaccgtggggaagagcacgatggttgcggcctacaaaacaatgctgcgaaactctggttgaggaagagcacggaaatgggcttcgagcaagacgcgtgggaggaagacgagcgcattggcgcagagcaggagcaggtcctaaacctagtcgcccagaaccggctaattgagcgactaatcggccctaatcgtcaactagtcggacgaccagggcgaccagatttctacttaggtttgagtcagacagctttctccggctcgactgttgaccgcaatagcggcaattccgaggagaaaagagtagaggatgatgatgagtacaagctgtttgatgaggatgagaccccaccaccgaaagtaaatttcagaaagaaagaattatcggaggttgctcttgattctggtacgaaggggaaagaccttaaggaaggttgggacaagatactttgcattcaacgttcaaatgtctcagcaaagctatgcaagtgggctccccttaaattaggaagatggcttgctgtgggagctattatatctaatgaaagaggaatcgggcctatggcaccttccctcctgccccttcctgaagatgccatcaccaaggcggaaagaaagcataagagggaagcagaggcagaagccctgatggcgcgcaagaagcaccaccaagcgaggaaggagtag

SEQ ID NO: 131375 - DNA, 270 bp, Zea Mays
cctctttccaacttcaagtattccaactaaatttaaattcatgttttgaacttcagatttccaaacttcaaacacagtcctaaagtgcataattattctactgtttgcattatttatttttatttctattatttaattatggagagggtaattgactttattaagggcccgtttggtaaagctccagctcctgcttctttagctctagatcctgatcctcgtgaggagctgatcctcctgattctcctagaaaatcagaatcatttttaa

SEQ ID NO: 131376 - DNA, 1565 bp, Zea Mays
gataaaattacaaatttctcgacccgtggagccttgcaaccaaaaccaacctacgccatcatcatccatccatccgcttgtccctcgcaccaccaccaaccaaaaacccccaactgccgaggtcgccggcgactccgtccgctccgcgccacgggtatgtcgttccactaccccgaccatgggctatccatggacgccgcggcagcggcggccgccgccgccgccgcgtcgtcgccgaaccctagcggcttctcccccggcgtcggcggggagagggagaaggcggccattgcggcgcacccgctgtacgagcgccttttggaggcgcacgtcgcctgcctccgcgtcgccacccccgtcgaccagctccctcgcatcgacgcgcagatcgccgcgcgccccccgccactagccgccgccgccggggccgcggcagcgggagggccgtccggcggcgaggagctcgacctcttcatgacgcactatgtattgctcctttgctcattcaaggaacaactccagcagcatgtacgtgttcatgcaatggaagcagtgatgggttgctgggagcttgaacaatctttacaaagcctaacaggggcatctcctggtgaaggcactggagcgaccatgtctgatgatgaagacaaccaggtggatagcgaagccaacatgtttgatggaaatgatggatcagatggtatgggctttggccccttaatgctgacagagggtgaacgatccttagttgagcgtgtacggcaggagctaaagaacgagcttaagcagggttacaaagaaaagcttgttgatatcagggaagagattatgcgcaagcgcagagctgggaaacttcctggagatactgcatctgtgctgaaagcttggtggcaagctcattccaagtggccatacccaactgaagacgacaaggcacgactggtgcaggaaacgggattgcagctaaagcagattaacaactggttcatcaaccaacgcaaacggaactggcacagcaacccaacatcctcgggtgaaaagactaagaagaaaaggtgatattgatccagagcaatcttgacgatgctaaacgtccactgtgtactttatggcgaagtacattaccctccctccgtagccaggagcggagatgtgcatcttgggtggcccagtggtcacttaatgccccaagtttgaccacgttgtgggactggtgctagtagtgacctctgcagtatagtaatattcactaatgttgtgggaatcatgtggtgtataaccggcgaacgggagggagtaatttatgttttattgtaattgtctatctttaccttgtaatgatattttagggagaatcccaagatctcagaatggccgttcactgtattgtcggtggtaaaagtggtgggcaatcatcgtgttcagattacctccagaagggtatgcaatggctcgaatgttccatgtcgtgtttagctggttgtcgtttgtcttacttcctgctgagttggatacttgattccttcgaagatgtaaagcacccatcgatgcagattttgtcgttc

SEQ ID NO: 131377 - DNA, 1119 bp, Zea Mays
gcttgtccctcgcaccaccaccaaccaaaaacccccaactgccgaggtcgccggcgactccgtccgctccgcgccacgggtatgtcgttccactaccccgaccatgggctatccatggacgccgcggcagcggcggccgccgccgccgccgcgtcgtcgccgaaccctagcggcttctcccccggcgtcggcggggagagggagaaggcggccattgcggcgcacccgctgtacgagcgccttttggaggcgcacgtcgcctgcctccgcgtcgccacccccgtcgaccagctccctcgcatcgacgcgcagatcgccgcgcgccccccgccactagccgccgccgccggggccgcggcagcgggagggccgtccggcggcgaggagctcgacctcttcatgacgcactatgtattgctcctttgctcattcaaggaacaactccagcagcatgtacgtgttcatgcaatggaagcagtgatgggttgctgggagcttgaacaatctttacaaagcctaacaggggcatctcctggtgaaggcactggagcgaccatgtctgatgatgaagacaaccaggtggatagcgaagccaacatgtttgatggaaatgatggatcagatggtatgggctttggccccttaatgctgacagagggtgaacgatccttagttgagcgtgtacggcaggagctaaagaacgagcttaagcagggttacaaagaaaagcttgttgatatcagggaagagattatgcgcaagcgcagagctgggaaacttcctggagatactgcatctgtgctgaaagcttggtggcaagctcattccaagtggccatacccaactgaagacgacaaggcacgactggtgcaggaaacgggattgcagctaaagcagattaacaactggttcatcaaccaacgcaaacggaactggcacagcaacccaacatcctcgggtgaaaagactaagaagaaaaggtatcacaatgaaagctgctttgctgttgcctaaaccctgacaggcaggcttgtggcttgcccttttttttctgtacttgcactgttttaaacatgtaaaattggaaatgtcgcaggtgatattgatccagagcaatct

SEQ ID NO: 131378 - DNA, 879 bp, Zea Mays
atggcggggtcaatcggcgagatccgagtacggcatgatatgcatcagggacaagcgcgcgtggcagcagccatggttgacgagcctaacgacacagggccaagcgacgaatgcgttcggcgtgcacacgtgagccgaaccgaaggcggggaattgatgaagcgaagttcgtcgacaagcaccatggaggaatcagcgacgttgttacccacacgacacgaagacaacgacaacaacccacaacagcaggaacatgaaggcttggccgaggcggggtccgagcgggttgacggtgagctaggacgcgacagatcgaggctgaggcacagcatctccaaatcaaattaggaggagaccgcgcaggtgctcacgacggccggcgtgttggagtccgaggcgagcaccgacatgaaggagaggacgcgccatgggaaaatggaacgctggccagcagagcaccgggagagagaggagcagggagggcgcatggagtgtctcggctgccagcaggggaaaacgaagcaccaccacagcgggctgggcgctggacagagggagttctgagctgggcgagcacacggccggcgagctggagcgccgcagggactgactagcggccatggcgagcagggacgcgcgcgaccatgggatgcgctcggccagggggatgagagctcggctgggtgcgatggagcttgagtttgaggggtgctgggagcaggaactaggcctatggaaggagcaggggtgagcgctgggcatcgagctggagctgagcacggccatcggtgggctccatgtctgagggctaaggggcgctgggcaagcagaggagcacggctggagaggagagcgccggcacgcgtgggaggaagaagc

SEQ ID NO: 131379 - DNA, 611 bp, Zea Mays
ctccctcctcggctgcttccagcccaactcggcgcccttgctgcaggcgagcagcaggctccctgctccacgcgcccccccagccatggcgtcctgcttcctcccatggcgcaggagatgccccagcgagctcccttcccttccccatggctcgagctcgagtttcctcatggcgctgcctccctgtccatggcgacgcagcagctccctcccatggcgccccctgctcttccttcttagcgcccagaaattgcagcagcatctccctcccccaaactgctcttgccatggccgattcttccctgcgccctactctcccatggaaatccagcaagagctccatttcctccatggccggcgccccgcgcagcgcctctgcgcgactctcgctccccaaacagcgagcccccttcctcgctgctcgtcgtggtgcccgccggctgttcggcaaaacgcgcagcaagccgcgcgctgcagcagccctccagttcattctccacttccccgtcgcgagtcatcgctcccgtgtttgctgcgcagcgaacagcacgtcgggatgccctcctggtgttcgctgtttttgcgcaatcccaacatcgacgccgttcacc

SEQ ID NO: 131380 - DNA, 1832 bp, Zea Mays
ctcgttcccaaatctgcaagcttttaagaaaaaaacattccacccaccaaccaaactgtcaagtggtcaccagctaggtttccctttcccttccgtggcccacggctccgcgtcctcctccgcagtcggccgttcgaaccccgactactgacgccgtgttgactcgcttgcgacaaccaactgactcaagcagaaacgcacgtcctcccgtggccatggccgcggcggcgcgccgcgcgatccccctcgtcctgatcttcctcgtctcggcgcccttgtacgcggccgatgcgtcagcggcagcggcgggggccggggcgaactcgtcgtcgttcctgctcgcggcggagcagacgcagcggaaggacccgctcgatgggctgaggtactacaccggcgggtggaacatcagcgacgagcactactgggcctccgtcggcttcaccgcggcgccggtgttcgcggcggcggctgtctggttcgtcgtgttcggcattgggctgttcatcgccggctgctgcttctgctgctgcccgggcgccggcgacgcgtactcgcgcgcgtgcctgtgcgtctcgctcgtgctcctcctcgtcgccacggccgcggcagctgtcggctgcgccgtgctgtacgacgggcagggcaggttccacggcagcacggtggcgacggtggactacgtggtgcggcagtcgggcgacacggtggccaacctgcagcgcttcacgggcttcctggagaccgccaaggccgccggcgtggggcccgtcgcgctgcccgacgacgtcaaggggaggatcgacgacgtcgtgcgcaaggtgggcgcggcctccgacgagctcgccgcccgcacggccagcaacgccgccaagatccgcgccgccctggagacagtaaggaaggttctgatagttgttgcggcggcgatgctaatcctcgcttttcttggccttgtgttctcgctgtgtgggttggaatcgattgtctacgtgttggtgttcctggggtggatcctggttgcagggacgcttgtactgtgcggtactttcctcctcctgcacaacgtggtggacgacacgtgcgtggcgatgggcgagtgggtgcagcacccgcaggcgcgcacggcgctggacgacatcctgccgtgcgtcgacacggccgcggccaaggaggcgctgaaccggagcaaggaggtgaactaccagctggtggccgtgctcaacgccgcgctcaccaacgtctccaaccgcgacttcccgccgcaggtcccgccgccgctcaactacaaccagtcgggcccgcccgtgccgctgctctgcagcccctacgcggcggacctccgcgaccgcgcgtgcgcgccgggcgaggtgcccctcgacgccaccacgccgcggcaggcgtggcagcgatacgtgtgccgtggcgtctccgcggacgccgggtcgggggccgaggtgtgcacgtccccggggcgcgtcacgccgtccatgtacgcgcagctcaccggcgcggccgacgtcagctacgggctgtaccactacggccccgccctggtggcgctggcggactgcaccttcgtcagggagacgttccggtccatcggcgacgaccactgcccgggcctcagccggtacagcggccaggtgttccggggcttgctcgccgccgccgtcgccgtgctgctggcagtgctgctctgggtcgtgcactcgcgggagcgccggcggcggagcgaggccatggagatcctgtgtctggcctcgtcgccctacaagtatcctctggaggagagggcgtttctcaagagccccgcgaggccgtacatgtaa

SEQ ID NO: 131381 - DNA, 243 bp, Zea Mays
atacacacacattggagatagagcggaagacttttataaagtacactttacattccagaactcaagttttacatggtagaaagagatgtatttattacaagtcctgatagtactcgaagtgcataacttaactacaataattggaagggtgaagcctttccataagagatatataaaaacattctaagcttcaagtccgccacatgaagtaactacccaaaggataagggaataaaacttctc

SEQ ID NO: 131382 - DNA, 774 bp, Zea Mays
ttgtgggttgattctgcccagccggcccacctcaccgtgccagcccagtattcgcgcccacgcacattagcgccactgcccgaccggggcccgctcgccagcgtcctccccttttgcggcgctcccgtggctacggtgcctccctctgtgacaggtggggcccacattgtcatcccgcagctcgctcaacaaacagccgaagtccgttcgtggatctccatggatctcgggcgaatggttggctttggtcctgggtataagactgtgcctgggcgcgcatctaaatccagctaaactccatgcctggtgttgagccgtctaatcctttgaacctcaccgtcgcctgcttgggaaaggacccaccgttggctctgctttcgccacgacgattgtggagccgaattgaagctctggggcaatcggtggcgattaccaaaacttgccacagctttccgctgcaaagaaatccaccatgaagctaccaatttctcgccgtcacttctcctccgctgcgatttttccttgtacgtggtcggccgcaaccaagcgttgattcacggtaagaagtcttcgtctcgaatcgtctcgtcttcctgcttgagttgttctagatggaatctatggttggggctcggtcgacgtgtgattgcctccgacgaggagcttagtcgcggtgcggcggcgccgccgagctgggttcagttgggggggggggggggggggggagacgagtctaggaccattgatggatcggcgggcggtcctgatttaatg

SEQ ID NO: 131383 - DNA, 233 bp, Zea Mays
cccctccccgcaagtctttctcattctcccctccccgcaaagcccattcccattcccggctgccattccgtgttcgtgttctgccattcccattaccccctccccacactgtttccgtgttcgtgttctgccattcccattaccccctccccacactgtctttctcattcccccctccccacaaatcccattctcattcccacgtgcatcccacgcctagctaaaattaaatt

SEQ ID NO: 131384 - DNA, 2881 bp, Zea Mays
aactaccagcgcagtcactcgcctctgcacacgtcgctgatgctcgtcttccttccttcccatcctttataaggcccggccgcggctctgctcgcctctcctcccttccctcccgtaccgtatcagtctcccggattctctccggttcgtgggagggccaaagcttcgagttaggaaaaccctaccgctgtgggagtagcctccggcgatggctgcggcggcgatcctgccggagctggcgacgcaggtgctcatcccggtcgcggcggccgtgggcatcgcgttcgcggtggtgcagtgggtgctggtctccaaggtgcgggtcacccccgagcgccgcgcggacggcggggccgtgaagagcgggcccagcgactacctcatcgaggaggaggagggactcaacgaccacaacgtcgtcgtcaagtgcgccgagatccagaccgccatctctgaaggagctacatctttccttttcactgagtacaagtatgttggattattcatgggcatctttgcaatccttatattcctcttccttgggtctgtcgagggattcagcacgaagagtcaaccttgccactatatcaaggaccagacttgcaagcctgcccttgctaatgccatcttcagtactatagcttttgtgcttggtgcagtcacctcactagtttccggctttcttggaatgaagatcgcaacttatgcgaatgcccggacaactttagaggccagaaagggtgtcggaaaggcatttattactgccttccgagctggtgcagtaatgggcttcctgcttgctgccagcggtcttttggttctttacattgctatcaatttgtttggaatttattacggtgatgactgggaaggtctttttgaagctattactggttatggccttggtggttcttctatggctcttttcggccgcgttggtggtggtatttataccaaggctgctgatgttggtgctgaccttgtggggaaggtagaaagaaacattcctgaggacgatccaagaaacccagctatctctttggctcatatgctgaatcatcatgtgctgctcttgttgtggcctctatctcgtcttttggaatcaaccatgaatttactccgatggtgtaccctcttctcgtcagttctgttggtattatagcatgtctcataacaacgctgtttgcaactgatttcttcgagataaaggctgtggatgaaatagagcctgctctcaagaaacagctcataatttccacaattgtgatgaccattggcattgcactaatcagttggcttggtcttccatacactttcactattttcaactttggagtccagaagacagtgcaaagctggcaattgttcttgtgtgtggcggttggtctctgggctggcctagtcattggttttgttactgagtactacacaagcaatgcctacagccctgtacaagatgttgctgattcctgcagaactggagcagctactaatgtcatttttgggcttgctttgggttacaaatcagtcattatcccaatttttgctattgcgtttagtatcttcctcagcttcagccttgctgccatgtatggtgttgctgtggctgctcttggaatgctgagcaccattgccacaggtcttgctattgatgcatatggccctatcagtgataatgctggaggaatagctgaaatggctgggatgagccataggattcgtgagagaactgatgctctagatgctgcaggaaataccacggctgcaattgggaagggttttgccattggctctgcagccttggtttcccttgcactatttggtgcgtttgtaagccgggctgctatctccactgttgatgttctgactcctaaagtattcatcgggcttattgtcggtgctatgctcccgtactggttctcggcaatgaccatgaagagtgtgggcagtgctgcgctcaagatggtggaggaagttcgtcggcagttcaacaacatccctgggctcatggaaggcaccacaaagcctgactacgcaacttgtgtcaagatctcaacggatgcatccatcaaggagatgatccccccaggtgctcttgttatgctcacaccactgatcgttgggattctatttggggttgagaccctctctggagtccttgctggtgcccttgtctctggtgttcagattgccatttctgcatccaacactggtggtgcctgggacaacgccaagaagtacattgaggctggagtttcagagcatgccaggacccttggcccaaaaggttctgaccctcacaaggcggctgtcattggtgacaccattggagatcctctcaaggacacgtctggcccttccctcaacatcctcatcaagcttatggcggttgaatcccttgtcttcgcccccttcttcgccgcccatggtggcattctcttcaaatggctctaagccagcgagagacgcaggataaaggccgtagttttgcaaggcgagtagagcagtatgtcagtaatacagcatctatggcatgtgcttttgctcgtccagttcatgagccccgttgtgtatttggtttccgttttcttggttggagtttttagttccaaggtccgatcatgttttgatcccataaattctcttccagccttcgagcaactgagtccatcttcctaagtcatcagccccagcgagacattgaagcatggggaaacttaaacagtatggtgatgattaatctcagcattttttttcttgcagcaatcaatatggactttgcttaaaatttcgttgtcttttcaaaacgatatgcaagcaaaatggaagtgatgttctttgaaactttgtttcaatgctatagcaaaggtttgcattttac

SEQ ID NO: 131385 - DNA, 3105 bp, Zea Mays
ggttaggtaagaaatttgaaaacaaaaatccatgggagatgtttttacgtagaagaatagtgagaatttgagaaactttatttcctaagaaacaaagaaagttttggtgaaataattgaaacgaaaaattcgagaaactagaagcccgataatgcccttctcctctaccaactaccagcgcagtcactcgcctctgcacacgtcgctgatgctcgtcttccttccttcccatcctttataaggcccggccgcggctctgctcgcctctcctcccttccctcccgtaccgtatcagtctcccggattctctccggttcgtgggagggccaaagcttcgagttaggaaaaccctaccgctgtgggagtagcctccggcgatggctgcggcggcgatcctgccggagctggcgacgcaggtgctcatcccggtcgcggcggccgtgggcatcgcgttcgcggtggtgcagtgggtgctggtctccaaggtgcgggtcacccccgagcgccgcgcggacggcggggccgtgaagagcgggcccagcgactacctcatcgaggaggaggagggactcaacgaccacaacgtcgtcgtcaagtgcgccgagatccagaccgccatctctgaaggagctacatctttccttttcactgagtacaagtatgttggattattcatgggcatctttgcaatccttatattcctcttccttgggtctgtcgagggattcagcacgaagagtcaaccttgccactatatcaaggaccagacttgcaagcctgcccttgctaatgccatcttcagtactatagcttttgtgcttggtgcagtcacctcactagtttccggctttcttggaatgaagatcgcaacttatgcgaatgcccggacaactttagaggccagaaagggtgtcggaaaggcatttattactgccttccgagctggtgcagtaatgggcttcctgcttgctgccagcggtcttttggttctttacattgctatcaatttgtttggaatttattacggtgatgactgggaaggtctttttgaagctattactggttatggccttggtggttcttctatggctcttttcggccgcgttggtggtggtatttataccaaggctgctgatgttggtgctgaccttgtggggaaggtagaaagaaacattcctgaggacgatccaagaaacccagctgttattgctgacaatgttggtgataatgttggagatattgctggaatgggatcagatctctttggctcatatgctgaatcatcatgtgctgctcttgttgtggcctctatctcgtcttttggaatcaaccatgaatttactccgatggtgtaccctcttctcgtcagttctgttggtattatagcatgtctcataacaacgctgtttgcaactgatttcttcgagataaaggctgtggatgaaatagagcctgctctcaagaaacagctcataatttccacaattgtgatgaccattggcattgcactaatcagttggcttggtcttccatacactttcactattttcaactttggagtccagaagacagtgcaaagctggcaattgttcttgtgtgtggcggttggtctctgggctggcctagtcattggttttgttactgagtactacacaagcaatgcctacagccctgtacaagatgttgctgattcctgcagaactggagcagctactaatgtcatttttgggcttgctttgggttacaaatcagtcattatcccaatttttgctattgcgtttagtatcttcctcagcttcagccttgctgccatgtatggtgttgctgtggctgctcttggaatgctgagcaccattgccacaggtcttgctattgatgcatatggccctatcagtgataatgctggaggaatagctgaaatggctgggatgagccataggattcgtgagagaactgatgctctagatgctgcaggaaataccacggctgcaattgggaagggttttgccattggctctgcagccttggtttcccttgcactatttggtgcgtttgtaagccgggctgctatctccactgttgatgttctgactcctaaagtattcatcgggcttattgtcggtgctatgctcccgtactggttctcggcaatgaccatgaagagtgtgggcagtgctgcgctcaagatggtggaggaagttcgtcggcagttcaacaacatccctgggctcatggaaggcaccacaaagcctgactacgcaacttgtgtcaagatctcaacggatgcatccatcaaggagatgatccccccaggtgctcttgttatgctcacaccactgatcgttgggattctatttggggttgagaccctctctggagtccttgctggtgcccttgtctctggtgttcagattgccatttctgcatccaacactggtggtgcctgggacaacgccaagaagtacattgaggctggagtttcagagcatgccaggacccttggcccaaaaggttctgaccctcacaaggcggctgtcattggtgacaccattggagatcctctcaaggacacgtctggcccttccctcaacatcctcatcaagcttatggcggttgaatcccttgtcttcgcccccttcttcgccgcccatggtggcattctcttcaaatggctctaagccagcgagagacgcaggataaaggccgtagttttgcaaggcgagtagagcagtatgtcagtaatacagcatctatggcatgtgcttttgctcgtccagttcatgagccccgttgtgtatttggtttccgttttcttggttggagtttttagttccaaggtccgatcatgttttgatcccataaattctcttccagccttcgagcaactgagtccatcttcctaagtcatcagccccagcgagacattgaagcatggggaaacttaaacagtatggtgatgattaatctcagcattttttttcttgcagcaatcaatatggactttgcttaaaatttcgttgtcttttcaaaacgatatgcaagcaaaatggaagtgatgttctttgaaactttgtttcaatgctatagcaaaggtttgcattttac

SEQ ID NO: 131386 - DNA, 219 bp, Zea Mays
atgtttcctgctctagccagcaagatgctgccccaaggccggcctctcccctaccatggtcgtgcactatctcgcccctcgcctgaggcgtccttggagcgcctctctatccttcaaacttctctcatcgctggtgtcaacccccttgctaggcctagtgcaggcccttgccccgccgcccaacccttcttcgtagtcgccacagctggatccgtgtag

SEQ ID NO: 131387 - DNA, 1258 bp, Zea Mays
tacatgattgggattaaccactctaaatgcaagacaatacgccgaagagtgctctggatcttcaaaaataatttgtctctctgttcttccctttctttctaccactgaagtggcccacttcacaagatatttccttaggccttctcctccccaacgatactcaatatgtgactggtgattttgatctaatgcaaatgtaatcttggagttgtttgacgtttctccggaatgtgaaggatagtaaatgttactcccactattgcagatgaaagcatcaaaatcagtgggaagcatgcctccagatagtagcagtgaatgtatttctgatatcgttaaggaagttgacagcacaaaaccagttgaacccgacatgttttctttatgtatgacctcaatagcatttctgattatcctgactagaccttccttgttaacagagtctacagaaataacaatgatattcttccttcctgaaataggtgtattactccgctcctctctgttaccaatagcaggagaccttgggccaagagttagtatccttgacaggtaattcttgcaatgttcaggccacgagaattggtgaatatttgtcagtccattctctctgcaccttgaccaaagatgtttatcagaaagaagtttatatagtgcatccgcaatggcattctgatcgtgcggatcaacaaggagaccattgaaacacacctgattaatttcaacaggggctccattttttgtcgcaattataggcaaaccattcatagcagcctgcacatgggcacaacaattggttccaattaggacacagataaagcgacatacctttgttcttgcagctaaacgataaatgtcaggaacttctgagtgtttatgatgcttggggtatgccacttgaccatacaggtcatattcgtcaatcaatgtaagcactgatgtcaagacagcagcactcatattgtgcatcttagatatagcttcacggtttcccattatcagtgtctacagcacaaattcaaaagtaagcacagaagtcaagatcattcaatcctaagtgttgttatcgtactgtaacaaacgaaacaaataaagaacattagggcaactaatataaatcttacaagattggcaagctcccttaatggcctgcattcaccaaatgcctttacaagtgtagtaatattcttctcaggataagggcgggcaacagctagaatcataggcttcctaggatttgtaaagaagcgcattatctgcc

SEQ ID NO: 131388 - DNA, 780 bp, Zea Mays
atggccaagagcatgcgtggagggatgaggcgcggcgcgagaaagaagacagctgggtcggagagcaccagccgggaagtgtcgaggataccgaggtgcacgataggatgtggaggagaacgtaccttcgccgtggctgtggggactgtggacctgcggtcgccgagaagatgccggagagtatctgctgtccgtcatatatttttttttcttttttgtttcctccagcaggacggatctatcgaaacactcgacgcttttagacctgtgtccttggaaacgcagcatgccagcatagaacgaacggagaaaaaatggtggttaggtactgttgatgccggatccaacaacgcagatttaaaaagcgacgtggaccacctcagcgtcgacctttgcgtcagcgtttattatgctttccatgtcgatgggcggcgcagaagaagagcgaggagggcacgacggagaggtcgactatgcgacagaacaacacgagatccctctgtctcgtcggcgtccgggatggccaagagcatgcgtggagggatgagacgcggcgcgagaaagaagacagctgggtcggagagcaccagccgggaagtgtcgaggatactgaggtgcacgataggatgtggaggagaacgtaccttcgccgtggctgtggggactgtggacctgcggtcgccgagaagatgccggagagtatctgctgtccgtcatatatttttttcttttttgtttcctccagcaggacggatctatcgaaacactcgacgcttctag

SEQ ID NO: 131389 - DNA, 1878 bp, Zea Mays
ctatacgtgcgggcgcgtgtgtcgcggcccgacagcctgggtgggcacgccgtgtgtgcgggggcggtccagacggacacgtcgtgtgtcggcggtccagttccaacacaagcgtcccactatctgtgcctcttcctggctctgatcctaccgctcctgctcctcaggctactcagggggcgccgcagcgacagcggcgtccggctgccgcccggcccatggcggctgccggtgatcggcagcctacaccacctcgtgggcaagccgctggtgcaccgcgcgttcgccgacctcgcgcgccgtctggacgcgccgctcatgtacctcaggctcggcgaggtccccgtcgtggtggccacgtcccgggacgccgcgcgcgaggtcctgcggacgaacgacgtcacgttcgccacgcggccgtggagccccacgatgaagatcatgatgcaggacgggctgggcatggtgttcgcgccctacggcgaccactggcgccagctccggaagatcagcatcctggagctgctcagcgcccgccgcgtccagtcgtttcgccacgtccgggaggacgaggtggcgcgcctcgtcgccgcagtcgccgccaccgcaccaggccagcccgtcaacgtcagccaccggatcgccgtgctcgtcgccgattcggcggtgcgcgccatgatcggggacaggttcagcaggcgggacgagttcttggtgtcgctcgaggaggggctcaagctcgtctccgggttcagcctaggcgacctattcccgtcatcgccgtttatgaacttcctcagcgggacggcacggcgagcgcatgcgaaccataggaagaactttgagctcatggaatgcgccatcaagcagcacgaggaaaggagagcccaagcggcggtgaacggcgctgctgtccaggaggaggaagcagaggacctagtggacgtgctcttgaggatacaaaaggatggcggcctcgacatgcctctcacaatgggaataatcaaagccgttatacttgacttgttcagcgctggaagtgagacatcagcaactacactgaactgggcaatggcggagcttatgaggtgcccggatgtgatgaagaaagcacaagccgagctacgcgacagcctcaatggtaagccgaaagtgaccgaagatgacttggtagagatgaaatacttgaagctcatcatcaaggaaacgttgaggctgcatccagcggcgccattgcttgtgccaagggaagcaagggactcatgcaagatccttgggtacgacgtgccaaagggcaccacggtgttcgtgaacgcgtgggccattggcagggatcctgagtattgggatgatgctgaagagtttaagcctgagcgatttgagtgtggcacggtcgacttcaagggcatggactttgagtacataccgtttggtgccggtagaaggatatgccctgggatggtgtttgcacaggccaatatagagctcgcgctggctgcgctgctctaccacttcgactggaagctcgaagaggggctggagccaagtgagctggacatgactgaggacataggcctcactgttcgaaagaagaacgacatgcttttgcatcccagcgttagagtgccccataaatattgatgactaaatggaccagcactaagcatgacaaatctagcatggccaagcaccgcattatgttaactaatagtttctgtgtcggcatggaccagtgcatagcgtcgtgtttaggttactacctaaatctctagtgtcggttgaaacacgacacgattaagaagcaggcactattgagtcggattatatgataaagttgtaataatttttagacttgaataatagatttgtaacttaaat

SEQ ID NO: 131390 - DNA, 147 bp, Zea Mays
atggcgagcaggctgggcgtgagcgacgccgggaagctcgaaacgaaagctgagcgtggccgagcaggagaggcggcttgttctggcgtccgatggctggagcagggactcacggttggcaagagctgggagcggctagaagcctga

SEQ ID NO: 131391 - DNA, 129 bp, Zea Mays
ttattttaattttatttcacacctcatatattttttatgtcaacaattaattaaacatttcaagttttactaccaaaatatccgacaaaatcaacgataacaaccttatcggataatcgtttggattac

SEQ ID NO: 131392 - DNA, 95 bp, Zea Mays
gtcaaaccaaataaattctactgccctagttgtgaatgttttccacaaaatcccaaatccccaaaacaacaaccggatgaggaaaaaaaacaaaa

SEQ ID NO: 131393 - DNA, 1175 bp, Zea Mays
ggttgttcagtcgagccgcatacagaataggcccaacaggcccaaatccgcgtgtgttgagccgacaaaattagcaaagcccaacatatacccagctaggcttcggccccctctctgcctctgtgtgtccgcaaacgattaaaaccctcccggtggcggcggctggtacagccagcggaaggtcccggcgctctcatccggtgaaaataaagaggggaaacggacaggagccgcctcaaatggacagcggaagcgattccgacggcgctcccgaggagctcactgctgtgcagggtgttgcgaagcacgaagagaccagtaaagtcgagaaagacagtgttctcagagtaacacgggaaggaaaggaacggaggaaacgttgggcccaacgaagaacatcctctaaaccagataagaaggcgccaaaggaagtagaagatgaagatactaaaaaaagtgaggagcatgaggagacaaatactatgcctggcatgctccccactagtgtaattgaaattctagcagctcgtgagaagcaaaccttcgcatcagattccgaggaagaaaatgtaaagcagaaggtccagaggagaaagaagagaatgaaaactgatgggcctgaaactattctgctgaaagatgtccgttcaacgcaacacgtgaagaatgcccttgatttcttggagcataggaaaaatcgtgtcccaaggtcaaatgcagttttgaagaatgccagtaaggctttgcgtctcctgtcttcgaaaggtaattttctaagttaagcgtgtggtagaatagcacattttctgaatctgtgcttagaccatcctctcgacatcagacatggtcaagagacttaggaccaatgtgttggaatggaatctacctggcatgtgaaatgtaatgcagcatatccttttgtgtgaatgtgatgattagcacacatgttccttgtaagaaatccaaggtttgtaatcattgaatatatttgagtttgagttatctatttatatgtttgagttttggttaactattccatagttagttaagttgacagatccatttttaacttttaaacagtcaagcgaggcgaccccttaaatttattttaaaatagaaaaatatttatatttaagaaaacatttaggataaaaataataataaagaagagaaaa

SEQ ID NO: 131394 - DNA, 110 bp, Zea Mays
caaagccgaacggtgtgaacaacagtatttcagaatgtgttcaatttgatttgaaatcaaatagtttcatccgcagtcgacacccgattccacgtcaacagataatttac

SEQ ID NO: 131395 - DNA, 480 bp, Zea Mays
atgaaaaagaaaaatatctgtgacaaggccaaggcgctcacctttctcggccttcaacagccgcattgtggaggtcgccgtgccgctcgcctttctccagccgccggcttgcaggatcctcgcgcccaggctccagagaagctctccagagaagagggagatctggtgccttgcgtgaagaagaggagggagatccggtgcttgcgcgacgaagaagagtccgccatgcacgagaaaactccggtgtttcgccgagcgcgcggtgccagggagtgcccgtgctcagcgaaatcaccgagcgacgacggatccagtccaagggagtgcgaggcagtgagcggcggcagcttcgagagggagaccgggaggcggcggctttgcgagggagatagggaggaggaggcttcgcaagagcggacagggaagctcttcccgacctgttgtggtggggagcgaaatcaccgagctcccttgcggtga

SEQ ID NO: 131396 - DNA, 100 bp, Zea Mays
ggacatgaattcagtgaggactctgacgacagcgagatcacgagctctaacgacacggggttaagaggcgaacgcgttcggcggccacatgtgagccgaa

SEQ ID NO: 131397 - DNA, 257 bp, Zea Mays
tccataccgcgagaaggtctcgggagcgataccgagggagaagagagacccgccgccgccttatttactcggcatcaccggagcacgaccattgggttgccaggggtgctaactaagactggtggaaccgattggtggggtttcgaggctcggtgaccgaccgtggaatacccaattgctcaccggagtgctctactcgcagcaaagccgctatttgccatgggcagctctctgggcatcaaatccatcacaggtga

SEQ ID NO: 131398 - DNA, 1748 bp, Zea Mays
ttcgcagaaaacccctcaaattctccgttcccttcgatccaccccgcatcccagggagtcctccactacagttcttgcccacctacggcgatggccggccgcctcccgggcgccgccgcgtcctcaccgttaccccgcgccctcctcctcatcgccgcgcttgttctcttctccatctctttcctctcactccgctccctgcgccccgcggcggaccccgcgcttgcgtccgccgccgacaagtaccgtcctcttctccggctccagtcctcctcgtcggtgtaccattctccggaggcgttcacagcggggtacgcggatatggagcggagcttcaaggtgtacatttacccggacggcgaccccaagacattctatcagacgcctcgcaagctcacggggaagtacgccagcgagggctacttcttccagaacatccgagagagccggttccgcaccgacgacccggaccaggcgcatctcttcttcgtgcccatctcgccccacaagatgcgcggcaagggtacttcatacgagaatatgacggtgatagttaaggattacgtagaaggtttgataaacaagtatccttactggaacaggacactaggagcagaccacttctttgtcacctgccatgatgtgggtgtgagagcatttgaaggacttccattcatggtgaagaactctattagagttgtatgttcgccaagctataatgttgactttataccacataaggatattgcgcttcctcaagtactacagccatttgccctacctgaaggaggaaatgatattgagaacaggacaactcttggcttttgggctggccatcgcaattccaaaataagggttatcctagcacgagtttgggagaatgacacagagcttgctatcagcaacaaccggatcagtagagctattggagagctagtttatcagaagcagttttaccgtaccaagttctgtatctgtcctggcggctctcaagttaacagtgcccgtatatctgattcaatacactatggttgtgttcctgttattctgtcagattactatgacctgcctttcaatgacgcccttgactggagaaagtttgcggttatacttagggagagagatgtatatcaactgaagaatatcttgaaatctatatcacaggaggagtttgtttcattgcataaatctctagttcaggtgcagaaacactttgtgtggcattcacctcctgtatcctacgatgcattccacatgattatgtatgaactgtggctgcggcataatgtaataaagtactaagcttctcagcctctgagttttgatttctaacctaaatgactgatccatcggaaagatactacaaagtctgatagcctgctgttactgccttgaaaatgggcttctggttctttgttctttgaatcaccagatggatgattattgaatataatgttagctatgcatggtgcaatggagagcatttccatcgaagagttgaccgttgttcagcatatatggcaaaactgtagtcctggttaattgatggattacttgattcttttaacaatagttagctttcccatattgcaatctttccctctagatattacttatattccgtggatctgcttggttgattgcatgtattttctcgcgtaatttttttctgttcaatggtttcaggcatgtaagtaatgtacaatattattgatgtgaaacatagtccattttcttctgacagaaca

SEQ ID NO: 131399 - DNA, 2436 bp, Zea Mays
tttcttgttgtttttttcttcaatcaatcagcatttgcctcaaacattttttgttgttacaattgcagctgctaatgctgttgctatcaccctacaggcggtccccctctagtcatagctcgaggaggattctctggcgtgtttcctgactcgagccagtttgcctaccagtttgccttgactgccagcttgcctgacgtcgttctgttatgtgatctacaattctcaagcgaccatataggcttctgcaaaacagggttgaccctggataactcgacgactgtctccgagaggttccccaagatggagagaacatacaaactgctcggagaggacgtccatggctggttctctctagattttaccgcggagcagctggttcagaacatcacattgatccaaaacatcttctcgcgcccaagcacatttgatgactccttggggatgtacacgcttgatgatgttgttgaactccacccccctcaaatatggcttaatgtacagtacaattcgttctttttggagcacaaattaagtagcgaagattatatattagaactgccaaaagatagcctctcttacatctcctccccggaggttgaattcctgaaaagcttggctgggaagctcaagaaagccaagacaaagctcatcttccggttcctcaatgaaaacgtcgaggagccttcgaccaagaagacatatggggaactcctgaaagatctgaaatccatcaaggcattcgcggctgggattcttgtgcccaagacatacatctggccgctgaaaaaggatcagtacctggcgccatccaccagtctggtcaaagatgctcatgccctcgggctggaggtgtatgcatccggatttgccaatgatatcgtcttgagctacaactacagctacgatcccagtgaagagtacttgcagttcatggacaatccagacttctctgtggacggtgtgctcacggacttcccgtccaccgcatcaggagctgttgcttgcttggctcattccaagggcaatcctctaccgcctcctggaaaggacaccaggccgctgatcatcacccacaatggcgcgagcggcgtgtttcccggcagcacagatcttgcctaccagcaggcgatcaaagatgccgccgacatcatagattgcacggtccagatgtcgaaagacggaacggccttctgcaagcactccgctgacatctccagctccacgaccgcgtccgtcgctttcgcgtccaaagcctccaccgtccacgagatccagaataagtctggcatcttctcgttcgatctgtcgtggagcgagatcgcaaccttgaagcccagcatcatctcccccttcgctcaggcaggcatgttaagaaatcctgcagcgaagaatgccggcaagctgatgactttgcccgaattcttagacttggccaaggccagcaacatcaccggtatactgatcgaaatagagcatgcttcctacctcgccaagagagggatcggcgtggtggaggcggtgtccagcgcgctgaccaaggcgggctacgacaaggagaccaagcagcaggtgttcatccagtccgatgactcgtctgtgctcgcggcgttcaagaagttcgccaggttcaggagggtgctcaacatcgaggccaagatcagcggcgcctccaaaccgtcggtggatgacatcaagaagtacgcggacacggtgagggtcaaccggaactccgtggcgcagatcaatggctacttcctgacgcacttcaccgacacggtcagcagcctacaggacgccaacatcaccgtgtttgtcggcgtactcaagaacgagttcatgaacctcggcttcgactacttcgctgacccgacggtcgagatcgctacctacacgttggcggtgctggctgatgggctcgtcacggacaaccctgccactgcagcttcctacttcaggagtccatgcagtgacatgaagctgaacctgagctacacgatcctgcctgcacaacctggcgctctggtcaacctggcatccccgggggcgctggctccggcgggagcgccggcaccgttgctccaacccgctgacgttgtggacccgccgctgcctccagttaaagctgtgatcgccgccgacgcgccggcgccaggggcggctgacaacacctcctcggcgttcagctccagcgcggggaacggcctcttgtgggctggcatcgctgccctcttgtccctgacctttctgcactgatctttccttggcgtggcttccattcacgttttccttcttcctctccgtgtttccctcttactcctcaaatgtagctctaactgtaacataatgttccttaaatagatataaattgtcatcaacctgcacataaatacagatcagaaaagaagttaccgtgcaccagttcaagattgggtg

SEQ ID NO: 131400 - DNA, 2513 bp, Zea Mays
ggtggggccggagaacagcttctcacaattttcttcctggagtttcatgtgagggtgctcctcctgaccagatgggagcaagctatcctcacatgtttttgatcctcttgctgcttcgtggagccaatgctgctttgaaatctccagcagggccgaaatggcagactctgagcggcggtccccctctagtcatagctcgaggaggattctctggcgtgtttcctgactcgagccagtttgcctaccagtttgccttgactgccagcttgcctgacgtcgttctgttatgtgatctacaattctcaagcgaccatataggcttctgcaaaacagggttgaccctggataactcgacgactgtctccgagaggttccccaagatggagagaacatacaaactgctcggagaggacgtccatggctggttctctctagattttaccgcggagcagctggttcagaacatcacattgatccaaaacatcttctcgcgcccaagcacatttgatgactccttggggatgtacacgcttgatgatgttgttgaactccacccccctcaaatatggcttaatgtacagtacaattcgttctttttggagcacaaattaagtagcgaagattatatattagaactgccaaaagatagcctctcttacatctcctccccggaggttgaattcctgaaaagcttggctgggaagctcaagaaagccaagacaaagctcatcttccggttcctcaatgaaaacgtcgaggagccttcgaccaagaagacatatggggaactcctgaaagatctgaaatccatcaaggcattcgcggctgggattcttgtgcccaagacatacatctggccgctgaaaaaggatcagtacctggcgccatccaccagtctggtcaaagatgctcatgccctcgggctggaggtgtatgcatccggatttgccaatgatatcgtcttgagctacaactacagctacgatcccagtgaagagtacttgcagttcatggacaatccagacttctctgtggacggtgtgctcacggacttcccgtccaccgcatcaggagctgttgcttgcttggctcattccaagggcaatcctctaccgcctcctggaaaggacaccaggccgctgatcatcacccacaatggcgcgagcggcgtgtttcccggcagcacagatcttgcctaccagcaggcgatcaaagatgccgccgacatcatagattgcacggtccagatgtcgaaagacggaacggccttctgcaagcactccgctgacatctccagctccacgaccgcgtccgtcgctttcgcgtccaaagcctccaccgtccacgagatccagaataagtctggcatcttctcgttcgatctgtcgtggagcgagatcgcaaccttgaagcccagcatcatctcccccttcgctcaggcaggcatgttaagaaatcctgcagcgaagaatgccggcaagctgatgactttgcccgaattcttagacttggccaaggccagcaacatcaccggtatactgatcgaaatagagcatgcttcctacctcgccaagagagggatcggcgtggtggaggcggtgtccagcgcgctgaccaaggcgggctacgacaaggagaccaagcagcaggtgttcatccagtccgatgactcgtctgtgctcgcggcgttcaagaagttcgccaggttcaggagggtgctcaacatcgaggccaagatcagcggcgcctccaaaccgtcggtggatgacatcaagaagtacgcggacacggtgagggtcaaccggaactccgtggcgcagatcaatggctacttcctgacgcacttcaccgacacggtcagcagcctacaggacgccaacatcaccgtgtttgtcggcgtactcaagaacgagttcatgaacctcggcttcgactacttcgctgacccgacggtcgagatcgctacctacacgttggcggtgctggctgatgggctcgtcacggacaaccctgccactgcagcttcctacttcaggagtccatgcagtgacatgaagctgaacctgagctacacgatcctgcctgcacaacctggcgctctggtcaacctggcatccccgggggcgctggctccggcgggagcgccggcaccgttgctccaacccgctgacgttgtggacccgccgctgcctccagttaaagctgtgatcgccgccgacgcgccggcgccaggggcggctgacaacacctcctcggcgttcagctccagcgcggggaacggcctcttgtgggctggcatcgctgccctcttgtccctgacctttctgcactgatctttccttggcgtggcttccattcacgttttccttcttcctctccgtgtttccctcttactcctcaaatgtagctctaactgtaacataatgttccttaaatagatataaattgtcatcaacctgcacataaatacagatcagaaaagaagttaccgtgcaccagttcaagattgggtg

SEQ ID NO: 131401 - DNA, 984 bp, Zea Mays
ccttagaaaagccgcgacgcatccgggtgcggctcacagcgcccccacccactcaccggccaccactctatcatccctgtgcgattcgccgccatcattgtgagcaagctcgagcgcgtttgccgcctgccaccaccgcttccgttgcttagctctgtgctcccgccaagaaggtgaaggggagacgattgcctgagttgagccagccagccagccaatggcggggcgtctactctcggttgctttgctatggggatatgcgcgtcgtccaagcgcgtggagcaggaggaggaggaggacgagaacgtggtgtacgtggtggtggacgggcaaggcggtggcgggggagggggaggggatggccgtggcacggtgggggagcggatggtggccacctccctcttctcgcataagggcaagaaggggcccaactaggacgtcgtcatcctctgccagagattcggcatggaggacgacgtgttctgcggcgtgttcgacgggcacgaccgctgcgggcagctggtcagcaagctggcgagggaccacctccccttcatgatcctgagccagcggaacgtgctgctcctgggctccgacgacgacgacgacggcgacggggacgacacggccttcagcgacgcgtcgcccgcggcgtcgtcgtccacggacggcagccgcagcgggcgaccatcgccgtcgctggcgccggcgccggctcagatgctggaggtgtggcgggaggcctacgccaacgcgttcgagaccacggacagggagctcggggtccagtccagggtggactgggacttcagcggcaccatggtcgtgtgtgccatcaagcaggggaggacctcgtcgtcgccaagctcggtgactccagggccatgctggcgaccgtgtcggagatgggctacctgaaggccgtgcagctcaccaccgaccagaagcccaacgtgcctcgtgagtcctcctaatccatcgttg

SEQ ID NO: 131402 - DNA, 1226 bp, Zea Mays
atgccctcgcggcgactcttgccaggcattcctccgcgaaaaccgcatccgctccaaggtggttttctgaaaatctgggaatctttctgtaggggagttgatcgagaagcgttggtggacatgggtcaaatcaagtactccgagaagtacttcaacgacacctatgagtacagtaccttcccgccatggctacggcgccgctgcggtggtgagatctcgctcgaaggaggaaatcgtgcaggcgcgtgtgatgtctcactgctcgcaaagacgaagaagagggagtcagttctgctaaggccgcaggcgtgtacagtggctcactttggtctgaaggaagagcctttgggcctggctcatgggccaaatgcggtgcaccggattctttcgaggaaaaagtccagcttacggctcacgcagcctgatgggccaaacgcggttcacccgtatgaatgtcctcccgcccgaggtcgccaagctcctccccaagaaccgcctcctatccgagaacgagtggcgcgcgatcggagtgcagcagagccgcgggtcggtgcactacgcgatccaccacctggagacgcacatcatgctgttccgccgccggatcaactaccagcagcagtaggaggcggcttccgcgcagatgctggccaattggaaacttcgggtgtagttggtcgatttgctggtctcgaggtcaagcctggttccactgttaagtgtgagcctgaatatggttttatgctgcacctttcccaggagaaccggttgaagcaagtgcaagaaatgcaatcgaattgtgataaaggcctcaaacacatgagctgtgaagctcctctgctaggacctatggctgagctatggaagctgaagaacccagatatttctgagagcgagtgggcggtgcaagccgccgccgcatcaatctactcgacctgcaacatggccatgagaacagagaacgtgtcttgcttctgacctcacacttgtagttgtagtttagtttcttgcttttgctaattttacctcaaaagttaggcctattttattacctttagtctttgtgaattgtgaccccttgtccattatactagcgacacataagtttggagggatctatcattttttcttttgcacttttacgtctgcaaatatggttctatttgtcacttcctgttgtcctgattggtcatacctttttgtttcataactaatcatttggttga

SEQ ID NO: 131403 - DNA, 1040 bp, Zea Mays
tttgccatccctagctccacagcaccacttgctcctgcctcctgctgcttcttcccgagttcccgtgccgccgcgagcgctcccaaccaagcaacgagacaacaacaacaaccctgcaccgccgcagcacttgcgccgtccggtcctgtcctcccgcggtctcgacgccgccccctaccgtcctaccttatcgcgcaccgctccatggccgccaagtgggcccagaagaccgtcgttatcccggcgcatcggcggggctgccacctcatcacccccaaggtcccatccgcgctctcgctctctctctctcaagtctcacccgcggcttccgtactcgcacctcgtgctcttggtgctgagattccctcatgttccaccgggtggtgctgcagattctgagggagatcgagggcgacctggccgggttcaagtgcggtctcgcgcatttcttccttcagcacacaagcgcatcgctgaccatcaacgagaactatgactctgatgtgcaggctgacactgagacttttcttaacagaattgttccagagggccacaatgctccttggaaacacactatggaaggacctgatgacatgccagcacatattaaatcttctatgtttggttgttccctaacgattcctataactgatggacgtctcaatacgggcacttggcagggcatatggctgtgcgaacatcgagaccatgccagccctcgcaaaattgtgattactctcaacggtgtttaacttgaagatcttatatgctgccaggaaatagggccaatgcattttggacctgaatgtgtttcagttaccatgtactatgttgagttgtaatgtatgctataaattccaataaattcatcgttactatttcgtatgtgattattggcttagccccttaggtgaccgttgaacttatcttttgaacactacgctttgcagtatttcatagaaattggtgaatgtacaaacaggaaaattgtcatatgctttctataataagagggcagttataaaataagtcttaacaaa

SEQ ID NO: 131404 - DNA, 1005 bp, Zea Mays
attttgccatccctagctccacagcaccacttgctcctgcctcctgctgcttcttcccgagttcccgtgccgccgcgagcgctcccaaccaagcaacgagacaacaacaacaaccctgcaccgccgcagcacttgcgccgtccggtcctgtcctcccgcggtctcgacgccgccccctaccgtcctaccttatcgcgcaccgctccatggccgccaagtgggcccagaagaccgtcgttatcccggcgcatcggcggggctgccacctcatcacccccaagattctgagggagatcgagggcgacctggccgggttcaagtgcggtctcgcgcatttcttccttcagcacacaagcgcatcgctgaccatcaacgagaactatgactctgatgtgcaggctgacactgagacttttcttaacagaattgttccagaggtcagtggcctaaatttttctcttctcttttaaatgctacaattaaaatgctgcttcgttatgtcatcgttttcagggccacaatgctccttggaaacacactatggaaggacctgatgacatgccagcacatattaaatcttctatgtttggttgttccctaacgattcctataactgatggacgtctcaatacgggcacttggcagggcatatggctgtgcgaacatcgagaccatgccagccctcgcaaaattgtgattactctcaacggtgtttaacttgaagatcttatatgctgccaggaaatagggccaatgcattttggacctgaatgtgtttcagttaccatgtactatgttgagttgtaatgtatgctataaattccaataaattcatcgttactatttcgtatgtgattattggcttagccccttaggtgaccgttgaacttatcttttgaacactacgctttgcagtatttcatagaaattggtgaatgtacaaacaggaaaattgtcatatgctttctataataagagggcagttataaaataagtcttaacaaa

SEQ ID NO: 131405 - DNA, 929 bp, Zea Mays
attttgccatccctagctccacagcaccacttgctcctgcctcctgctgcttcttcccgagttcccgtgccgccgcgagcgctcccaaccaagcaacgagacaacaacaacaaccctgcaccgccgcagcacttgcgccgtccggtcctgtcctcccgcggtctcgacgccgccccctaccgtcctaccttatcgcgcaccgctccatggccgccaagtgggcccagaagaccgtcgttatcccggcgcatcggcggggctgccacctcatcacccccaagattctgagggagatcgagggcgacctggccgggttcaagtgcggtctcgcgcatttcttccttcagcacacaagcgcatcgctgaccatcaacgagaactatgactctgatgtgcaggctgacactgagacttttcttaacagaattgttccagagggccacaatgctccttggaaacacactatggaaggacctgatgacatgccagcacatattaaatcttctatgtttggttgttccctaacgattcctataactgatggacgtctcaatacgggcacttggcagggcatatggctgtgcgaacatcgagaccatgccagccctcgcaaaattgtgattactctcaacggtgtttaacttgaagatcttatatgctgccaggaaatagggccaatgcattttggacctgaatgtgtttcagttaccatgtactatgttgagttgtaatgtatgctataaattccaataaattcatcgttactatttcgtatgtgattattggcttagccccttaggtgaccgttgaacttatcttttgaacactacgctttgcagtatttcatagaaattggtgaatgtacaaacaggaaaattgtcatatgctttctataataagagggcagttataaaataagtcttaacaaa

SEQ ID NO: 131406 - DNA, 1560 bp, Zea Mays
caacgtacaactgtggcgcgattcatatatgcataattctacatggtgctagtcttcggcaagaaaaaaaaactaacacttgtctctttttcatatgggatgtgttgtggtggtgacaacaggaacacaggccctgaagatgtggtggtgaaggtgctctactgcgggatctgccacacggacatccaccaggccaagaaccacctcggggcttcaaagtatcctatggtccctgggcacgaggtggtcggcgaggtggtggaggtcgggcccgaggtggccaagtacggcgtcggcgacgtggtaggcgtcggggtgatcgttgggtgctgccgcgagtgcagcccctgcaaggccaacgttgagcagtactgcaacaagaagatctggtcatacaacgacgtctacactgatggacggcccacgcagggtggattcgcctccaccatggtcgtcgaccagaagtttgtggtgaagatcccggcgggtctggctccggagcaagcggcgccgctgctgtgcgctggcgtgacggtgtacagcccgctgaagcactttgggctgacgaccccgggcctccgtggcggcatcctgggcctcggcggcgtgggccacatgggcgtgaaggtagccaaggccatgggccaccacgtgacggtgatcagctcgtcgtccaagaagcgcgcggaggcaatggaccacctcggcgcggacgcgtacctagtgagctcggacgccgcggccatggcggcggccgccgactcgctggactacatcatcgacacggtgcccgtgcaccacccgctggagccgtacctggcgctgctgaagctggacggcaagctcgtgctgctgggcgtcatcggcgagcccctgagcttcgtgtcgcccatggtgatgctggggcggaaggccatcacggggagcttcatcggcagcatcgacgagaccgctgaggtgcttcagttctgcgtcgacaagggactcacctcccagatcgaggtggtcaagatggggtacgtgaacgaggcgctggagcggctggagcgcaacgacgtccgctaccgcttcgtcgtcgacgtcgccggtagcaacgtcgaggcggaggcggcggcggcggatgcggccagcaactgatggcaccgcgtcgtcgagtcgaaccacgtctgtgcgccgcgtgcaacgttcgttcgggtcgagtctgcgtgcaacgttctgcttcctttactagttgttgtctttccgccttcttgccgttctgttctgggctttgagatgagacgatggatggtcagtttttaatgtcagactgaataactacgtatagtactgtagtattactcggagtacgccagaatgtggtgtggtgtcagtctcaccagcaatctggatttgccaagtgtttctattttttcttcggtttgcccgagtgtttgtgattgttaagaactacgttattacggatcgtcaaatccgttcccttctgtctcgtctatagtttagacgcgagaaaatattaaagacacgtctcccattccagaagcacgatagaagaacaca

SEQ ID NO: 131407 - DNA, 1674 bp, Zea Mays
acccagaaagatcgcactacccggcgctcgcgcggctttctttcccaactccgacgaaggctagctacaccacctggtgcgggctcgtctccatcgcccgccacccgctccgtcgtcgtcgtccccgccgcgccgatcccgaatcgaatggggagcctggcgtccgagaggaaggtggtcgggtgggccgccagggacgccaccggacacctctccccctactcctacaccctcaggaacacaggccctgaagatgtggtggtgaaggtgctctactgcgggatctgccacacggacatccaccaggccaagaaccacctcggggcttcaaagtatcctatggtccctgggcacgaggtggtcggcgaggtggtggaggtcgggcccgaggtggccaagtacggcgtcggcgacgtggtaggcgtcggggtgatcgttgggtgctgccgcgagtgcagcccctgcaaggccaacgttgagcagtactgcaacaagaagatctggtcatacaacgacgtctacactgatggacggcccacgcagggtggattcgcctccaccatggtcgtcgaccagaagtttgtggtgaagatcccggcgggtctggctccggagcaagcggcgccgctgctgtgcgctggcgtgacggtgtacagcccgctgaagcactttgggctgacgaccccgggcctccgtggcggcatcctgggcctcggcggcgtgggccacatgggcgtgaaggtagccaaggccatgggccaccacgtgacggtgatcagctcgtcgtccaagaagcgcgcggaggcaatggaccacctcggcgcggacgcgtacctagtgagctcggacgccgcggccatggcggcggccgccgactcgctggactacatcatcgacacggtgcccgtgcaccacccgctggagccgtacctggcgctgctgaagctggacggcaagctcgtgctgctgggcgtcatcggcgagcccctgagcttcgtgtcgcccatggtgatgctggggcggaaggccatcacggggagcttcatcggcagcatcgacgagaccgctgaggtgcttcagttctgcgtcgacaagggactcacctcccagatcgaggtggtcaagatggggtacgtgaacgaggcgctggagcggctggagcgcaacgacgtccgctaccgcttcgtcgtcgacgtcgccggtagcaacgtcgaggcggaggcggcggcggcggatgcggccagcaactgatggcaccgcgtcgtcgagtcgaaccacgtctgtgcgccgcgtgcaacgttcgttcgggtcgagtctgcgtgcaacgttctgcttcctttactagttgttgtctttccgccttcttgccgttctgttctgggctttgagatgagacgatggatggtcagtttttaatgtcagactgaataactacgtatagtactgtagtattactcggagtacgccagaatgtggtgtggtgtcagtctcaccagcaatctggatttgccaagtgtttctattttttcttcggtttgcccgagtgtttgtgattgttaagaactacgttattacggatcgtcaaatccgttcccttctgtctcgtctatagtttagacgcgagaaaatattaaagacacgtctcccattccagaagcacgatagaagaacaca

SEQ ID NO: 131408 - DNA, 2348 bp, Zea Mays
acccagaaagatcgcactacccggcgctcgcgcggctttctttcccaactccgacgaaggctagctacaccacctggtgcgggctcgtctccatcgcccgccacccgctccgtcgtcgtcgtccccgccgcgccgatcccgaatcgaatggggagcctggcgtccgagaggaaggtggtcgggtgggccgccagggacgccaccggacacctctccccctactcctacaccctcaggaacacaggccctgaagatgtggtggtgaaggtgctctactgcgggatctgccacacggacatccaccaggccaagaaccacctcggggcttcaaagtatcctatggtccctgggtgagcacaaacggttaacacacacacgcacccagcgatttttcaggacccttggggatccagtatatatatatatgctccgtgtacggtccagaatatacgtactgaatttccaagtgtcctattattcaatttgtctcaaaactataaaggatatatatagtgacatgcagtttcagcgttttcatgagaaaattacacatgcagacaaattcaggtataattatttgattcatgacgaccagcatatagattggtagatagagtgcacatttgtcaaccacaaacgttagcatcccagtccggagctatcccctgggttacaggtggcaaatacacaccaaccacaataataagctaatactcttacgtctgtagttggttgccaattactgatcagattacttgaatcacaagagcttgttgtgtctaatttgtacaggctatttatatcatgatagctaaagagctgctgaaatgagtagcaaggaaacctcaccggccgtcctatacttttctctgacatgacgacaggacaaccactccaccaccgtgaactgatacaataacaataaagtcctttagtcccagtaaattagaataggctagaaactaaaatccaacagagagacgaaatcatggctttggtttgataataactgatacttttgcaggcacgaggtggtcggcgaggtggtggaggtcgggcccgaggtggccaagtacggcgtcggcgacgtggtaggcgtcggggtgatcgttgggtgctgccgcgagtgcagcccctgcaaggccaacgttgagcagtactgcaacaagaagatctggtcatacaacgacgtctacactgatggacggcccacgcagggtggattcgcctccaccatggtcgtcgaccagaagtttgtggtgaagatcccggcgggtctggctccggagcaagcggcgccgctgctgtgcgctggcgtgacggtgtacagcccgctgaagcactttgggctgacgaccccgggcctccgtggcggcatcctgggcctcggcggcgtgggccacatgggcgtgaaggtagccaaggccatgggccaccacgtgacggtgatcagctcgtcgtccaagaagcgcgcggaggcaatggaccacctcggcgcggacgcgtacctagtgagctcggacgccgcggccatggcggcggccgccgactcgctggactacatcatcgacacggtgcccgtgcaccacccgctggagccgtacctggcgctgctgaagctggacggcaagctcgtgctgctgggcgtcatcggcgagcccctgagcttcgtgtcgcccatggtgatgctggggcggaaggccatcacggggagcttcatcggcagcatcgacgagaccgctgaggtgcttcagttctgcgtcgacaagggactcacctcccagatcgaggtggtcaagatggggtacgtgaacgaggcgctggagcggctggagcgcaacgacgtccgctaccgcttcgtcgtcgacgtcgccggtagcaacgtcgaggcggaggcggcggcggcggatgcggccagcaactgatggcaccgcgtcgtcgagtcgaaccacgtctgtgcgccgcgtgcaacgttcgttcgggtcgagtctgcgtgcaacgttctgcttcctttactagttgttgtctttccgccttcttgccgttctgttctgggctttgagatgagacgatggatggtcagtttttaatgtcagactgaataactacgtatagtactgtagtattactcggagtacgccagaatgtggtgtggtgtcagtctcaccagcaatctggatttgccaagtgtttctattttttcttcggtttgcccgagtgtttgtgattgttaagaactacgttattacggatcgtcaaatccgttcccttctgtctcgtctatagtttagacgcgagaaaatattaaagacacgtctcccattccagaagcacgatagaagaacaca

SEQ ID NO: 131409 - DNA, 1613 bp, Zea Mays
aaggccacgggtgcgctgtccactttgcaggcaagctcacggcctcacggggaggccgacgaagtcgtagcagagatccgatacatgggagaggaagagggcgcgcccaccgtggcagcagcggcagagagcgctccgccgcacctgctcctgatatgcttcccggggcagggccacgtgaacccgatgctccgcctggccaagcgcatcgcggccaagggcctcctggtgaccttctcctcgatctccagagtcggggcgatgctcgccgcgtccgtgggcgtgtcggccggcggtgacggcgtgcctgtgggccggggccgcgtccggttcgagttcatggacgatgaagaccccgggcctgacctggacgacctcttgcggcacctcgcgaaggacggcccgccggcgtttgccgagctgctggagcggcaggcggacgccgggcggcctgtggcgtgcgtggtggtaaacccgttcatgccgtgggcggtcgacgtggccgccgacgcggggatcccttcggcggtgctgtgggtgcagtcgtgcgcggtgttctccctctactaccaccacgtgcacggcctcgtggagttccctcccgaggacgacctggacgcgcggttcacgctgcctggcctccccgagatgtccgtcgccgacgttccgtcgttcctgctcccgtccaacccgtacaagctgctggtggacgcgatcatcgcccagttccacaccatcgaccgcgcgtcgtgggtgctcgtcaactccttcacggagctggaacccgacgtggcggcggcgctcccgggcgtgacgccgcggccgccagagctcatccccgtgggcccgctcatcgaggtcgacgagcagcacgacggcgacggcgacggcgcggggtcgggcgcggtgcgtggcgacctgatgaaggccgcggacgactgcgtggagtggctagacgcgcaggcgccgcgctccatggtgtacgcatcggtgggcagcgtggtacggctcaacgcggaggaggtgggcgagatggcgcacgggctcgcgtccacggggcggcccttcctgtgggttgtccgtcccgatacccggccgctcctcccagagggattcctggactccgtggccgggcgcggcacggtggtgccgtggagcccccaggaccgcgtgctggcgcacccgtccatcgcctgcttcctgacgcactgcggctggaactctaccctggagaccatcgcagcgggcgtaccagtggtggccttcccgcagtggggcgaccagtgcactgacgccaagttcctggtggaggaactcaggattggggtccgcctccgcgggccgctgcggcgggacgccgtgcgggaggcggtagacgccgccgtggcggggcccgaggccgacgcgatgctcgccaacgccaggaggtggagcgcggcggcgcgggaggccgtggcgctcggcgggtcctcggacgcgcatatccaagcgttcgtggacgaggtggcccggcgagcatgtgtcgtgccgccgtcgtcagagattcctagtcctagttgaggtcgaggagcttcagcagtcaccctcaccggacaaagtgagtcgaaagctga

SEQ ID NO: 131410 - DNA, 204 bp, Zea Mays
ttgcttgtaagacaactagccagttggcattccattccctgtatacaatctttcctatggatttacaagatatacatgaaagtctgcttcatttcacttaacaattgtgctgacttgtggatctatgacaaacaaggttatatgtgtaacacttgtttaactggtgtaagcaaatcttttcatgtgcttggcgcacttatatga

SEQ ID NO: 131411 - DNA, 1922 bp, Zea Mays
ccgccgccgccaagcgaaacggcacgcaggggctctgtcgcctcgcctgtcgcctccaacgtgcaacggctaccgttccctgccccccgactccccgaggcaccccctcctccctcctcggcgaaacgacaaccaccccgccggggagggtaatccaagcgagggcgagccatcaccgtgctgttcctcgtttgctgtcgcctcgaagagcctcctccgttccctctccctcgaccgatcggccggtctcacggggcatttcgcggggctggtcgatctctccccgctcattctgtcaagggattggtcggttgccgattccgtgcggccggataactcggatttattcagtttttcgggttcgctacatgcgtgtgcgatgccggccagctccctcccggcgtcccccgacgccaccggcgacattggcgccgcgctcgagctcgatctcgaggatctcgccgccggcggcggcacggactgcatcggcgcgctcgcctgcggcaggagcagcttctcctaccgccgcctcccggagccccgcctccgcctcaccgttcagaagcttgacgactccttcttcgacattgaaatcgcgcggtcggccacggtgtgggagctcaaggtgaccatagagaacttgttctccgccctctatgacgacacccagaagaccatctcttggaatcacgtgtggagtcacttctgcttatgcttcaaggacgagagactgacggatgacaaggcaacattgcgtgggtttggtataagagatggtgatgtgcttcattttgcccagcatctgtctgttgactacagcccatgcagggatcctcccaaaaaccagaaggaagcgtctcacactcacagaaggtcaaggacttcgctggatggttacaggccagtgagcatgctggatgatctcagcgaagatgatgatgagaagtttacacacagcaggtgctctacgagtgtcttagaagatccgtgtctttacgagtacatcgaggagcgcgtggaagaagaaactcccaagaaaggaagtctgttccaaagatggttctgctcctctaaactaaggagcaacaggaggacacatgcagaggacactgtgccactatctggtgagaagaagaatgctcatccaaagctggggaagtggctgaccttcaaattctgagatggtgttgtttattctgtctatacacgctcctccgttcggcgcggccagctgagaagaagatggcatggttccttgtgaacttattattgacggctaatttaggtttcatgtatctctgtgtatggtccgagctattcttccttctaatgtcatgcgcctatgcggcggtggtatgagcagaactgtttgtctcatgactcatgagaaacaacgactgatgcatcacgcggttcacattttttttaatgtgttgtgcatgggcaggtatgcgggccctgcaagaacgaccataaagtgcttgacaaaagaatttgacacgcgcacacaacacacgaaaagaaaaaatcagttcctgtgcaatttggaaagttttgcatgttctggactgagggattagagttgaatatcttgactcattgttcttacaaccaaaagccattatcctgttttacatgtacaaggataaataaaaaaaccaatataaacatcgaagggcacaaaacttagcttgctcaccctgtcagatcgacatcgaaagctatgggctgagcatccttagaacaggcaaagaaccaatgaaacagcagaagaagtagtagctagaagagtaaattaaaagagagaaaaaaaatccttgattaatgattgcactttgagaattaataagacttcgaacgacatgcagaggcaggtctgtacacaggactgctaatggccagctcctcggcggctgggcccg

SEQ ID NO: 131412 - DNA, 1535 bp, Zea Mays
gccaaaccttcgctgtccatcgtcaccctccttccttccccagcctctcatcctatgcaagaacccataatccagacccacgaactcgcagcagccattagcgtgcgctagccggccgcagccatggccgcccccgcaacgacctctctactgagcaccctgctgaatctgccgctcgccccgttgtcggggaagagctcgccgccgtccgtggtgcatgtggcgcggcgggggccgatggtggtggtggccgccaaggggtacaatgtgcagatcctggtggacgagaacgagggggaggagtccatcttccggcggttccggcgggaggtgatgcgggccggcgtgctgcaggagatcaagcgccgtcggaggtatgagagcaagacggacgagaagaagcgcaaggcgcgcgaggccgggcgccgcaaccgccgcaggcgtatgatggatgagccgaggttcccagaagaagacgccgacgctaccgcaaaggctcgggacgaggacgatgacaactgggagatcgatggcatcctgtgaaagagaagcaacggagtccatgatttcacaacgtccagacacacagaccccgacagctaatctgagttctttttggcccccggtgagacgcaaaccgtatgagttttggccgtgcccatttccgctttgaatggttacagttgcgatgtacaactaattaaatgttagcaaatgcagcatcccccatgcatgcatccctttcattccctctaacgtccttgtttagcttgccaggttggcaggttcactgtcccaaaaatagcacagtgacacccggccaggtggttgctcgcgagaggcgcctccgtgacacccggtccatgcaaccgcggaggccgcgcgcagccactccattgccgctttttaaagcatcgcgcaccaccttcgcctcgccaaaatccacaagccacttcagtgcttgcgatcgcgtcggccacgatctcttgcgaaaaagcttaccctgtgtctgtctgtccgaccgtcagtccgtctaacaatcgatttccatgacgacgtccccgcgcgtgtggctgctcgccatggcactggcgctcgcctgcgtgctgctcgtgaggtccgccgacgctgctgccgaggcgtccccgactccaggcggctccacctacgggtgcaacccggccacggacaagtcgtgcaagcccgagggcgtgggggtggtgctgccgggcggcggcatcgacctcgacggcgacggtgacgaggacgagctgccgcagttccagccccacctcatgatcctcggccatggccactgatgagtgtaaatggttggttggttggtcgtcctcagccgatctactggacgacacgatggcggtcacatttgcgtccgaatttctcttgttaaattgaggccagagtgattaaatgagcatatgatggtaatttattcaccgtgtattgcctgttcaaacatgaaagtgcactgatacaattttaaaaaacttatgcacaacagcatatagcaagct

SEQ ID NO: 131413 - DNA, 407 bp, Zea Mays
ggtggacttccggatcatacttagggatttgcccaaacttccggtgaaggcacctgatctttgctttgggaaaaaagggatgtagcagcacgaccaccacacctttaaataaaggaaccaccacttaataatgatgttaaacagggagggtcaagtctaggggattattacattctaatctttcatggtagttgaactgtttagtttggtgggctgagttgtctatcttttgtctagtcatgaatgttcatttctaccgttgcatttcgattatactatgtcaattatctttcttttatatcctgtataaactctatgtttcccttgttatgcttctttcaagggaggtgctgccgtattttacaatactttctttctctatgtgttgcataagttttgtaggaagg

SEQ ID NO: 131414 - DNA, 1074 bp, Zea Mays
tataaattctattaaaggtatgcatatgaagttggatttccactgaagaaatacagagagaagacattcagtaagtggataaattgttcacgtgaaggtaaaagggcactaaaatcaaatgatacacctaggatgaggaataggactttggggcgtacgcaatgtaaggctggaataaaattaaaaaatatatatgatgatgaaaaaaatggttgtagctgcaaaaattgaaatggtaaacttggagcataaccatgagttcaaaactgacgaagtagagaaacaacattttacgttgcaacaaaagtagggatgctgagttcataaatttttgctgatgcaatgcatgatagccaagtgacgcaacattgcatagttgattttatatcagacatgcatgatgggccagagaacgtaccggtaactgctcaaaatctgaaaaacatgagggcagcaaggagacgagaaaactgcgcaaatgatgtagccaaacttttgtctttctttacggaatgcaagaaacagaatccacaatttttttgtgattttcagctagacaatgatgggaaaatagtgagtattttttggtcacacgcaagtatgcagagggaatatgcagattatggtgatgctgtgacatttgatacaacacataagacaaatatatatgataaaccactgggcatgtttgttggagctaacagccatctgcagtgtacagtgtttggatttgttttgttgggagatgaaacggttcagacttttgaatgggctttcaattcattcaaaacatgtatgggatgcgagggtccgagagttatgctaacagatcaagatcctgcaatgccaattgctctaagaactgtatttccaaaaacagttcacagactgtgtttatggcatgtccagaacagatttatgccattcttaaatgaattatatgcaaggtttgctgataaggattttaaaacaacattccaatctattatacatcatccattaactcctcatgagtttgaatgtgcctgggaaatgatgctagaggagttcaatcttcatgaagatatgactcta

SEQ ID NO: 131415 - DNA, 2037 bp, Zea Mays
ccgctgcaatggaccctagaggcctaatgtaaagcagtccacagaccaggcccacaggccgcacccgacggcccatccggcctttcccactcgtcactcttgatcggcccagcagcgagcggaactgcgaaacgcaggatcgcgactccgggaaaaaaaaaacgccgggcgcaatcgggaacggggaaccctagggcagccggcagcgtcgctccgccccggccgtcgtcgtcgcgcgtcgccgtccactcgcttcctgctcgggccttcgcccctcggccacgtctctgccctcgccccttggtcgggaccgacgtcctcgctccatctagcaagctgatcagctcgactgcttgagctcgtcctcgccatcgccgctttgatttcttcctttcagcccgacccggctcaaagcagccagatcacggcactccgtccgaccctcgaagcgatcaccttcaccgcctctcctcctcgtcacaggtgaagatgattccgcagagccagagcagctccctgcagcgccttcaacacgtcgagaagcggatagtgcgggtgctggagcttgcgggagcggtgatggaggagctgggaaactcccatggccctcgcaccgatgcagtcagcgcgcactgccgtgagttcatgatcgctatgaaggtaaccagcccactgcctgctctcatatcgtcaggctgtgggttcctgttgttaccagttatgcgcctcaatcctcactaatcccatgctagagagactattggaaaatcaacagttgttttaaaatgctgtatgcaaaattttgctctgtccaatgttactttgtttccatcaaattgactaaatatatgcatcagctctcaattggttattatttgaagcagtatacatgccccaaatcattcatgataactcactgcttaactatgtttttgttggagtaggaaattcaaacgacgttgcgtgaggaaatcaaaagtgcttgtgaatatcgtccatttgaaaagtgtgattacagtgcaaggattgctaatgagatatgctgcaagaagctggagtatgtaattgagaagttggataccatgcaacagagccttgaacatatcactgatgatgtttagcgagctagcaacatattaggtactatactctttttgtgcaataaagtgtaatctacttagtgaataagaggatactttatgatgatagtatccactcaatcaggtgattttgtcaatactttgctgcagtggtagagttggtgaattagatattttcagtttcttggtacttgcaaaatgcaaccattattatatactacatgacttccattgcattatatattgtgtgtttacagggactttttaaatttgcttgcagttctttccactatagcaagccttcatcatctcatctttaatgtgtaattctgttgtttaagaggataatgtttacaccagatattgttggttatgtgactagctcttgtaatgcttccttatgtccatataaggggggcaattctcctttttcccccattatgattctacaataatcttttgtggtattgtctactttctaaatgggatcaggttttctccaagttaaattactcatactctgtggattactttcagctttgggggtaatagatgatcgaggagtacactgaagaaatgtagaagcattctatcaacttataattgcataaagcttttgctcaactgtaggactgtaacttgtggtttgtttgtcttccatattctgtgacagttcttactttagctgcctgctgatgctgaacaacaatattcttggcctgactcggataggagtaacatccttgagcttaaaatcatggaattttaaggcgttgtattttactgatgagaaattgctctcatgtattgcatggacatgcgtcaattcttagaacatgcgttttggtaaatattgctaactcgttttcaacgattatcttcatgtgtatgcaatgagtactattttgatctatttgttaatgttggttcgacatcc

SEQ ID NO: 131416 - DNA, 1256 bp, Zea Mays
ccgctgcaatggaccctagaggcctaatgtaaagcagtccacagaccaggcccacaggccgcacccgacggcccatccggcctttcccactcgtcactcttgatcggcccagcagcgagcggaactgcgaaacgcaggatcgcgactccgggaaaaaaaaaacgccgggcgcaatcgggaacggggaaccctagggcagccggcagcgtcgctccgccccggccgtcgtcgtcgcgcgtcgccgtccactcgcttcctgctcgggccttcgcccctcggccacgtctctgccctcgccccttggtcgggaccgacgtcctcgctccatctagcaagctgatcagctcgactgcttgagctcgtcctcgccatcgccgctttgatttcttcctttcagcccgacccggctcaaagcagccagatcacggcactccgtccgaccctcgaagcgatcaccttcaccgcctctcctcctcgtcacaggtgaagatgattccgcagagccagagcagctccctgcagcgccttcaacacgtcgagaagcggatagtgcgggtgctggagcttgcgggagcggtgatggaggagctgggaaactcccatggccctcgcaccgatgcagtcagcgcgcactgccgtgagttcatgatcgctatgaaggaaattcaaacgacgttgcgtgaggaaatcaaaagtgcttgtgaatatcgtccatttgaaaagtgtgattacagtgcaaggattgctaatgagatatgctgcaagaagctggagtatgtaattgagaagttggataccatgcaacagagccttgaacatatcactgatgatgtttagcgagctagcaacatattagctttgggggtaatagatgatcgaggagtacactgaagaaatgtagaagcattctatcaacttataattgcataaagcttttgctcaactgtaggactgtaacttgtggtttgtttgtcttccatattctgtgacagttcttactttagctgcctgctgatgctgaacaacaatattcttggcctgactcggataggagtaacatccttgagcttaaaatcatggaattttaaggcgttgtattttactgatgagaaattgctctcatgtattgcatggacatgcgtcaattcttagaacatgcgttttggtaaatattgctaactcgttttcaacgattatcttcatgtgtatgcaatgagtactattttgatctatttgttaatgttggttcgacatcc

SEQ ID NO: 131417 - DNA, 1625 bp, Zea Mays
ccgctgcaatggaccctagaggcctaatgtaaagcagtccacagaccaggcccacaggccgcacccgacggcccatccggcctttcccactcgtcactcttgatcggcccagcagcgagcggaactgcgaaacgcaggatcgcgactccgggaaaaaaaaaacgccgggcgcaatcgggaacggggaaccctagggcagccggcagcgtcgctccgccccggccgtcgtcgtcgcgcgtcgccgtccactcgcttcctgctcgggccttcgcccctcggccacgtctctgccctcgccccttggtcgggaccgacgtcctcgctccatctagcaagctgatcagctcgactgcttgagctcgtcctcgccatcgccgctttgatttcttcctttcagcccgacccggctcaaagcagccagatcacggcactccgtccgaccctcgaagcgatcaccttcaccgcctctcctcctcgtcacaggtgaagatgattccgcagagccagagcagctccctgcagcgccttcaacacgtcgagaagcggatagtgcgggtgctggagcttgcgggagcggtgatggaggagctgggaaactcccatggccctcgcaccgatgcagtcagcgcgcactgccgtgagttcatgatcgctatgaaggaaattcaaacgacgttgcgtgaggaaatcaaaagtgcttgtgaatatcgtccatttgaaaagtgtgattacagtgcaaggattgctaatgagatatgctgcaagaagctggagtatgtaattgagaagttggataccatgcaacagagccttgaacatatcactgatgatgtttagcgagctagcaacatattaggtactatactctttttgtgcaataaagtgtaatctacttagtgaataagaggatactttatgatgatagtatccactcaatcaggtgattttgtcaatactttgctgcagtggtagagttggtgaattagatattttcagtttcttggtacttgcaaaatgcaaccattattatatactacatgacttccattgcattatatattgtgtgtttacagggactttttaaatttgcttgcagttctttccactatagcaagccttcatcatctcatctttaatgtgtaattctgttgtttaagaggataatgtttacaccagatattgttggttatgtgactagctcttgtaatgcttccttatgtccatataaggggggcaattctcctttttcccccattatgattctacaataatcttttgtggtattgtctactttctaaatgggatcaggttttctccaagttaaattactcatactctgtggattactttcagctttgggggtaatagatgatcgaggagtacactgaagaaatgtagaagcattctatcaacttataattgcataaagcttttgctcaactgtaggactgtaacttgtggtttgtttgtcttccatattctgtgacagttcttactttagctgcctgctgatgctgaacaacaatattcttggcctgactcggataggagtaacatccttgagcttaaaatcatggaattttaaggcgttgtattttactgatgagaaattgctctcatgtatt

SEQ ID NO: 131418 - DNA, 1186 bp, Zea Mays
ccgctgcaatggaccctagaggcctaatgtaaagcagtccacagaccaggcccacaggccgcacccgacggcccatccggcctttcccactcgtcactcttgatcggcccagcagcgagcggaactgcgaaacgcaggatcgcgactccgggaaaaaaaaaacgccgggcgcaatcgggaacggggaaccctagggcagccggcagcgtcgctccgccccggccgtcgtcgtcgcgcgtcgccgtccactcgcttcctgctcgggccttcgcccctcggccacgtctctgccctcgccccttggtcgggaccgacgtcctcgctccatctagcaagctgatcagctcgactgcttgagctcgtcctcgccatcgccgctttgatttcttcctttcagcccgacccggctcaaagcagccagatcacggcactccgtccgaccctcgaagcgatcaccttcaccgcctctcctcctcgtcacaggtgaagatgattccgcagagccagagcagctccctgcagcgccttcaacacgtcgagaagcggatagtgcgggtgctggagcttgcgggagcggtgatggaggagctgggaaactcccatggccctcgcaccgatgcagtcagcgcgcactgccgtgagttcatgatcgctatgaaggtaaccagcccactgcctgctctcatatcgtcaggctgtgggttcctgttgttaccagttatgcgcctcaatcctcactaatcccatgctagagagactattggaaaatcaacagttgttttaaaatgctgtatgcaaaattttgctctgtccaatgttactttgtttccatcaaattgactaaatatatgcatcagctctcaattggttattatttgaagcagtatacatgccccaaatcattcatgataactcactgcttaactatgtttttgttggagtaggaaattcaaacgacgttgcgtgaggaaatcaaaagtgcttgtgaatatcgtccatttgaaaagtgtgattacagtgcaaggattgctaatgagatatgctgcaagaagctggagtatgtaattgagaagttggataccatgcaacagagccttgaacatatcactgatgatgtttagcgagctagcaacatattaggtactatactctttttgtgcaataaagtgtaatctacttagtgaat

SEQ ID NO: 131419 - DNA, 1985 bp, Zea Mays
catccatcatcagcccaccccacccccgccttctccttcctcccgcccgcccgcccgccgcgtgcgttctcctcccttccctcctctcgcctgagaggaaaagggggaggggcgcacagagaggaggaggagctaccggaggtggtggaggaacaaccagcagggcccggccggccgcctagtccgtccgtcgtccaatcctcctccaggcgcacacatcgtcatcgtcaacaacgacaacatggctgctgccgggcacgcggtcgtgcccaagttcggctcgtgggacgccgagaacatcggctacaccgtcttcttcgagaaggtgagagacaacaaggctccgccggctgcgccaccggcggccgctcccaagccttccgcccccgctgccggcggtaacggaggctacgacttcgacccgtacgagcactacgagagcatcagcagaaagccgccgtcacgcccgccgagctcgcacggccagcccgccgctgccagggcgccggcgcccggcgccggctacggctacggcgacttcgacccctatgagcactacgacaacctcagcagcaggaacgtgccctcccgcccgccgagctcgcacggccacgcgccggctgctggctacgacttcgacccctacgagcactacgagaatctcagcgccaggaacgtgccgccctcccggccgccaagctcgcacgcccacgcccacgcgccagcgcctcagccccaccatcggacgtaccagcaccagcatccgcaccccggccacgggcaccaccgccgcaccgggagcagcagcagcaacgcggcgtcggaggccagtagccgcggcagcaagttctcgccgcccaggccgtaccagcccaggtacaccagcaacagtaccagcgaccgaagcttcccgccgcagccacaaggcggcagccacggccacggcgcccaataccaccacggtgcgccgaggccggcgtccgcctcgccgtcgccgtcgccgccgcgccaccagcagcccccgctgccgccgcgccccaacaagccgtcggccgtgccgaggttcggcgtgtgggacgagcagaacgccgcgatggcggcgcagggattcacggtgcagttcgagaaggtgaagcgccaccgggaggaggccaggaccgcccccgcgccgcccgtgcagccgccgaagctgctgtcgtcgcccgaccacgcagcgccgccacgcgcgcggcgacacgggaaggggaaggccaagaggtccttcatgtccaggatctacaggtgcctgttcccaagggtcagagagtgagtgatccgacgatggttatacacaaccgctcagccgtatacggtgtactacgtgttcttcgacagagacggtactgtacttcagaatttgtttgttctttgttcattatataatgctgtataatctccatgcattagaagaatcactcggtcacacagaagaatatcgtgctgggggtacatgattcacgtgcctgatcttcacttctttcattgcactactacgtagtataatcctcctaggtagaagatgtattttcttcttaatttctatttcgaatgggaggtcaacgaaaaaatctttattaaggccagtttgtaaactttatttttctaagatattcctttttttctaaagaaaaaataataatttcaattagaaaaaataccttaaaaatgggtccctaaactagttcttaaagaacaagatcctctgcagtcggcaggttcaatgtcaaccgttcgcttgtatccaacggtaaacttttgaacgtgtgctgccacgacgctgctcggtgagttcggcccaatctcaggacatgccgtttcacatcagagcctcggtagggtgagtcctcgtgcgttactacgggtataaaaataaatttatatagagtatagataagaatgataaatattactataatatttaaaatacgtgtgataaacattattaa

SEQ ID NO: 131420 - DNA, 2899 bp, Zea Mays
caacccaaccataaaggcgtctcctcggcagactccgaccgctgccctgccctggacatccatcatcagcccaccccacccccgccttctccttcctcccgcccgcccgcccgccgcgtgcgttctcctcccttccctcctctcgcctgagaggaaaagggggaggggcgcacagagaggaggaggagctaccggaggtggtggaggaacaaccagcagggcccggccggccgcctagtccgtccgtcgtccaatcctcctccaggcgcacacatcgtcatcgtcaacaacgacaacatggctgctgtaagtaacatctcccatagatcgcactcctcaattgtgtggcatccacgcatccaaaacgatgcatggcattggcatgagctgggacggctgctccggcatgtgtttattgctccgggcatgaactgaactgggacggcctgcgtggcctgctgctgcaaatttcattattactcatccacatgtgccgtgacataaatgtgtttttattactactgctccgaagctagtagggtagtttatcgaagtactgcatgtgctccgctgcatgatgatcgcattgggattatcatgcatgcctccttccagccccggaaccgtgcccatgtgcccccacgttgaatatgatgattgctgtgcattttttagttatatgttctagtcatgaacgcataaaaaatgttccagtcttgtgtatccgtcatcttccagctcgtctatggacctgtgattaaagagaatggctaattgctagctaaacaaaaaaaaaaacagttttaaatgtttctaaacaagatgtgtctaacaggcgagctaattattgtttttactaattctttttaaccaacttaaagctaatccgaaatcacttttagcccaaccgataactagacaggcgtatatggtgcgggaactgtatcatcgtctttattatattttgcattctcacgcaccatccaaatccattcacgattcatcgctatctgaacatgggggcgccgctcctgacttccccaaggcacatggcgtgtgatcccgtgcttggattggacgactcgccggtcgccgctctcgtagtcctcacgggtcacacacccatgtgctgcgccgcgcgcccttcatcctcagttgtcagcccatgtcacggcgtcggctcctcagtagtctgcctgccctcaggaggtcgacttgcatcccggtccggatgtgatccttcgtaccctttgagtttcagctaagcgagtacctactacgtactagctgtatctctgcgacgtgccggtgctcgcacgcaactacggactagcatgtattattcggtcgtcgtcgtcggtgttaagacgcagacgcagggagctgtacgtacatacagctgtctgtcatgtcatgtgctgttcaaggcaaatcctgctagtaccagtagttggttaacatgtacaactctcattttcacgtagccggacttacttagtatttgttttctcgttttctttaaatgcaaattcgtacataaaatttgcagcaattgctcattgagattgattgcaggccgggcacgcggtcgtgcccaagttcggctcgtgggacgccgagaacatcggctacaccgtcttcttcgagaaggtgagagacaacaaggctccgccggctgcgccaccggcggccgctcccaagccttccgcccccgctgccggcggtaacggaggctacgacttcgacccgtacgagcactacgagagcatcagcagaaagccgccgtcacgcccgccgagctcgcacggccagcccgccgctgccagggcgccggcgcccggcgccggctacggctacggcgacttcgacccctatgagcactacgacaacctcagcagcaggaacgtgccctcccgcccgccgagctcgcacggccacgcgccggctgctggctacgacttcgacccctacgagcactacgagaatctcagcgccaggaacgtgccgccctcccggccgccaagctcgcacgcccacgcccacgcgccagcgcctcagccccaccatcggacgtaccagcaccagcatccgcaccccggccacgggcaccaccgccgcaccgggagcagcagcagcaacgcggcgtcggaggccagtagccgcggcagcaagttctcgccgcccaggccgtaccagcccaggtacaccagcaacagtaccagcgaccgaagcttcccgccgcagccacaaggcggcagccacggccacggcgcccaataccaccacggtgcgccgaggccggcgtccgcctcgccgtcgccgtcgccgccgcgccaccagcagcccccgctgccgccgcgccccaacaagccgtcggccgtgccgaggttcggcgtgtgggacgagcagaacgccgcgatggcggcgcagggattcacggtgcagttcgagaaggtgaagcgccaccgggaggaggccaggaccgcccccgcgccgcccgtgcagccgccgaagctgctgtcgtcgcccgaccacgcagcgccgccacgcgcgcggcgacacgggaaggggaaggccaagaggtccttcatgtccaggatctacaggtgcctgttcccaagggtcagagagtgagtgatccgacgatggttatacacaaccgctcagccgtatacggtgtactacgtgttcttcgacagagacggtactgtacttcagaatttgtttgttctttgttcattatataatgctgtataatctccatgcattagaagaatcactcggtcacacagaagaatatcgtgctgggggtacatgattcacgtgcctgatcttcacttctttcattgcactactacgtagtataatcctcctaggtagaagatgtattttcttctta

SEQ ID NO: 131421 - DNA, 104 bp, Zea Mays
gtcatattctctcttgtggtttggaagcaggaacaaatgttgtgacccttgtagatattgtttggttaccttgttatgcaatactatagttgcttggagtgaca

SEQ ID NO: 131422 - DNA, 1110 bp, Zea Mays
acaagcaagccttccaattaactcgttcccaccttcccctcctccccttctccttccttcacggattcccaaatactcgcttccaataccaattctccgatccccgttcgttcccgcaccctcgcgctccgctgatccggcggcatgcggcgccgcggcgtggcggcggctgaggcggacggtgacgtggagttgcggttccgcggggtgcggaagaggccgtggggccggtacgcagcggagatccgggacccggcgaagaaggcgcgcgtctggctcggcacattcgactccgccgaggacgccgcccgtgcctacgacgccgcagcgcggatgctgcgcgggcccaaggccaggaccaacttcccgctccccgccgcagccgccctccaccaccaccacatgcccgctgctgccgccgcagcagctccaccatacacaacatatcccaccgccacgggcgtctcgacgccgccggtcgccagaccggcttgcagcagcctcagctccaccgtggagtccttcagcggcgcgcggccgcggcccgtgctcccgccgcggttccctccgccgtcgattcctgatggcgactgccgcagcgactgtggttcctcggcctcggtcgtggacgacgactgcacggacgcggccgcctctgcgtcgtgccccttcccgctcccgttcgacctcaacctgcccccaggcagcggcggcggagccggcgtcgggttttacgccgatgaggaggatgagctcaggctcacagcgctgcggctgtgacgtcgagctcaatcgagccgctgcttagaaagaggaaaaggagaaaaatatttggttcttcccttctctcgtagccgacacgaactctccatccactacgatgttgttgtttacttgatctgattatgatatttgcctgaatcctagtcaacttacctgcatgcatgcttgcttgttttctggcgattgaggattatcgccaaacgccaaatcttgcagcagctgttgtactgtaatatatcaacattttacttacttcctcttatgaggaaaaagacagataaagtaacttatttcaatctttagctacattttgccttcttgtttttg

SEQ ID NO: 131423 - DNA, 1571 bp, Zea Mays
gtgatttctcaggggataaatgcaggagacgtgaggaagttgcaggatgcagggatttacacttgcaatggcctaatgatgcataccaagaagaatcttacaggaatcaaaggtttatctgaagcaaaagttgataagatctgtgagccagcagaaaaacttctgaaccagggcttcatgacaggaaatgatctccttctcaagcggaagtctgttgttcggattacaactgggagccaggcacttgatgagctgcttggcggggggattgaaacactttgcatcacagaagcattcggggagttccggtcagggaagacccagttggctcataccctatgtgtctccactcagcttccaatccacatgcatggggggaatggaaaggttgcctacattgacactgagggaacattccgacctgaacgcattgtgccaattgctgagagatttgggatggatgccaatgttgttctcgacaatatcatatatgctcgcgcgtacacatatgagcaccagtacaacttgctcctgggccttgctgccaaaatggctgaagaacctatttagcttcaaaattctgtgatctaacttcttcagtgaactatcggagcgtgcggtgttaaagagggctaggatggagcgtatgaaggcattggagaagatgatgaattccaaatcagcatctccattgcgaatctggtggctttgatcatttctgtcatcttttgcttcttcatactttggcaaggtataacaactggtaacccataagttatgttagcatgcattatgttctatgaacaatcagatttttgttcaccagcactggttgtgcatagcagtaaatcatctttgttgctcctacagtcctactacacccgttttgagtggtaatatatactgccaactccaagggaatttgattttattactcaacgtttatgcctttcatttactaccttcattttttttcaaaagtgtttagtgcatcaacattgtttttagtaaatgtctttgactgttgccttttattgctatatgtcgggtcgtttgttgcgctgttgtgcacgcggttgtagggagggcgcattgtggcggggcggctacgagggaccgattttcctgtgtggcagtgacaacgacaccgtggagccaaggcaatgtcggcaagctgatttttcagattggaacctatgtttttttaaagatcgaatatgttctagcatcttaaaaagatttgtcagaatgtaaacatttgttctgaggtcatttaggcctcaaacagaatttcttgaacttatttcgttggagggaatagcacatctcgagatctaaatttgtatagaacatatatttttatgggtatcaaatatgattgtgtgcaaaacacggacatactgtagtactataataatgaaacacacatttttacataattcatcatgatattatatgttgtcgttgcaacgcacgggcactcacctagtaatgctttgaagaacgaaattactcaatgtttaatgattgtgttatattgttcttgattcacaatatttaaaaacaaataa

SEQ ID NO: 131424 - DNA, 432 bp, Zea Mays
atgaacaacagatttacaaagataagagagcaaggttcaaagggaaagaaaagcaacccactagtgcttgaagagcttttgtgggaaaatgagtgggttcaggagtctgaagaagatgaggagctttggagtgcagtagatgaagttttaggtgcaactcaagctacccagggcagaaacttgcctagggcatcagctgcacgtggtgggaggacctactccgagacctatgttaggagtaggaagcgccaaaaagttgcagtagctcaggacttgcagcaaggagatggcagtgacagtgacagtcacaacgaaaatgatcatcaaaagcaaactcaaaatgaccaagatgctgcaggaaaagcgattgatgaagaagaagaatctgtggctgctagtgatcaattcaagctggatgatgatctcatatag

SEQ ID NO: 131425 - DNA, 1035 bp, Zea Mays
aaatctcctttaaaacatctctgcatgccagcctttatttccagtttgttctcctctccctttttccccatcagacttgagtgttcagtcagtcagtcagtcggccggtcgtgttattcacgctatcttctttcggaggagcaggcgcagaggtaacaacaacagggtagttatgcggcggcagttgaagtgcgtcggcctgctgctcctgctgagcctcctgctgcccgcgctcagccccgtcgtcgtcgtcgccaccgcgcgcagagagctgctgccgctaatggccaccggcgacgaagggcggccgcaagacgtgagcagctcaggaacttggatgccaccgggagccgcggaggaggcggtcgtcaggaggaaggacgaggcgatgaagacgaacggccgtcgttttagaagaaccagcagctggaactggaagaagatgcctgccgctgcctcgcaggttagcttcggtggccggatacccttcaccgccgactaccactccgtccacaggcacccgcccacgcacaactagctgctagaaacttgccatgtaaggtaagctagcagcagagcagcctaagatttgcgcctttgaggagttctcctgtcttcgtcgcagcgaaagaaaaaaggaaaaagaaaggagatctgcttctctgaatatcactcctcctaccgaatagttgcaccagtgtttagtttttttatatatagcctttgttgtggtttagggtctttagttcattagtggtagtgacatatatactacgcgtggaagctgcattgttatgttaccttttttctaggtttagctctctagtgacgatatataaatgggtacgcaagctgtacgtatatgttggggccattttgcctgaacatgtagtcatcagtgtaaggtctcgtcacagggagagttgctgacggatccatgttctcttcagcttccatcctctgtgtatgtgtgtactaacaagtggggtttatgaattatgatgaacatggtcgtcatttcgaaataatgttcaa

SEQ ID NO: 131426 - DNA, 1869 bp, Zea Mays
gatgaaatttaacgttatagatactcacctagaaacgaaaaccaattcagtttttattttggtttaaaatttgaaaagtaaaagtcaaaatttggtctttttcaaaattatcgagctgaacctcgacctcctatggtgaaaaaaaaaaacagatcatcatcacaatcgacgattgcatttcacacgcgaaatttccccttttccaacgccacagcaaacagcatccacagcggagagcgtctctttctccttcccctccctctttccacgacaccaaaagaaaccgaaaaccatcgacgcgctccgtccaccctcccctaccccgcgtcctcctcccctacgcctcccagcccagcggcaaaacctaaccctagatgggcgccgtcacctctacggtcgcggcgcgctttgcctttttcccgccgagcccgccgtcgtacgggttcgagcagccggcgccgcttccggcccctgccacacccgagcctccggccccggccacatccaagccgccgcctccggccccggccacacccaagccgccgccagcgggggaggagaagggcggtggcgcggtggtggagctcacgggcgtcccgcggagggttaacgtggaggcgcggcggctgcggacgaagcggggcacggaggtggtcgcgatgcacgtgcgccaggcgggggccaagctcacgctgctctactcccacggcaacgccgccgacctcggccagatgtacgagctcttcgtcgagctcagcgcccacctcaacgtcaacctcatggggtatgactattctggttatgggcaatctactgggaagcctagtgaacaaaacacttattctgacatagaagctgtatacagatgcctcatagaaacctatggagcttctgaggataatatcattctttatggacaatcagtgggcagtggtcctactttggatttagcatcccgattaactcgtttaagagcagttgttctacatagcccaattttgtctggcttaagagtgatgtatcctgtaaaacatacatactggtttgacatatacaagaacatcgacaaaattccattagtcaggtgtcctgtgttagtgatacatggtacagcagatgaggttgttgactgttcccatgggcggtcactgtgggaacttgctgaagtgaagtacgagccgctgtggatcaaaggcggaaaccactgcaacctagaactgtacccggaatacatcaaacatctgaagaagttcgttggagccatagagaaatcgccacccccacctccgatcgacgagtgcatggagagctcaggcccgtcggattgtaccccagcagaacccgagtgtacagcggactcaaggaagagcacggactgcagggacaaagcaaggccaagcatagatcagagacaaagcacggaccggcgggacaagccgaggggcagtacggataggagggacaagacgaggaagagcgtggaccatcccgagaagccgcgggctagcgtcgatcaaccggatcggccgaggaaaagcatcgaccggtttggaggcatgatgaagtcggtgaggctgtgcaatatcgactgcttcaaagtgacagcaacctctgggagctgaagagaaggaacggatggatagtagcaggaaaggttagtgttgggtgccgtctgtatgtattcttcccttcgtgtaacttattcaattgggtgattggtttggccgcagtagaaggcgtgtttttgttttctttttcttcgctccttcctcatacaattacaatggtgttgtttccgttgggctgttctttttaacatgagatgaaataataatcttgttgataaacaatacaatgcttgcgaacttc

SEQ ID NO: 131427 - DNA, 1658 bp, Zea Mays
gatgaaatttaacgttatagatactcacctagaaacgaaaaccaattcagtttttattttggtttaaaatttgaaaagtaaaagtcaaaatttggtctttttcaaaattatcgagctgaacctcgacctcctatggtgaaaaaaaaaaacagatcatcatcacaatcgacgattgcatttcacacgcgaaatttccccttttccaacgccacagcaaacagcatccacagcggagagcgtctctttctccttcccctccctctttccacgacaccaaaagaaaccgaaaaccatcgacgcgctccgtccaccctcccctaccccgcgtcctcctcccctacgcctcccagcccagcggcaaaacctaaccctagatgggcgccgtcacctctacggtcgcggcgcgctttgcctttttcccgccgagcccgccgtcgtacgggttcgagcagccggcgccgcttccggcccctgccacacccgagcctccggccccggccacatccaagccgccgcctccggccccggccacacccaagccgccgccagcgggggaggagaagggcggtggcgcggtggtggagctcacgggcgtcccgcggagggttaacgtggaggcgcggcggctgcggacgaagcggggcacggaggtggtcgcgatgcacgtgcgccaggcgggggccaagctcacgctgctctactcccacggcaacgccgccgacctcggccagatgtacgagctcttcgtcgagctcagcgcccacctcaacgtcaacctcatggggtatgactattctggttatgggcaatctactgggaagcctagtgaacaaaacacttattctgacatagaagctgtatacagatgcctcatagaaacctatggagcttctgaggataatatcattctttatggacaatcagtgggcagtggtcctactttggatttagcatcccgattaactcgtttaagagcagttgttctacatagcccaattttgtctggcttaagagtgatgtatcctgtaaaacatacatactggtttgacatatacaagaacatcgacaaaattccattagtcaggtgtcctgtgttagtgatacatggtacagcagatgaggttgttgactgttcccatgggcggtcactgtgggaacttgctgaagtgaagtacgagccgctgtggatcaaaggcggaaaccactgcaacctagaactgtacccggaatacatcaaacatctgaagaagttcgttggagccatagagaaatcgccacccccacctccgatcgacgagtgcatggagagctcaggcccgtcggattgtaccccagcagaacccgagtgtacagcggactcaaggaagagcacggactgcagggacaaagcaaggccaagcatagatcagagacaaagcacggaccggcgggacaagccgaggggcagtacggataggagggacaagacgaggaagagcgtggaccatcccgagaagccgcgggctagcgtcgatcaaccggatcggccgaggaaaagcatcgaccggtaccgtttacccctactaacctggcacatgttttccgatcatcattaggatgcttttatgtattattgcccacgatcaacatgctaatgctttgttgatctctgtgatgaa

SEQ ID NO: 131428 - DNA, 950 bp, Zea Mays
atcggcccatcagtagttaaccaccaaccacgtagtaggccttacgggcctaatgtcgttggctggtcctttgccacgccatgaaaccaaagagcggcgtcgttgcgatccaagacggcaggcgagctccaggttcagttgttcggaggaagcccagcgccggcgatggcgagtgtaaaccccgcggtggcggaggcagaggcggaggcggtggggcggcgggacgagctgtcggagtcgctggctgagctcttcaccaacgtctccctcatggtccgcggcgagctccaggggactaacaatcagcttgctctgcttgagaagatgaatgatcgcgtatcacaggaatacagcaactacggtgacatcgccgctggtctgcgagtatttgtagagcagctgaatgagaaaaaccgaggcttcgaggattacgtgtcgcagattgatgcgatagatcaacaggtgactgagtttgaggcagtggtgtccatgctcgacaagcatgttgccctcttggaaaagaaagtaaaatcggcctatcacatttctactacccaatgatttccatccatatgccacaatgcagattcttttgccaacacttgagcttatccgggaaacatattattatatattctggctgaggaaacaacgctgtagctgtagctgtaggtgttcccaccgttgaaatgatgcaatcagattccaagttgtgctgtagtaactttcagacaaacaggcagcagttgggttttgtccctcacagtcacagtgtattattagtgttaggaaattgatgcatgggtgccgggatttgcggggcacaatcattgcctactgctccacaagaaacatgtcactgttgtgtgtgttgtaatttctggatcaatgggcgaactgcatcttgcagtgtacgcgcttgccaccaagattcctgcagattttcagcc

SEQ ID NO: 131429 - DNA, 2339 bp, Zea Mays
gtgagattgaaacggggccacagtctccaccgaactctgcagcagatccatcgctctcagccagaccacatatcgccctcgtcgttatctaggtcaccggtcgtgtgccgccgccgccgccgccgcccgacgctctccgtggataaggtcagtccggccacgcattttatttccgtccaagaaaggcagcgccgcaagcaaccggacaggagcagtcgaatccggcaagttaaaggaaacttaaaaagaaaagggaagtaaagaccgggcgcgtcactggcatcaatcggcatcaatcctcccctgcggaagggaaggaagccagaattgggacgcaacctgagctggaaagttgggccttttccttcgaaagggacggggccgcggcgaaccggggcggcaagatcgcccttggacagttcttggtaggcggagagagatattatatcatattctgatatcactcacctacccggtctgccgttcgcctataagaagaccggaggcgaggagggagctccctccctctgcaagtacaagttgtcctgtatttggtttagtttgcgctgctgtatttgttcagggttttggtcgcgtgttgaggaaagattcggggttcttgaaagttgagtgaaacaaatggggtcatcaaggaatgtgccgcacaaagtgatgcaagatgagatcacacctcttctcccgatcaaagctgaggaggatgcagttcatgagttcgacggagcttctttctctggcgcggtcttcaatctgtcaacaaccattgtaggagctggaatcatggctctgcctgcgagtatcaagatgctaggccttatacctggtattctaatgatcatccttgtggcactgctcaccgagacatccattgacatgctggtcaggtgcagccaccagggcaagattacatcctacggctggttgatgggtgacacatttggtcagtgggggagaattgcgctacaagcatcggtggtgataaacaatgtcggcgtgttgattgtatacatgattattattggtgatgtcctatcaggaacatcgtcaacaggtgttcatcacagtggcgtattggaggggtggtttggacctcatatgtggaattctcgtcccattgtactcctcgctacaactcttcttgtgtttgctccattggtgagctttaaacgtttggattcattgagatacacatctgcactatcagttgctcttgctgtggtttttgttgtcatcactgccggggttgctattgtcagactcatccaaggaactgtggagatccccaaactgtttcctgagatagatggagttagttctgtctggaaactgttcacagctgtgcctgttcttgtcactgcctacatctgccactacaatgttcacagcatcgataatgagctggaggacaaaactcagattaaaccaattgtgcaaacttctctgggactctgctcaagtgtttacattgcaacaagcttcttcgcatatctcctctttggcgaggctaccttggctgatgtgcttgccaatttcgactctgaccttcgcattccgttgagttctgccttcaatgacatagtgagagtgagctatgtcgtccatatcatgcttgtcttccctattgtattctttgcccttaggctcaacttggatggattactctttcccaccgcaaggcacatttccggtgacaacaagaggttcaccattatcaccatctcacttattgctgtaatttatcttgctgccatcttcataccaagcatctgggatgctttccaattcactggcgccacagctgctgtgcttatcggtttcatctttcctgccatgattatactaagggacccatatggtgtttcaaccaagcgtgacaaggttttggcggtaacaatgattgtgcttgctgtggtgtccaattgtgtggccctgtacagtgatgcgttcaacatcttctacaggaagcaggaggcctagagcccatacctcaggggaagagaacctctttgtacaggtcaagggtgattgttgagcttcaagtaagctactactgagcagcagtaccacgaatctcatggtggtcaatagtttttgtttggtcacttcgaagaaactttggtttgctgcgaatatttgtctagtttcctgaacataaactgcctccacatctggatgggaccacgtgtgctatgatcacccgtggaacaatttttttcttgtaatggatgattgaaatagctgtatataaatatataataatatgcaccgatgcagtagcaaactgaaacaggtactcacaaatataaagctggaactcacgt

SEQ ID NO: 131430 - DNA, 1479 bp, Zea Mays
gtgttgtagatggacaaggcgaccaagcttttgatttatggtgcttcagcacacatgttgttgtccatgatggccatggttattgagtctaggaaaagaaaaagagatagtagaagagtcgatacaatacacatgtgtgttgaggaacaagtggccatgtttttgaacacagtgggacacaaccttaggaataggttggtgggaacaaattatggtagatctggtgagactgatttcattggagctattgatggcacacatataagagcttcggtttccatagatatggaaccttcatttcatggtagaaagtcttatgcctctcaaaatgtaatgacggtcgttgattttgatcttcaattcacatatgtcttggctggttgggagggtccagcacatgatgctttagtactaagagatgctttagagagagagaatggccttcatgtaccacaaggtaaatataggaggttctaaagttgtacttatcaataatatttgttgtttttgtgcaagccttgtggctgaagggatcaggacatcaacaggcttcaagaaagttcaccttaacatgtgtgctaaggctctaaatgactatttcaagatgaatctcactgtagaacaagtgcagaaccatttgaggacatggaagagaagatatgcgaagataaacagacttaggaagttaagtgttgcttcttggaacgaagataactacatgctcactcttgatcatgaacattatgcaaactatgtgcaggatcacaaatctgatgctgagtttttaaacaagcctttggagaactataagtaaatgttcactgtctttggaaacaatatggctacaggaaagtatgcagaaggatcaagtgaagctctagggactgaagatggaaacagtatggctgaaacagagattgatgagggagatggtaatgttgttcctagtcctatagatgatattgggacttcatcctcaactcctagacctaggaagaaggcaaaggttactagtaatgaagaggcagggctgatttggagcattcaaagatggtgctaaaaggcttgcaatgactattgagaaagctggttcagatgacctaccacctgacttgcttcaaacattgcaaagtattccaggttttgatgacacacacaaggccttttactttgcatatctagtgaaaaatcctggattggtaagacagttccctactctcccattgacatatcagataagtttgcttgctcggttcgttagtgagacctttccttagattatgaggaccggtgattaggactatgctggaggttaagtggaaattagaactatgttgttcttttgttatgtaaaccatggccaatactttgttttcaagtattgggactgaaatactggctttgctatgtcgaaatactgggtttgttatgaccaacacggatgctcggtttgtttgttttgaaatactggttttgaga

SEQ ID NO: 131431 - DNA, 148 bp, Zea Mays
ggcgtaggcgcaggcgagcggccgtccagtcacgcgggcagcagggcacaggcgagaggccgtccaagcgagcggtcgaccaagcgctccaaccagcaccggcagcagcacggcaacaccgtccaggcgagcaaccgtccaagaacag

SEQ ID NO: 131432 - DNA, 1205 bp, Zea Mays
tattttttttggtatcaccgtcattttggttctgttaataaatattatatttttttcggtaatagtaaaaatggtgttcctttcaaatgaagacgcctggatccatgatgaagacatcatggatgatgttgattcagatgttgaagaatcagactcagaaggtgattcaggtgaagaagctcaggctaagcctgcagacaaagcgatatacaacaaggaggctattcttgaaaaacttgaagacatagcctggcccaagaatgtggactggatgcacaaactcactgttgagcatgatcaaggggagaaagttgatgtgaacgatgatcttgcccgcgaacttgcgttttacacccaagctttggatggcacaaggcaggcctttgagaagctgcagtcgatgaaggtccggttcctcagaccaacagattactacgctgagatggtgaagactgatgcacacatgcacaagatcaaggggaggttgttgtcagagaagaagaggattgaggaagctgaggagcggaggaaggctagggagtccaggaagaaagcaaaggaggttcaggctgagaagaagaaggagagggctaagcagaagaaggagcagattgagtcagtcaagaagtggagaaagcagagacaacaagggggattcacgaagggaaatgatgatgtgccagaccttaattttgaaggagaagaaggatttaaacaatcaaagaaaaagaggcccggtgtttctcctggtgacaggtctggtggtcttgctaagcgaggtaaaggaggaaagaacgggagggcaagggattccaagtttgggcatggtggtcgtaaagggctgaagaagcaaaacactgctgagaccacaaatgatttcagaggctttaaccaggggggtgagcctcaaaacaagaagagaaagaggttttgaaccttttgatggatattgtaacttgtaagaatttggatgtgtgccaaaaccagaattaaaagatgttcgaacttttgctgttattactattcttgttgcagcattattttgttatggcgtttgctagaagcaaaaaatatctaatgttagtctagggaatcagtcaaacacaagacttgatgatttgctttatctggttatggttttcttttatcgtggattgcagataaatcttacccccactgcaagtatactcgaagttgctgctgtt

SEQ ID NO: 131433 - DNA, 1335 bp, Zea Mays
accctaacctttccactgctccagcctccagcgaaggcacactgccggcgctctatcttccgctctctctcctactcgcgctcggcaaggcggcggcgccgctcaggctcgggctacggcgtcagcggcatcccctccgcctctcgccagtcgcctcgcgccctcgcctccggtcacaccggccggtgactctgctaaaaatggtgttcctttcaaatgaagacgcctggatccatgatgaagacatcatggatgatgttgattcagatgttgaagaatcagactcagaaggtgattcaggtgaagaagctcaggctaagcctgcagacaaagcgatatacaacaaggaggctattcttgaaaaacttgaagacatagcctggcccaagaatgtggactggatgcacaaactcactgttgagcatgatcaaggggagaaagttgatgtgaacgatgatcttgcccgcgaacttgcgttttacacccaagctttggatggcacaaggcaggcctttgagaagctgcagtcgatgaaggtccggttcctcagaccaacagattactacgctgagatggtgaagactgatgcacacatgcacaagatcaaggggaggttgttgtcagagaagaagaggattgaggaagctgaggagcggaggaaggctagggagtccaggaagaaagcaaaggaggttcaggctgagaagaagaaggagagggctaagcagaagaaggagcagattgagtcagtcaagaagtggagaaagcagagacaacaagggggattcacgaagggaaatgatgatgtgccagaccttaattttgaaggagaagaaggatttaaacaatcaaagaaaaagaggcccggtgtttctcctggtgacaggtctggtggtcttgctaagcgaggtaaaggaggaaagaacgggagggcaagggattccaagtttgggcatggtggtcgtaaagggctgaagaagcaaaacactgctgagaccacaaatgatttcagaggctttaaccaggggggtgagcctcaaaacaagaagagaaagaggttttgaaccttttgatggatattgtaacttgtaagaatttggatgtgtgccaaaaccagaattaaaagatgttcgaacttttgctgttattactattcttgttgcagcattattttgttatggcgtttgctagaagcaaaaaatatctaatgttagtctagggaatcagtcaaacacaagacttgatgatttgctttatctggttatggttttcttttatcgtggattgcagataaatcttacccccactgcaagtatactcgaagttgctgctgtt

SEQ ID NO: 131434 - DNA, 585 bp, Zea Mays
aattgcagtagaacaccacgtactgcctcttcccttctttctccacattgcaagccaccaagcctactccattcagagatgcaacaaaactgggcagccgatttagcttgcctccctggcttggacttgggcagccttttcctaccacagaatgacgatcctatgtatgatttcagcaccttcgacatggtcgatctcgacccatatccgtgcagctgcaatggcagcgttactactaccaccgtcagctcagtgtctgccgcggcggcggacaagcatcaggagaggcgtggcaacgacgtcgagaggaagaagagaaggttagcgtcgaaccgtgagtccgcgaggaggtcgcgcgtgaggaagcagaggcgcctgtacgaactctcattgcaggtcgccgagctcctgggcaccaaccagaggcttctggtcgagctcaaccatgtgaccgccaagtatgctctcctggctcgtgagaacgccaagctcagagaagaagctgctggcctgcagagaagactcagcgagatggaactgatgggagaggccgaagctgcagccctgagccctgaggtggcttag

SEQ ID NO: 131435 - DNA, 2455 bp, Zea Mays
cgcgccggagcggatcggcagttcaggagagcgctctgagtctgaggacgtacaggatggtggaggcgccagcgccgtcggatctgagcgcggcggcgcaggtgagcgcgctgtcgctgcaggtggatctcctgcagctgccgccggaggtgcccgcgccgggggcgcccgcgctgcgcggcgtcctcgaccacctcttcgcgcactggctctctctccccgaaactgccgcgcttctcgccagcctcgtgcacaaggccaaggctagcggcgccgcggcggcgggggcctcgatgctgccctccatgatgctgcaggggggagccgccgtgccgccgctctctccgaggtccccgcgcctctcgcggaggcccagcagcctaggctccggcccgccccaccgctccgcgtcgccgctccgcccgccagccgcgcgctccgccaaggaggtcataccgcagttttattttcaagatggacggccaccgccgtacgaggtgaggaagcaatgcatatcaaccgttgatcagctcttcgccggccactcaaatggtcttcgggctccagaatttcggatggttaccagggaactctgcaaactaccgacattctttactactgttctcttcgacaagatagacaaggagggcactggattcgtgacaagggaggccttcattgttttctgggtgaatagcaatttgatgagtatggatagtgcaacccaagtattcacaattctgaagcaacagaatcgcaattacctcgcaaaggaggatttcaaaccgattctgaaagaccttttggacaatcatcctggtttggagttcttaaagagcacacctgaatttcaggaaagatatgctgagactgtcgtgtatagaatattctattgcttgaatcgaattggaagtggacagctaacacttagggagctgaagcatggaaatctactcagtgcactcaggcatgctgatgatgaagaagatatcaataaagttttaaggtatttctcatatgagcatttctatgtgatatattgcaagttctgggagctggacaccgatcatgacttctttattgacaaagaaaatcttattaagtatggaaatcatgcattgacatataggattgtagatagaattttttcagaggttcctaggaaatttacaagcaaggttgaagggaaaatgggctacgaagattttgtccattttatattgtctgaagaggataaatcatcagcgccaagccaagaatattggttcaaatgtatagatttggacggcaatggcatacttacacatattgaactacagttcttctttgaggagcaacttcatcgcatggagtgcatggcccaggaacctgttctatttgaggacatcttgtgtcagctcattgatatgattggacctgaggttgcctttagtacttttgtgcatttccatgttatagacattttatgctgaatattatgcattaattttgttccagaatgatagctatttgacattgaaagacttccgaaggtgcaaactgtctggacatttctttaacattctttttaatctgaacaaatttatggcatttgaagctagggatccatttctcatccgtcaagtgagccgagttcctattcatgttataacacccattgataatctcatatgaactgtttgtcacttgtaacatctctgctttccccccaatcgaagtgcagatgcgtgaagagccatcattaacagactgggatcgttttgcacgaagagagtatgtaagattggcgatggaagaagatggtgaagatgcttccaatgctagtggagatgtttgggatgagtcacttgaatctcctttctagattgaaaaatacactgggaagacataccagatattcacatgcagccctaataatcaagtcaaagtcatgaacagttatttgatatattatctttacagaaactatagttgaggcagctgcatgcttgctggcaccatccaaattttgaccggaagcaaagacagataatcccacctagtttgctatggagtccattttgttcttggtgacagtgagaagttttgccacttgatccatgatatgatccagttttgctgctaaactacaacagattgattcatggcagcaacaagagaacagcatcttgtgattattccgaaggcacatccaaagcctagtgacaaataagaagatgagcagggtccttgcagcagatgcaatcatcatatgatggatagtgaatagttggcgtcataattttaattttcatagtgtctcgattaggtgtgtcaaaattttctttctttgttgtactttatttagcttgtagtcacatgaacaatgagctgaaataccatatcacaggtttattgtcattttcgtcacacactgctctatttgaagtgtaatacacaggtgttctgaggattc

SEQ ID NO: 131436 - DNA, 2268 bp, Zea Mays
cgcgccggagcggatcggcagttcaggagagcgctctgagtctgaggacgtacaggatggtggaggcgccagcgccgtcggatctgagcgcggcggcgcaggtgagcgcgctgtcgctgcaggtggatctcctgcagctgccgccggaggtgcccgcgccgggggcgcccgcgctgcgcggcgtcctcgaccacctcttcgcgcactggctctctctccccgaaactgccgcgcttctcgccagcctcgtgcacaaggccaaggctagcggcgccgcggcggcgggggcctcgatgctgccctccatgatgctgcaggggggagccgccgtgccgccgctctctccgaggtccccgcgcctctcgcggaggcccagcagcctaggctccggcccgccccaccgctccgcgtcgccgctccgcccgccagccgcgcgctccgccaaggaggtcataccgcagttttattttcaagatggacggccaccgccgtacgaggtgaggaagcaatgcatatcaaccgttgatcagctcttcgccggccactcaaatggtcttcgggctccagaatttcggatggttaccagggaactctgcaaactaccgacattctttactactgttctcttcgacaagatagacaaggagggcactggattcgtgacaagggaggccttcattgttttctgggtgaatagcaatttgatgagtatggatagtgcaacccaagtattcacaattctgaagcaacagaatcgcaattacctcgcaaaggaggatttcaaaccgattctgaaagaccttttggacaatcatcctggtttggagttcttaaagagcacacctgaatttcaggaaagatatgctgagactgtcgtgtatagaatattctattgcttgaatcgaattggaagtggacagctaacacttagggagctgaagcatggaaatctactcagtgcactcaggcatgctgatgatgaagaagatatcaataaagttttaaggtatttctcatatgagcatttctatgtgatatattgcaagttctgggagctggacaccgatcatgacttctttattgacaaagaaaatcttattaagtatggaaatcatgcattgacatataggattgtagatagaattttttcagaggttcctaggaaatttacaagcaaggttgaagggaaaatgggctacgaagattttgtccattttatattgtctgaagaggataaatcatcagcgccaagccaagaatattggttcaaatgtatagatttggacggcaatggcatacttacacatattgaactacagttcttctttgaggagcaacttcatcgcatggagtgcatggcccaggaacctgttctatttgaggacatcttgtgtcagctcattgatatgattggacctgagaatgatagctatttgacattgaaagacttccgaaggtgcaaactgtctggacatttctttaacattctttttaatctgaacaaatttatggcatttgaagctagggatccatttctcatccgtcaaatgcgtgaagagccatcattaacagactgggatcgttttgcacgaagagagtatgtaagattggcgatggaagaagatggtgaagatgcttccaatgctagtggagatgtttgggatgagtcacttgaatctcctttctagattgaaaaatacactgggaagacataccagatattcacatgcagccctaataatcaagtcaaagtcatgaacagttatttgatatattatctttacagaaactatagttgaggcagctgcatgcttgctggcaccatccaaattttgaccggaagcaaagacagataatcccacctagtttgctatggagtccattttgttcttggtgacagtgagaagttttgccacttgatccatgatatgatccagttttgctgctaaactacaacagattgattcatggcagcaacaagagaacagcatcttgtgattattccgaaggcacatccaaagcctagtgacaaataagaagatgagcagggtccttgcagcagatgcaatcatcatatgatggatagtgaatagttggcgtcataattttaattttcatagtgtctcgattaggtgtgtcaaaattttctttctttgttgtactttatttagcttgtagtcacatgaacaatgagctgaaataccatatcacaggtttattgtcattttcgtcacacactgctctatttgaagtgtaatacacaggtgt

SEQ ID NO: 131437 - DNA, 207 bp, Zea Mays
aaatcacatgtacacaaagatataggaaagcatcgaccactgaatgtccatctgtgggtttccttgtccggtctcagaatcctataaccaaataaaactatgcatgattataattgtaaattaaagtaaatatattacaaaactatacttgtctttcgttggtgtttggggtctgtccagattgtgacggacgggtgaactggggtc

SEQ ID NO: 131438 - DNA, 246 bp, Zea Mays
atggagaagagagcccggtggcctaggctaggggagctgcgggagaggtgctggctcacagccatgggagaagagctccctgcgtgcccaccatgggagacgaggaagagctcacggatgggggaggaagagggccagtgctccacagctagtttggggaaggagaggagaaatggcgtgagggagaagggagagggtgggctgccatttatagagcaaagctctagacatgttaggtggcagtga

SEQ ID NO: 131439 - DNA, 1214 bp, Zea Mays
ggcacttccttgagccgtcggaccacaagccttctctctccactcggcttcatcccatctccctgctgaattttttgccgtgcgcgctctgcgtcctcatctcgtaaccgcccgtggagtcttcaaatatccagtccctgcgccgcgcccctctgctgcttgctctggtgctgcgtgcgcgttctcccatggcgccggtccgtcctcctcttccagccgcgcccaggccctctccttcctccctcagcccctgcgctcagaattcctctgctcctcttcattctccagccggttccctgcgcacgtgctccagctccggctggatcttcctctggcggccgtcggtcggagctccctggccgcgctgcgccctgctccctttgtctcccctagcgcgcgagctcttgggtgcgcgcctggatccctgctgagctcggttccatggccgcgatccagctcgcccagccccagccgttcctcctcctgtagctcgcccctgcgcgtgcgtcttctcgcgtcgtccctgcgtcacgcgcgcgttccttcctgtgcgcgccagcagccgcgtctctctggtgtttcctccctgcgcgcatgaaatttccttgctcgctggggcgcttgatccgtgctccactgtgccgtattgtttatctgcacgcgtcaagttcccacgccgagttcgcccgagtcgcagacctgtgtgtcctcatcgcgcctactgctcgtcgggtcaagccccatgttgccgtgccgcgtcgtcatcacttcctgtcgcgagcttgatccttgttgtcatcgggttttgtgcgtgctcgcgtttgccgtcgagtcattgaacccatcatcccctgctcaaccctaccccgccagctcgctcgagacacaatctcatcgtcgtcccgcgcgtcatcaagaatcccaagaatcgggtgaagacgaagctagtagcgcgatattccccaaacactcgacaattgactggatcagaaaatcactaccgatctcgcggattcgagtcggctattgaaacggtgcgataattaatcacgtgatgcggaagatgactcaagtcgaccccaagcgcgggctaacccgcgggatgatgttgatggacggaaccgaagatggaaaatctagcgaatgtcaagacagaagatggtcgtcaagcggacgtcgtctaacaaacactaacgtagtgtttattccaggca

SEQ ID NO: 131440 - DNA, 112 bp, Zea Mays
atgttaataacgggtgaaaacgcatctgaaattcaccaaatcaaatcattctcaaatattactgtcgatcttattttggttcgatcttttatatattttcagatcaaaatat

SEQ ID NO: 131441 - DNA, 586 bp, Zea Mays
aacttaatcaataattagataactaaatagaagccctttttacttaacgtctattagaagattagaaggcatgtttattttaggaagagtaatttcaaaggtaggaaaggtcctcattataagtgttacacagccacaacactttggtggtggacagcagcaacgtccagaggcggcaactacctaccaagaattcctcagcaaccagttgccactattcaccagggccaaagattcgctttttggtggaactgcccagattattccagcttaagtgcccaagtctcgccttagaggcaatgactcacttaaatcggaataaactatcaatccctcggatctagtccgataaagcaatttaccaagcatcgaatgctactagctcactcgaaggtgaggcacaaagaaatacaataaagcataataccacaaatttaagtatcaattgtgattacattatcagagtttaagaaacaaatcatagattttgatgcagcggaaataattaacggagaaaaccgagtaacatggcgaagcctagccacgctactcctcctagtccttccctgcaaaggtagcaacccac

SEQ ID NO: 131442 - DNA, 1373 bp, Zea Mays
ggatctcactcaaacttcggtggtgctgtttcgagtgcggagttcgaagcgatgcaacaacaaattactcaattgatacagcaactacaggtgcttcagcatgatctacgccatgcacctaacatggaggatcaacctgacaatgaagaacatgtggaagatgatgatcatgctgccttggaggcagaggcagcacgttgtgctgctgttggaggtggtggccgaggacgtggtgctacaggttttgatggtgatcctaattctggttatcaaaatggccatcgagcaggttatcatggccgccgtggtggttacgatgatcgtggaggtggtcactttggtggttttggtgaccaccaatttgctggtgatgatggccaccgtgatcagcgtcgtggtgatccagaacgccgacgaggtgaagatggtctgggcaaagttaaagtgtccatacctgcatttaacggcaaggaaaatgctgattcttattatgagtgggagacaaaggtggaacaaatatttgatttgtatgagtaccctgctgagaagaaggcaaagttggcaacccttgaattcaaaggttatgccatcacatggtggaatcaaatccatgcagaatatcatcgtgtgggacaagatcgtatcacttgggaagacatgaaaagggaaatgagacgtcgttttgttcctgcatattattctcgtgacttacatttgcggctcaaacgccttgtgcaaggtactcgcagtgttgatgaatattttcaagaaatggagatgtgcctactctgtacgggaattactgaggatgaggaatctacactggctcgattcttggttggccttaataaacccatcgctgataaagtggacatgacgaactacacaaatctaacagaattggttcattttgctaaaagggcagaacgacagcttgctggatcttataaaagccatgtttctttttcagcacaaaatagttctactccatggcgcaattcacaacagcaaggctcgagggcacacacgccttcatctcatgcagcttctacaccatctcgtgcaacccctcgctcagtttcagcttctggaaagcaatctgatgggaaaggcaaagctatgagttctaatcagtacaactcctctactgcagcagccaaaaaaagacaagtaatattgagtgttttaagcgtggtggtcatgggcataagcaagctgaatgccccaatcggcatgttattctagcacttgcagatggttcgtatgattcacaaagtgaggaggaggatgtaacccatgacaccaatatacatgatgaaaatttggaaacttttgagtatgaagcagaggatggtgaatgcgaattgggcctg

SEQ ID NO: 131443 - DNA, 99 bp, Zea Mays
atggtgcagaccaacctctccatcgacaagattaatgccatgcttaaggcattcgaccatacgagaggcgttatccttataccggttcatgtagcatga

SEQ ID NO: 131444 - DNA, 2908 bp, Zea Mays
atggaattagcttcaatccccctgaaccgggccctgaccgttcgcctcctcggttgcttgttttttctcccccttcccacctccgcgagatctgacggctcggcctccaatggcgcccttctccctgtaaacctagctgctctacctacccgcacccccaccccgtggagagcaagtgcagccatggcggcggatcgggagaaggagcgcgaggcggagctggagggcgccatgtacactaactgcctactcctcggcctcgatcccgcggtcctcggctctccctcttcccccgccggccgcgtgggcctatttcgtcactccaacccccgccttggcgagcaactcctctacttccttctctcctcgctccgcggccccgcgcagtccgcgaaggattttgacaaggtctggccaatcttcgactccgctcagtccagggagttcaggaagatcgtgcaagggatcatcagcgagctggaacagcatggggcactgcctcggagcaattctagggtctcgtcacttgccacatgctgcggaccgagatttgttgagcttttgtggcaactatctgtacatgccctgagagaagtccacaagagaacatttgcagctgatgttgtatcaaatccactacctgcagcactaacagatgtttcttatcttcatgctgcttctttactcccagtaaccaaggcaagaatagctctggagaggcgtaaatttcttaaaaatgcaaacatagctgttcagaggcaaatgacatggtcaaatttggcccatgagatgacagctgagttccgaagtctatgtgctgaagaggcttatttgcaacaagagttagagaaactacaagatatgagaaacaaagcaaaactggaaggcgaactctgggacgaacggctctcaggctcatctgggcagaactctcatttggtttctaaggcaactcgtctttgggaatcaatattggctcgcaaaggccagcacgaggttttagcttctggaccaattgaagatcttatagcacatcgggagcacagataccggatatcaggatcacagttactagcagcaatggatatgagttcaagtgttccacattctgagttactatcatctaaagctggtgaaacttctataattttggagaagcaggaagaattttctcagctattccaagaaaaggaagaagcccttacaaggtcagatgataggaatggacgtactcagcaaactgttgatgtagctgaaattcttcgccgctggacccatgctttacaacgtattcataaacaatctcttcatttggccaaagcgaatgatggagaggggcctgaattactgaggagtgcatccagcggagaggccagtactcattctgattcgttaactgcaacattagctgaacatcgccagcatttagtcagtatacagggtctaattaatcaactcaaggaggctattccagcaatgcagcagtctatagacgaactctcagaagaagtgaatagtgtatctattaactcaatggaccaattgaactcgaggctgccactgccagtacaaattgcagggtttggaacatcagaagaaagcagcagtgaagtttcggagatcaattctaagctctcttctacacacttggataagcctgggggcagtcctgctctaaagctaccaccattatttagtctgactccaagttcttctggaaaaggaatacagacacaaaaacggagtgcattggctcgtcaacgtagccaggacatcacatcagaacagaaaacgcttaccatcccctcaactaaggatcaaatgaatggttcaatgcacgaaaatgatgactattctgctcatgacattagacgttctgttcgtgaagctgctttatctaagccattgaagaatacagagagaccacaagataaaaatagtgatgatggttcggaacacttctttattccgctgtcaattagtgctgcgaagaaggaaatggattcggtggcaaatcgatgtaaccaaagattaggtttgtcacctcagatgaagttcccaaagagcacaagctacaatgcagataccccaatcaacaaaagtccaattctgttaagtgaactcaatggacatgattcgatcagtgccatgagtttccttgacccggctggtggtctggcacatcagtcctttatcactgatgatgctctggatcaagtattctctcctctattgatggaatcttcgttgttccatgatgcagatgaggatctacttgcacccttgtcagagactgatgcagcattaatggaatattaagcttcacatgtgcactatgtaatattttgaccactgcagacgcagcctggaggttattgtggcttatgtttgtcttattgactattcggctagttgcttgcgagttgcaaccatgttgagatacagatgcttcatcagaatttgtggggtatatgttgactattgatgcggggagaggtgatattgatgctgttttttccccttctggacaaggctctataggtgccggcgttgtaccaactgtagtggacgcaataggaaagcccaatcttgtatatttagttactatacatcagcagtatttgtgctgtaatactttttcgaattgctgaaatatgtgtttttctgctagttgcgtcctcctgagttttctcagtttcagtgtacgaaattgcaaatcacgaatctaatgaggttaagccaacggggactgtgttcagagttagatcgtatatggttacccaaaacactgtactgttgtacattgtatattgtaccgtttgtaaagtgaagtttgaatataaagatggatgtaggtaaactgctagggatagttttagcaatggtcactagaatagggtttctaggg

SEQ ID NO: 131445 - DNA, 2625 bp, Zea Mays
atggaattagcttcaatccccctgaaccgggccctgaccgttcgcctcctcggttgcttgttttttctcccccttcccacctccgcgagatctgacggctcggcctccaatggcgcccttctccctgtaaacctagctgctctacctacccgcacccccaccccgtggagagcaagtgcagccatggcggcggatcgggagaaggagcgcgaggcggagctggagggcgccatgtacactaactgcctactcctcggcctcgatcccgcggtcctcggctctccctcttcccccgccggccgcgtgggcctatttcgtcactccaacccccgccttggcgagcaactcctctacttccttctctcctcgctccgcggccccgcgcagtccgcgaaggattttgacaaggtctggccaatcttcgactccgctcagtccagggagttcaggaagatcgtgcaagggatcatcagcgagctggaacagcatggggcactgcctcggagcaattctagggtctcgtcacttgccacatgctgcggaccgagatttgttgagcttttgtggcaactatctgtacatgccctgagagaagtccacaagagaacatttgcagctgatgttgtatcaaatccactacctgcagcactaacagatgtttcttatcttcatgctgcttctttactcccagtaaccaaggcaagaatagctctggagaggcgtaaatttcttaaaaatgcaaacatagctgttcagaggcaaatgacatggtcaaatttggcccatgagatgacagctgagttccgaagtctatgtgctgaagaggcttatttgcaacaagagttagagaaactacaagatatgagaaacaaagcaaaactggaaggcgaactctgggacgaacggctctcaggctcatctgggcagaactctcatttggtttctaaggcaactcgtctttgggaatcaatattggctcgcaaaggccagcacgaggttttagcttctggaccaattgaagatcttatagcacatcgggagcacagataccggatatcaggatcacagttactagcagcaatggatatgagttcaagtgttccacattctgagttactatcatctaaagctggtgaaacttctataattttggagaagcaggaagaattttctcagctattccaagaaaaggaagaagcccttacaaggtcagatgataggaatggacgtactcagcaaactgttgatgtagctgaaattcttcgccgctggacccatgctttacaacgtattcataaacaatctcttcatttggccaaagcgaatgatggagaggggcctgaattactgaggagtgcatccagcggagaggccagtactcattctgattcgttaactgcaacattagctgaacatcgccagcatttagtcagtatacagggtctaattaatcaactcaaggaggctattccagcaatgcagcagtctatagacgaactctcagaagaagtgaatagtgtatctattaactcaatggaccaattgaactcgaggctgccactgccagtacaaattgcagggtttggaacatcagaagaaagcagcagtgaagtttcggagatcaattctaagctctcttctacacacttggataagcctgggggcagtcctgctctaaagctaccaccattatttagtctgactccaagttcttctggaaaaggaatacagacacaaaaacggagtgcattggctcgtcaacgtagccaggacatcacatcagaacagaaaacgcttaccatcccctcaactaaggatcaaatgaatggttcaatgcacgaaaatgatgactattctgctcatgacattagacgttctgttcgtgaagctgctttatctaagccattgaagaatacagagagaccacaagataaaaatagtgatgatggttcggaacacttctttattccgctgtcaattagtgctgcgaagaaggaaatggattcggtggcaaatcgatgtaaccaaagattaggtttgtcacctcagatgaagttcccaaagagcacaagctacaatgcagataccccaatcaacaaaagtccaattctgttaagtgaactcaatggacatgattcgatcagtgccatgagtttccttgacccggctggtggtctggcacatcagtcctttatcactgatgatgctctggatcaagtattctctcctctattgatggaatcttcgttgttccatgatgcagatgaggatctacttgacgcagcctggaggttattgtggcttatgtttgtcttattgactattcggctagttgcttgcgagttgcaaccatgttgagatacagatgcttcatcagaatttgtggggtatatgttgactattgatgcggggagaggtgatattgatgctgttttttccccttctggacaaggctctataggtgccggcgttgtaccaactgtagtggacgcaataggaaagcccaatcttgtatatttagttactatacatcagcagtatttgtgctgtaatactttttcgaattgctgaaatatgtgtttttctgctagttgcgtcctcctgagttttctcagtttcagtgta

SEQ ID NO: 131446 - DNA, 639 bp, Zea Mays
cggtcgacctggagcaaaagcggcgggtgtgcgctgcttggattgcagccattaagagagagaaacaagggtagaaggacgtgggtccattcgcgggtgagaattgagctcgtccgcaaccttcacgcagtgccagacaatggtgcatccttgcactacgcgaggactcgcccacggggtcactgtgtcggagaccgggtgcctcgttgtcgacgtcaagagatccggcgcgccaccagtctccgtggacaactacactggtgcctcgaaaacgaataagtgaagaccagtcgaacaactttcttatagggtggtggacctgatcccatacaaaaagtgcagaaatagttgctcaaagattggattgtcaggttggttaataactgaattttaattcagttctgaaccctgaatggcagcaagttgcccagtttggatctctatgataattaatctatggagattttggttacgagttctgtagtaaagtcaaagtccatatgaaggggaacaacttttatgcaaaggattgacttgttactgtgtgtaatctagagaaaaaggggtgacaaaactctctgtcagacctagtattgtgctgtttaataaatccgaaactgaattttgagtgttttgctt

SEQ ID NO: 131447 - DNA, 255 bp, Zea Mays
atgtatccccaaggcccggatggggaacgagatgtctcgcattgccttgtgcctgccactctcgccggcaacgacacgcgcgaggcgaatgaggtcaccgccacggaggttcatgtggaggaagacaccgcgcggagggacgctgccctcgtcatgcagactacacccaatatggacgagtctcgcaccgagggagatccggacccaactggaagtggaagcggcatcttggggccaagcgccgccgaaagatag

SEQ ID NO: 131448 - DNA, 903 bp, Zea Mays
attgccgtctagcatgaacacctcggtaattcttccatcatctgcagataaagctgcaatgggaccaagacgcctcctctccccttcctcccacatgtctccaatcaccctccacttaccactccatagtcccaacgccaccgcgtcccgacagtacacgtcatttggcaccactcctcccaacgtggtgtatccatcatagccgcccatcacccagaactcatcctcaccaccatcccctgctccgcgtgccaggaacccaacacacccagcccgatcacgaggcatcgaggcaccaaggtgccacgagtgcgtggtggcatcataccactcggtgctgccggtgcggctgccgttggaggggaacatggggtgtcgggacccgccaccggcgacgaggagcccgccagcactgggcgcgtgggcacacgcgaagcttccccgcgggagctgcatgtcgggaaggcgttcccagcaatgtcgagagttggcaaggtcaagccggtagaccgccgccgaggcggagggttgccccaaagggtagctgcgggcgtcgaagcaagacccgccgaggacgtagaggtggcggccaacggcgagggcggtaaagttggcgaggccgtaaagctgcggcgaacaggggagcggcgggaggggccaccaggtggtaggtgcggcggggtcgagcaggatcggggaggcgagggatgggtcggtggggaagaggcagagaaggtggcggcgcgggagacggaggctacggcggagcgggaggagcgtagccgcagagaggagcaagcaccaagcgcgcgaggtggcgcggaggcgggactggtcggggaaggtgagcaggcagagaatgacagctgcaacgtcgtccgggagccccgggattagcgacgc

SEQ ID NO: 131449 - DNA, 554 bp, Zea Mays
gacgcaataataacaggctggtacaattcatatcttgttagcagcaatcacattcagcaccaaaaaacaccaattcttgcgatatactccagaatgttatctctactgtatataaacacgctagaacaaactatctgctgggagcacttgaagcattaggcattttcatgtctatatttgcaatcgattgttgcgcttgccacctgaatatgtacagttaatggtgactactaatggatctacaactcaactgtacacagagctgcagtcctgaaatcaatgggtgcatcaacaggtggatacgtggtgagcactctccatttctttgccccagggttgtacacctgaaactccatagccagcttcttcttcagctgcctccacggaccagaggattcaacacgaacttttgcagatctgagcacgtacagttccccgttcattggtacgaagccgcaagattcagtgtttgggatctttcttctcgtggttgcctctttcagccacctatttgaagcgaagtcatacctaaacagtcatgtagagaacacaag

SEQ ID NO: 131450 - DNA, 471 bp, Zea Mays
tggcgcaggccgacctcccggaagagcacgagcgccttggccagcgacatggtctcgaccaccgtgtacggcgacgtgttggtgaaggggtgcaggtcgacgtacatctccatctcctccggcgacagcaccacgtcggcgatggtatcctgcttcccggacccgcgcttgtcgaagtcctccgcctggaacctctcggccacgtactcctttgggcaccgctccggcgccaccaggaactccctcttcttgagcagcaccagcaggtgcgcgcgcagcaccaggccgtagagcaccggcgccggcgaaaagggcggctcgtccacgacggggaacgcgtggtgccccgtggtgcggagcgtgtgcacgacgttgccgaccttctccacgccgccgaagctccgcagcggcccggccaccacgtcgccgacggccagctgccgcatgtacggctcagcgtggccatcgagg

SEQ ID NO: 131451 - DNA, 948 bp, Zea Mays
tcgcgattaatatccatcccatctattcaccgaattaattagtaggagtagcgagccagagtactattaccaaattgattagaaatccgtggaagcagcaacaacaattggctcaggcccttcaccaaatacttgtcgagcagaggttgacgggatcgcggatgaaaagcgacaacgaactccgggttcaagccattcgtcgagcaccggcggcggtcgatggcgagcacatgaacagcgatgacttcctggttcgagctgccgggccaagctcagcagggagcagggactagacgatggcgtgctgatgaaggtgatagtggtcgccgaagttgaagagtgacggacccgatgagaccgcggttacaggcaaattcgacgacattttaaaatatggcgagcccaacaagccccacaacgagctgagagcagcgctcgacgacctggtggaataggattttgtcgcgaccagagggaataaggatggtgcagcgtaggagaggcgaactatcagcgacgatggtgtgtcaaggctacacagatcgacgacacggggcaggactgagtagatcgggacgtcgcaagcgacgcggagattgcggggccgctgcggcacaggggaacgacgcccggcagcggagctcgcgcgcgtggccatggaagttgaggcgaggttggccggcgagctccggcgagggaggaagcatcgccagtgcatgcaggacaacgtccacgacaaggttaaaggttcgggcgttcaccagaggacggcggcaagctgaaaggtggcgtgagccagatgccggacgcggagttgaaggctctaccatgcacggcgagctgctggaggtgcatgagcaagcacggtcgacggggacagcacccaggcgtgacttcaacgaggaccgagcgcaggggcacgatgggactgaggacgagctcgagtag

SEQ ID NO: 131452 - DNA, 264 bp, Zea Mays
atggcggtgaacgtcggcaccatcgagtacaccaacgatcgcaatgctattgatgccatcgccctcaagatacctccaaagatgcaaggggcgatcgcgagcaaggcaaccgccaagatcgcatgggacccacttaaggaaacaaacatcgatgtggaccaagtgcaccaaacaaaggcaaagacgctacgacgcaagttaaactcgttaagttcaaaaatggtgaacatgttaacgacttcagcatgcgcatcacggacctag

SEQ ID NO: 131453 - DNA, 205 bp, Zea Mays
ggcgaacgggcgttcgagttttggtctttttttttgaatttttttttttttttttttttttttttttttttttttctttttttttttttttttttttttttttttttttttttttttttttttgttttaaaaaaaaaaaaaaaaatatatatttaaattttttttatttatttaatatgtaaacccgtgtattccatctgcctcg

SEQ ID NO: 131454 - DNA, 1387 bp, Zea Mays
ctagagccattatcccatcgcgtgctcccctcctctgcctccatggccatcgaccctccccttccattgaggtcacgcctctgctcatcctcgctactccccagaacctgccgatggccaccgctccaagtcctctgctcgccgtcgcctatggctgcctcctctgcctccgatccgtggcaacatcgtgggctcgccctagcccggtagctgtcggttgtcgtcgccctacccctctgcacgccggcgccctctcctggagctcaccccgccagccgcgcccggtgctcctccaccaagcctcgccggggtgctcttcatggcgcgcctctgctcgccgtgaagctctatctgctccagttcgcgcccctgtctacttgcccgaacctccgacctcgcccatccatggagctcgctctagactccagctcgccttagctccctctgccagatcggccatggcgagtcccttccgtcgttcccctgcgcgtgcgtagggcgtgtctcccagctgtcagctcggctccaccagcacgtacaccgacgaccgctgctctccaggccaccagatcctgcgctcacctcggcattgaccccgttgttgtcttccaatttcagcagctctgcctcagccctatgtcgacctcgctgaccaaccatggttaaagacaccccaccatcaatccatgccttcgtgccgtgggtgatgctgttactaggcgtcactacaggttgtgttcgcgatcccgtcagcctttgctcgctgtccgcatcttgtgttcgtatcagtgagattctgttctagctccgtcgttttgtcacccgacgagatttccgtgtgttgattatgtgtatatgtgtatttgtgcgtgatgaggagaataatcctaggattatggggaaaggaaagctccagcgcatcagccatcaggtgttctgtgatttgggtgaatcgacggtcgtcgtcgttcttgctaataccaaatcgaactgtgatgtagtaagctgatttgatgagtgaattggctagatgtattggtctcattgattctcgtcgatgcgctgtgtggtggtgtccagtttctttgtggtatatatatgatgttctgtggccagggtttgtggtttggtcgtgtttgcctggggatagcagacatgttgtttgatgattaagtttttgttgtgacgcaaattatgcataatgtgtttgctaaaacacactgtctcatgtaatgttatgtggtatgtatacatgtgaagtaatcgcatcgtttagtagagtttagattaatatgcaaattatgtacagtgtgattgaaatggtaaagatataggcgatgtgtgcttttggttgaattaataacacaaaagatagatttagtatttc

SEQ ID NO: 131455 - DNA, 99 bp, Zea Mays
cttatttatatattttattctaccttatttgtttagtggtgttttctcttttctcaattttcaagaattcccttttaaagcttaaatacccctttttgg

SEQ ID NO: 131456 - DNA, 294 bp, Zea Mays
atggcgccactccttgccgggatcttgctcgcctgcgtgctcggctccaggtgcagcgcccctctccatcccctccccttcttcttcctcaagcaagcagccgctcccatatcccagcagctcgacccctcgagctcctctctctctgcaaccaccatctccaagtcggccatgggatcttcgtcttcccaagtgcccagcctccccaactcggcaaccctcaagcacacaggaccacggcgcctctgctctcccatccaggcgccccttcccctagcaaatccatggcgctag

SEQ ID NO: 131457 - DNA, 122 bp, Zea Mays
gatgcaagtccactttcaatatatctctgtataaagcggtaaggaaaaagttttaataaaaagaagaatcaatggattcatgattaaacccctcctacttcttgtattttcatacaattttg

SEQ ID NO: 131458 - DNA, 101 bp, Zea Mays
cgacttattatctctatatcatcattcatatctatctatcaagtgtattctaaagatttctcgaagtttgaaccaaatactcacataaacaaaaaaacaaa

SEQ ID NO: 131459 - DNA, 97 bp, Zea Mays
aaacagaagaaggaagcacagagaagggtacaacatgttggagtacaaggacccttcatcagatccaagtgatctcatattccaataccttctctca

SEQ ID NO: 131460 - DNA, 1004 bp, Zea Mays
gtttcaattttttatcactgtttctccctgaaagaggtggaagggggccatttcgatgctcaaattacagacattgcaacagatcttctcgaaaatttcgcgatcactcattcatgatctcgaatttcaggactaaagaggaagaaatccctatataccatattttgtctgagtatggtatgattatattggactaccctggccactatgagggatgtccactcctcaccatggaaatgatccacttcatcttgaagtctagcgaaagctggctttccttgggtcagcataacttactactaatgcactgtgaacgagggagctagcctattttggctttcatgttagctgctcttctaattaacctagggcattattccgacgaggagaaagtgttggatatggtttacaagcaatcgtctttggagcttttggagatgatttcacctctaaatcccatgccttctcaaatgagatatttgcgctttatctcgacgaggaaggtcatgcatgagtggcctccagctgatagagccctcacattagattgagttattttgaggatggttccaaattttcatggccctccaatattcaagatatacgacctagatccactcatgccccctgattagactccaaaagttcttttttcaactccaaagaaaagcaaccttgtccatttttattcataggcagatgagctgatgaaaatagaccttcaatttcatgtccaaggtgatattgtcctagagtgtatccatttgtatgaggatctggatcgtgaagagatggttttccaaatcatgttcaatacagcatgcatccgatcaaacatcttgatgcttaactgtgatcacatagacatgttatggaatggaaaataccaattccctaaagattttcggtttgaggttatctttttcgatatggatgtagtcacttcacatgtcacaatagagcctgttattcatcaagagaaacaaggacctcctttcaaataa

SEQ ID NO: 131461 - DNA, 1161 bp, Zea Mays
atgcatgcaaatgaaataagatctttaattattaaagttgttgctctagctgctgctacattttattatattttgattgtgaggaggaagatgaaatggaaacgggtttcatatgccccaatgattgatatggaagtgaaacgaaatgactacctttctagtatttaccataaagatgacacgagttgtttgcgcatgctaagattgaggagagcaccattctttttgttgtgtgatacactgaaacaaagaggccttctttctgatagtatccattgttgtgttgaggaacaagtagcgatgttccttcacacaattggccacaacaagaggaatgttgttgtagggaaaaatttcaagagatcaggggaaactgtctgtcgctactttaagttagtactgcgtgctatcggtgaacttcgtgatgaccttattaggcctccatctcttgaaacttcagccaaaatccttggaagtcctcgatggtatccttactttgagaactgtattggtgcaattgatggtacacacatacgagctagtgtccccatgtctcgtgaggctgctttttgaggtagaaagagtttcacaacccaaaatgtgatggccgcggtagactttgaccttcgcttcacatatgtgctagctggttgggagggttcggcacatgatggcatcattctagccgatgccttacaaaggcaaaatggtcttgtcatccctaaaggaaaagattacctggttgattgtgcttatggtgcaaaaccggggttcttaccaccttttcgcggtgtctaataccacttaaaagagtggggtaatgataacaggccataaaatgagaaggaattataatttaaggcattcacaactatgggtcactgttgagcgtgcctttggatccctgaagaaccattttaagtttttgatgatggtagacctttctttcctttcaaaacacaagtagatgttgtccttgcatgttgcatcctccacaattggatattatcgcatggggcagattgttttctcccacctgaggaagcatggacaacaaaccaaccttctagttcaacaagttcccatcaggatcaagtacaagaaaacagataatgggttcaatggaggcagcaacttgcaaattggatgtgggaaactaga

SEQ ID NO: 131462 - DNA, 169 bp, Zea Mays
gcagtatgtccattttctccaacgcaagtactctctgaactcattcaatctcctgggccacactgctccagcccaagctgggtcactcctgctagtgggaccatttgcagattacttgttgacaggcaaaagggtggaccacttcagtttctcatcacttgctctgtaa

SEQ ID NO: 131463 - DNA, 1524 bp, Zea Mays
catgttcttgaccctgccaacaccgcacgttgcaggttctgacatacagtttctgaggtcgcctcccactccatttaagcacccgcgccctcctcactcctccgcacgccacattgatcgatcgaacgatctatcagaagttcagaatctatctctctgctcctggttcaccattgcgcaaattggagcaagatgggaaggctagccctggctgtgccggtgatgcttctgctgctttgcacgacgtgcagactgacgctcggaattacagacggtctgctcccgaacggcaacttcgagcggagcccgctgccgtcgcagctgcgggggacccgggtggtgggcgcgtcggcgatcccgtcgtggcagacgtcggggttcgtggagtacatctcgtcggggcagaagcagggtgacatggtgctggtggtgcccgagggcgcctacgccgtgcggctcgggaacgaggcgtccatccggcagcggctccggggcgccgcccgcggcgcgcgctactcgctcacgttcagcgcggcgcggacgtgcgcgcaggcggagcagctgaacgtttctgcgtcggggcagtcgggcctgctggccatgcagaccatgtacagcagcaacgggtgggactcgtacgcctgggcctgggtcgccaacgccgacgaggtcgacatcgtcatccacaaccccggcgtcaccgaggaccccgcctgcggcccgctcatcgattccgtcgccatcaagacgctcaacccgcctcgtcgcaccaacaagaacttggtcaagaatggtgacttcgaggagggcccgtacatcatcccggggaccaagtggggcgtgctgatcccatcgcgcgtggtggaggaccattcgccgcttccggggtggatggtggagtcgctcaaggccatcaagtacatcgacggcgagagcttcgccgtgccgcggggtcggcgcgccgtggagctgctggccgggagggagagcgcgatcgcgcaggtcatccgcaccgtgccggggcgacagtacgtgctgtccttcaccatcggcgacgccagtaacgcctgccgcggctcgctcatggtggaggcatacgcgggccgggagtccaccaaggtggcgtacgagtcggcggggaagggcggcgtgaagcgcgccgtgctgccgttccgcgccgcgtcggcgcgcaccaggctcgtcttcttcagctccttctacagcaccaggagcgacgacctcagctcgctatgcgggccagtgcttgatgacgtcgtcgtcgtcagcgtgcgcacgaagcgcggctagagaagcgtgctctgtggagttggggcgtgccctgtgcgtgcgaaacggaggaatttttcatgctgctgtcatcgcacgggtactttactaccgtgtttgtaggtgctcgttgggggcatcagaaaattgctccaaccatcggaaatttgttgtgttagattattgacagtctgtttggttagcagcgcggcatgatccagagtgatccggacctgt

SEQ ID NO: 131464 - DNA, 1683 bp, Zea Mays
ggagccaccgtcttccttctcccaacagccgcacgctccctctccatttttctctccagccatggcgaatctctgctcatatcccgcgcgcgcttactccccatggccgccgcgcgccgcgcgcactgctccctagagcccaccgtgcctagcctctgctcggatccgagctgtcttcgccatccgcgcgccccctgtttctccttggccagagctttgtcctttctccctctcccatggccgagcgcctttggtgttttccctgtgcgctcctctgccggtgcccacctccatggacgcgcgcagcttccttaaatcatttccatggccggcatttctccctgttttccccagggtctgctccctctgctcaccatggctgaccacgcgactcctctgtgcgcgccctgccttttccccgcgcgcagctcgccccaacgtcgagctcggccctatcctctgctcaagcttggtccctgcttttctccctctctgctcggcctctgctcatccggcaccgtggagtctctgcgcacgtgtcgcgcgctctagcggctgcaacttgccgtgctcccctgcgtgtcgcgcgtccctcccatggctgccttgggacctactgtcgacccttcggcgttgtctcctctggcggcttgcgcttgaaatttcgccgtgcgccacgatgagcttgtcgtagaacctgcctagtcgctgcgtgtgtttgtgtccgagcccgcccggccgcaacctcgcattgctcctcgcgtcgatgctcaccgagtccttcctcagtccgcgctctctcccagcccatcgtcgtgtcgttcgtcatcgcgtcgtgtgtgcagcaacgtcgctaattcctccatgatgcttgtcaacgaacctcgcttcatcgattcctcgccttcggttcggctcatgtatgcacgccgaatgcgttcgccgcttgaccctgtgtcgctagagctcgtaacctcgctgtcgtcaaagtcctcactgtattcatgttctagccagagctcgcgttaacctgctcgaccacacctcaccagctcgctcctgactcgatctcgtcgtcgttccgtgcgtcatcaagaaatcccaagaatcgggtgaagacaaagcttgacaaagtgctcgacaaaagctcgaacaagtcgtcgatcgccatcctcatctacgcccaagatccacaaagattacgcgtagaaggaaataaatcagtacgcgaccggagaattctcgatgtggatgaagatgaagcgcgattcgacgcagcactcaccctatttttggtgaaatgctgagctgaaaggcgtcgtcgatttcatgatttcaagtcagatttaattgatggtacacttattaatcacgagatgtggaggacaagagccaagtcaaccccaagacgacgtaacgggtggactactctacatagtgaagctgatggacgagtctgaagaggggcagactgaacaagtgccaacaccaaaggttgatcgtgaagtaatcatcgtctaacaacactaacctagtgttacccaggcaagccccggtgtatttgtcacctccttgctgttttaaaatctttatcaccttgtttgatgtattaggtgataagagttgtgtgctaaacaattgatgcatttcctttcttggaaaattgattatccttccttgata

SEQ ID NO: 131465 - DNA, 1611 bp, Zea Mays
gatttttcagccgttagccttatccctcgcccttcctcctctccaacgcacggcgctccctctatcctcttcccatggctgagcgcgcttggatcttctccctgccaggcgttcggcagctcggccgctcgttcctctccgctgctcgccggttccctttccccaagctccatggctgctgcacctccccagccgagcggctcttccccacggcgctccctccctgcttctccttccctctcgcgtcttctcctcgccggcgtgctcctgctccagccataggacgcgcccctgcttccatggatgccgcacccgctgcttgctccccttgcttctccagtccgagctccttcccctcgccttcccatggccagcttcgagctcacccagccctttctctgtttctttcacggccgagtctctttttccatggttgcagccgttttcctgtgccgcggcctcgcccagccgttcctcctctttcctctagctcgggttcagtccagttcgcccttgcgcttgccatggtggccgtcgtgcccatgccgaccggagctcgctcggctgcggtctcgtcccggctccctgctacggctcgccacgtccctgtgtttgaattcgtcgaccttcactcttctccccatggtcggacaacctcgtcgatgctgctatttggtggtcgcctcttggcctaatttcgtcatcacatccgcgctcctttgcttggcccgtcgtcgttctccagctgttctgcgcgtttgtcgggccgtgctgtgtgccagagttccctcccggcagacctcgtcgtcgccaatggtcacagatctcgtcctcgcctcctgtgcgcactgacagcaccgtctcctctgtgctcgctggccatcacggtgtccccagtctgtcgcgccgcactctagtcgtcgattcgcggtcgtgtctgtttcttcatcgatctccctcaacagactcgcccttcacctctggtcgtgccagcaggaacttgagtcgccatccttgacgtttgttgatgcgcaggtcgccttggcctaggccgtcgtctttcacctagcagctcgtcacgggaccaggtgtcgagctcctttcccaacaaacgctagacctgctcctgcgttcgccatcagccttagctcgtcggtcacgctcgccagatgttcgatcaaggacttcaactgaaggccattgtcgttcgtgcaaacatcgaatcaaattgtcatgtggtaagctaattcgttatttttgctactggttcgaagattggattaagtaaatttattaggtatgttagttctcttgtcaatagcacacgagcgttgtggttgtatttaatgattgtcaaaatacgtcctcatatatataatgtgtggttatgtacatgaatgtggagtagtcgtagtgtgcggcaaagcttagattaagatgcaaattatgcgcagcgggagtatggtgggatttgtaaagctagcaataggtttagtatctcgaaagagtagtcgacatgctccgtcaatgctatggtgttaatctcgcttgtatgataagtgatgctttgctttaattgtcatcatattatacgtgtaataaattgttaaa

SEQ ID NO: 131466 - DNA, 94 bp, Zea Mays
aagacttccgctatgtaataagtactctgattatattgtgacatttatctctatacattttgttattatatgtgttgtcatctttggcgcatgt

SEQ ID NO: 131467 - DNA, 255 bp, Zea Mays
atggccgcccaccgatccgagcgcaaatcctcaaatccaagtgacggtagacggagcagagatgaaggtgagccatatagaggcgttctcaccatcggtggtgacgaggatgaggttgtcgacgcggtacgacagaacagcggcgacggtgtcatgccgatgagaaattcccttcccctcgcccaacgattcggccagctgagaccactgatatcaaccccatggcctggtgaagcaccgaggcgactgtcatga

SEQ ID NO: 131468 - DNA, 1964 bp, Zea Mays
aatcttccgcactctgtaaccccgcccgcgatggaggccgcaaccgccgccacggcggcgatgatgtggttccggaagggcctgcgcgtgcacgacaacccggcgctggacgcggcccgccgacacggggccggcgctgcatccgcgcggctgtacccggtgttcgtgctcgatccgcgctaccttcgcccggatgccgtcgcggcgtccccaggttccgcgcgcgccggggtcgcccgcatccgcttcctcctcgagagcctcagcgacctcgacgctcgtctccgccgcctagggtcccgcctcctcctcctgcgcgcccgcgacgacgtcgccgacgctgtctgcgcggccctaaaggactggaacattggcaagctgtgcttcgagtccgataccgagccgtacgcgctggcccgcgataagaaggtcacggattttgcattggcgtccggcatcgaggtgctcacgcccgtcagccacaccctcttcgacccagaagaaattataaagaagaacggtggtcggccgcctttgacatatcaatcctttgtctccattgctggggagccgccagctcccgccatggaggaatactccgagctcccaccgctaggagacacaggggaatacgagctgttgccggtgcctacggtggaggagcttgggtacggcgatatcagccaggaggagattccaccattccatggcggagagacagaagctctgaggagaatgaaagaatcgcttcaaaataaggaatgggttgccaaatttgagaaaccaaagggtgacccctctgcctttgtgaaaccttcaacaaccgttttgtcaccatatctaaagtttgggtgcctgtcttccagatatttttaccactgcattcaggatgtgcacaggagcgtcagaaaccatacaaaaccacctgtttcattgacaggacagttgctgtggcgagacttcttttacacagtgtcttatggaacacctaattttgatcggatgaaagggaacaaaatatgcaagcagattccgtggagcgagaacgaagatctatttgttgcatggagagatggccagacaggatatccgtggatcgatgctatcatgattcagctgaggaactggggttggatgcatcacctcgcacgccattctgttgcttgtttcttgactcgcggtgatatgtttatccactgggaaaaaggacgtgatgtgtttgaaaggctactgatagattctgactgggccattaacaacggcaactggctgtggctctcttgctcatccttcttctaccagtaccacagaatttactcccctattacattcgggaagaagtatgatcctaacgggaactacattaggcatttcatcccagtgctgaaagacatgccaagggagtacatttacgagccttggactgctcccactagcatccagaagaaagccaattgtattattggcaaagactacccaaaaccagtggttgatcatgagactgcaagcaaagagtgtagaaagaggatgggagaagcttatgcgttgagtcgcgttgatgccaaacctagcaaagggaagacgttgaactcacgccgaaaaatgctacatggtgaccgagacacgtctaactcaaccattgctaagcgactgaagaggaatagccgagctgagtgatgcgcagctcctcccgtgacaactttacactacttgttccaccttcagcattttttttttattttcagttgtgttacctgcatctgtcatatgtagctcgtctgacattttaccaaagtagtctgaccgtaaggaaatgacttgagcccgtagctagtgtgatatcctacactgaaggacatatctgtaatatatgctcatgtaataacaggtgtaataataataactgccgcccatgtactctaggtcttatttggaaggtgtgtgcagcaaatgaacagttcaag

SEQ ID NO: 131469 - DNA, 1270 bp, Zea Mays
aatcttccgcactctgtaaccccgcccgcgatggaggccgcaaccgccgccacggcggcgatgatgtggttccggaagggcctgcgcgtgcacgacaacccggcgctggacgcggcccgccgacacggggccggcgctgcatccgcgcggctgtacccggtgttcgtgctcgatccgcgctaccttcgcccggatgccgtcgcggcgtccccaggttccgcgcgcgccggggtcgcccgcatccgcttcctcctcgagagcctcagcgacctcgacgctcgtctccgccgcctagggtcccgcctcctcctcctgcgcgcccgcgacgacgtcgccgacgctgtctgcgcggccctaaaggactggaacattggcaagctgtgcttcgagtccgataccgagccgtacgcgctggcccgcgataagaaggtcacggattttgcattggcgtccggcatcgaggtgctcacgcccgtcagccacaccctcttcgacccagaagaaattataaagaagaacggtggtcggccgcctttgacatatcaatcctttgtctccattgctggggagccgccagctcccgccatggaggaatactccgagctcccaccgctaggagacacaggggaatacgagctgttgccggtgcctacggtggaggagcttgggtacggcgatatcagccaggaggagattccaccattccatggcggagagacagaagctctgaggagaatgaaagaatcgcttcaaaataaggaatgggttgccaaatttgagaaaccaaagggtgacccctctgcctttgtgaaaccttcaacaaccgttttgtcaccatatctaaagtttgggtgcctgtcttccagatatttttaccactgcattcaggatgtgcacaggagcgtcagaaaccatacaaaaccacctgtttcattgacaggacagttgctgtggcgagacttcttttacacagtgtcttatggaacacctaattttgatcggatgaaagggaacaaaatatgcaagcagattccgtggagcgagaacgaagatctatttgttgcatggagagatggccagacaggatatccgtggatcgatgctatcatgattcagctgaggaactggggttggatgcatcacctcgcacgccattctgttgcttgtttcttgactcgcggtgatatggtatgtcctgtgatctgtaaagcttgcatcgaataagaactctgttgggaatttacattgaaatctcctttacagaagatgt

SEQ ID NO: 131470 - DNA, 335 bp, Zea Mays
ccgggcgggatctggacatgctcctccccgaagtcggcgccgccgtcgccgaacgcgaggcccggcgggacgaccacccaccgcttgccgccgggcctcatggagcgcaccacatgctcaacaccctcgcacatgcccctggtgtacggccgggagctcatcaccagcgccagcagccgcttgctgtcgtcgagcgtgtccacgaacgcctccccgtcactgccggccacccggccctgcaggtcggtcaccaccaggtcgcccagtcgcgggacgtcgccgccaccgacgcgcatctcgtagtactagatcccgttgggcaacacgacctcgtg

SEQ ID NO: 131471 - DNA, 1357 bp, Zea Mays
atggcgcttcggctcccagccagcgccggcgcccgccgcgccaccgccggccaggccaggcaggtcccgcacgtcgtccacgccgcgacgctctccctcgcagtcgacgccgtcatgacgccgacagtggtcgcaactcgcaacagacctccatcgccgtgttgcggcaacaccactcgcagctcctccgtttccgtgtcgcctcccaccctgcccacgagcgccgcctcctctccttccttgcccgcgggacctacgttactggtggccgtcccccaaggggagcttaggaagggctcgtcgacgacatcgaagagcgaggacatgggatctagtggtgccccaacgtcggcgtcggtgttgaggaacaggagctcgtcctcaccgaccatctcaatgtcctccaccagcagctcgtcatcgtcctcctcctccatcgacggcgtgcgcagcggtgtcgtgggcgagagccccactgtcgatgtggatgtcaagcctcggctgctgatgctgcgagtcgtcagggccaacaccggtgtcggcgccgcccaccacaacggacggcggaggcggcgtcgaggagggaaacttgtggcgagtgctgtgggtgagcgagttgcagtgggtcagcgccgcgtggttgtgctcgcgggtgtgagactgatacatgcccttttctatattccttgccgcagcccgcacaagcttcatcggacggttaccaggctgtcagagacacgacacctcacgtccgctgccacctctctccttcgccggtcgccgctccagctgaacttgaaggagaccgacggatcgatggcggccgccgcggcggtatacaggcgggtgctgaaggcggtgcagaagcacgtcggcgggggcgccaccaagcagcatttccgcgacttcgtggcggccgagttccgcgcccccgtcggctcgaaggccgacgctagggccaggctgcggctcgccggagattacgcctacctccttaccagcgtccagcaccacaaggacctgctgttgtcgtacaatatagctgtggaccgatccgacgaaatgaagaagatattgaacaaatccgctgccagtgtaggcctccagctccctgatgtctaccagccatgagggcttcttttcctcacgtatgtgtgatccatgatactgccatttagctatggaatttcattttgtgtcctacattccattttccttgtttccaattctactcttctttcagtaacgagaaatgtcattggtttattaatgatgtcattcaacaatgtatggattctttctactgaagtcaattgccaatttgctgtaattcgcataacacctagattgtattaca

SEQ ID NO: 131472 - DNA, 1554 bp, Zea Mays
gctcaaagtagtattactccagtttctcaaagcacaacacattagttatttgcaaattaatacaagtgccatggccgccttcgcctcagctatcctcttcaccgtacacttagcgcttgcatttcccttccgcttgtcgtcggcggaggcgccgccactactcggagccgtcgttggagaacaacagccgctcctcgaggaggcgcgcacgcccaggttcgtcacgtggctccgcggcgtgcggcgccgcatccaccagcggcccgagctggccttccaggagcaccgcaccagcgagctcgtgcgcgctgagctcgacgcaatcggcgtgccctacaggtggccagtcgcccagaccggcgttgtggccaccattgctggtagcgccgggcccacggtcgcgctccgggccgacatggacgcgctccccgtgcaggaaatggtcgattgggcatacaagagccaagaaagtgggaaaatgcatgcttgtgggcacgatgcgcacacaacaatgctcctaggagctgctaagctacttcaagctcggaagggtgacttgaagggtgctgtaaagcttgtgttccaaccatcagaggagggctatggcggagcctactacgtcttgcaagaaggtgctcttgacggcgtgtcagccatatttggcttgcatgtggacccagcacttccagtaggtgtcgtcgcatcaaggccaggaccattcacagcgacagcgggtcggttctctgcaactattcgtgggaaaggtggtcatgccgcagtaccccatgaatccgtcgaccctgttgtggttgcagccactgcaatcctcagccttcagcaaatcgttgctcgtgaagtggatcccctccatggtgcagtggtatctatcactttcgtgaaaggaggagaagctttcaatgttatcccggagtctgtcacctttggcggcacaatgaggagcatgacagatgaaggtttgtcgtatctcatgaagagggttaaagagattgtggaaggacattcttcggtacatcactgtactgcttcattggacttcatggaggaggagatgaggccatatcctgctgtggccaacgacgaacggatgtatgcccatgcaagggcagtgggcgagagcttgctaggcgaaaaccatgtcaaggttgctccccaagtgatgggcgcggaggactttgggttctacgcgcggagaatggccggcgccttcttcaccattggagttggcaatgaaagcaccatggtgactgtgcagcaaccccactccccctactttgtgatcgatgaggacgcgcttcctgtcggagctgcatttcatgctgcagtggcaatcgatttcctgaagaaacattcgtaaacaaaaacttaaataattaatggagagaagtaggcttttgattttctttgggtgttagatatgcatggtttatatcgcttcttctatattatgttttaggtgtctgattttttctgttgtttagatgacatgaaatctttttattctttgactattgaaaaaaaatcgttaattgcata

SEQ ID NO: 131473 - DNA, 782 bp, Zea Mays
atggggaaacaccaggcgctggtgaactgggagacggccatggacgagcagagaaggctgatggttggaccagcgagaacagggagtcgcgaacaaggaagctccatgcccgggcgcggagaacggcggcgcagaggagtcgcgcggtcagccatggcgagcagagggagcagacgctggggcagggaggagcgtggacgggcggaactccggctgggcgcgcgccggcgagggagaagctcggctggggaggcgcagcggccatggagcttgggacagtcgaccgagctggtagagggaggagctaggggaaaagctctgcgcgctggaggaatagaagccgagctcggcgagcatccagggagcagggaggaaggagccgagcagggagccaacgcgccatggttgggagcttgggggaaagagaaaccgcgacgcgcaggagctctggccaggcgcgcgttggaacctgggcaccgagcgccatgggaggacgcgcgcgcagcaccagagctggagcaggggaagcgcggccaggaaatccacccagaaattgagcgcaagaggaaagcagtcgggcgccatggatggtgctggaactcgaccagggagatgcgtggaggggctcgacagccatggaatcgagcagaggaaggagcgcgctgcaagggagagagaggagtggctgggcggcagaatttgtgaacaatccaggggcggccggcaggggactgagcaggggaagctccggcgcttggggaagaaagagagagcgacgcggc

SEQ ID NO: 131474 - DNA, 993 bp, Zea Mays
ttcgctataaatacccctgcacagacgcaccttgctgcatcaccatttcgctagctccatagcacttgttccagctagctaggagagagagctttgtttaggcggcggcaagatgaacaggaagccaggagactgggactgcagggcgtgccagcacctcaacttcagccgtcgggatgcatgccagcgctgcagtgaaccacgtggagttggtgatcgtagcggcggtggtggcgacttgggtgggcgtggtggttcctccttcggcggtggctttggtgctggctctgatgtccgccctggtgactggtactgctcctgcggcgcacacaacttcgccagccgctccaactgcttcaggtgctctgcctacaaggaggaggctgccggcgcctttgatagtgacatgtcacgctcacgcggctacgccggcttcggcagcggcgctgccgcccgtaccaaccgccccggttggaagtctggagactggatctgcaccaggtccggttgcaacgagcacaacttcgctagcaggatggaatgtttcaggtgcaacgcgccacgggactccggtagcgctgccacgacgacctacgaaaactacttgcactgaggtgtaggtagagcaaagtttacagctatagcgcgcgtcgacgaagcaggagcagcagcagcagcatgaattgaagaggagtcctcatcatcacatcataagggagcagcagtagatttaattgcaaaattaaagacacccgcgatgcatgccctatcactagttttgttccaccggtacccctaccgcgcgtttcttttaagatttggttccccatttatctggggacagtagaccccagatgagacctatgtttgctgtttcattttcagttacgttcgtctccgcatgcatgtttgcgcttggatctgatgtaaccccaaaacgcttgcttcacaagtactattaactagttctgttgccttcctatataatatctt

SEQ ID NO: 131475 - DNA, 1138 bp, Zea Mays
gcatcaccatttcgctagctccatagcacttgttccagctagctaggagagagagctttgtttaggcggcggcaagatgaacaggaagccaggagactgggactgcagggcgtgccagcacctcaacttcagccgtcgggatgcatgccagcgctgcagtgaaccacgtggagttggtgatcgtagcggcggtggtggcgacttgggtgggcgtggtggttcctccttcggcggtggctttggtgctggctctgatgtccgccctggtgactggtactgctcctgcggcgcacacaacttcgccagccgctccaactgcttcaggtgctctgcctacaaggaggaggctgccggcgcctttgatagtgacatgtcacgctcacgcggctacgccggcttcggcagcggcgctgccgcccgtaccaaccgccccggttggaagtctggagactggatctgcaccaggtgctgcgtcgtgttttaatttgtggcttctttctgtctgcatgcatatgtgcatggaatgatgaggttgctgaataatatatatattttacgtacaggtccggttgcaacgagcacaacttcgctagcaggatggaatgtttcaggtgcaacgcgccacgggactccggtagcgctgccacgacgacctacgaaaactacttgtaatttaccaaataaatccatatatttcctcctttaattttgctggctgctgtgtgtgcatgcatgatctgaccgaacgttccgtttgctgcaggcactgaggtgtaggtagagcaaagtttacagctatagcgcgcgtcgacgaagcaggagcagcagcagcagcatgaattgaagaggagtcctcatcatcacatcataagggagcagcagtagatttaattgcaaaattaaagacacccgcgatgcatgccctatcactagttttgttccaccggtacccctaccgcgcgtttcttttaagatttggttccccatttatctggggacagtagaccccagatgagacctatgtttgctgtttcattttcagttacgttcgtctccgcatgcatgtttgcgcttggatctgatgtaaccccaaaacgcttgcttcacaagtactattaactagttctgttgccttcct

SEQ ID NO: 131476 - DNA, 1001 bp, Zea Mays
ccatttcgctagctccatagcacttgttccagctagctaggagagagagctttgtttaggtaatttagctttgtgtatatcttcttggttctagctctttgaaattttttttatctgggtgcaggcggcggcaagatgaacaggaagccaggagactgggactgcagggcgtgccagcacctcaacttcagccgtcgggatgcatgccagcgctgcagtgaaccacgtggagttggtgatcgtagcggcggtggtggcgacttgggtgggcgtggtggttcctccttcggcggtggctttggtgctggctctgatgtccgccctggtgactggtactgctcctgcggcgcacacaacttcgccagccgctccaactgcttcaggtgctctgcctacaaggaggaggctgccggcgcctttgatagtgacatgtcacgctcacgcggctacgccggcttcggcagcggcgctgccgcccgtaccaaccgccccggttggaagtctggagactggatctgcaccaggtccggttgcaacgagcacaacttcgctagcaggatggaatgtttcaggtgcaacgcgccacgggactccggtagcgctgccacgacgacctacgaaaactacttgcactgaggtgtaggtagagcaaagtttacagctatagcgcgcgtcgacgaagcaggagcagcagcagcagcatgaattgaagaggagtcctcatcatcacatcataagggagcagcagtagatttaattgcaaaattaaagacacccgcgatgcatgccctatcactagttttgttccaccggtacccctaccgcgcgtttcttttaagatttggttccccatttatctggggacagtagaccccagatgagacctatgtttgctgtttcattttcagttacgttcgtctccgcatgcatgtttgcgcttggatctgatgtaaccccaaaacgcttgcttcacaagtactattaactagttctgttgcctt

SEQ ID NO: 131477 - DNA, 113 bp, Zea Mays
gtgcggcacaaagctaacttaatcacacattggggtcgttggagttgtgtccactacctccagaagccaataactggtcgacgaagtcgtgtaacgggtttggatcctaaaaa

SEQ ID NO: 131478 - DNA, 474 bp, Zea Mays
atggggcgtgagggtggtgaggacgtgccacaggccgcggcgacaagcggagcgggcgcggttgagcggggcgggatcaccaaatcctctagccattggatgcggaacagggcgacgggggagggagcagcgagagagggaggaaagagagatggcgctgtgcaggtggccgaagaacagggagccgtcgggcggcggcggcagcgccccaacgaacaccgcgaaggcgaggtcgtggttgtcgtagaggaagacatggcgctgcgctgagtagcgcgtcgagagcgcgaggaggaagttgaggaccctgcgggtgtgcggaccgcggtcgttgtagtcgccgaggaagatgaccagcgcggtggccaaggcgttgacggggagtgcggcctggaggttggaccagaggctctctagcttcgggatgtagccgtggacgtcgcccacacagatcaccgcgaggggtggcggcgg

SEQ ID NO: 131479 - DNA, 574 bp, Zea Mays
ctctactcacagaccactgcatgggtgttgaggttcttgtattcctgctagtgatgaccctctaccacagccaccaagtctgctctgtccagagcatcaagtgccagtggtgaccacgctcacaattcttcaccccaccatagccagaacattctagggagttgctggcctgtatgaagcttgttccgtaatcatctcagagctcccaaaataaagagtgaagattcaagatgaagtggttgctaaagaggagtctactccagtgtcttctcatcaagaggatggagctatctaattgatgcttgggtagagggatctagaacctcttcactgcaacaaaggtactagatctatgctgctgttgatggtgctaagtgtcggtgggctcggcgttcttataggttaaagtagctcttctatacttctttatgaggatgatcacttaagctagcatgtatttcaaacttatgaaaattatacatgcttcaaagtgaaatactttggatttactttataatcactctgatcttgtatagtataatcttaatgtaacttgtaactttttgtaataaag

SEQ ID NO: 131480 - DNA, 999 bp, Zea Mays
acgaccagtccatccaagccgcaccaagaccgagccatgtccgcaatagcactgggcgccgccggcacctggccggaggccgtgatccagtgcctcctcttcctcctcgccgctggcatgctcctcgcgcttcactccctcccccgccgcgccgcccttcggctgcgccgctccggcgccgccggcggctcctacgcggcccagtcgcgccggcacttcgctcagggtgcccagcttctcgcccgcgcgcgcgctacggcccctaagcccccgggcccgctcgcccgcgcggccgtcgccgaggctgaccgcgccatcgctctcgacccccgcgacgccgccccgctcatcctcaaggccctcgccctcgacctccagggccaccgcctccctgcgctgcgcgccctcgacggcgccctcgcgccgccgctcgcccgctcactcgagccgcgcgagcgaggggacgcgttggccaagcgcgccgagatcgcgctcgcactccaccgccgccgccgcctcgaccaggccgctgtcgatctcgcggaggccgtccgcctgagtcccgagaatgcccgcgcccatgcccttctgggcgagtgctacgagaagaaggggctcgccgctgaagctcgggaagccttcaagaccgctgcatccatcgatccaaagcttggtgttgcgcttgacgggctccgtcggttagacggaggcaacgaaggagacgaaaatgactgatgaacctgttgctgatgagcattttacatctgttgtatatttgtggccgaatgcagtcatgcactaccttctggttcaaattggtaaaagtggtttgttatgtggtctttctgtaattgcttaacttaaagatgccactaaacatggtttactgttgtagattaccacattttcaatcgagcaatagtatgacttcgttgttaactttgttggtattcagctcaattatgctctatttacatattccagcaatttcttttcctg

SEQ ID NO: 131481 - DNA, 836 bp, Zea Mays
attggtgtctagattgaagattatgcatcagcgacaagtaacgaccgcccggaaagagagccggaaaaaaggcaggaaatcgccaccgctcgcccctatttgagcagccgcttgttccttccgcgtcctcgctgctcctcaattcaattggctccgtgccgacctccaggttgagaaggaaagcatcgcgagttcgccatacggatgggttctaaagcgcctttctgtctcacgctcctcttgctgctcgccgcagcctgtggacctgctgcacatgccacaatgctgatggcattggtctgcttggaggtacttccagtcattttgcaaactatgatccccccatatgacaatgtgaggacgaaccagaagggcgagttctgggtggcgatccactgtcggagaagtatgtatcctcggctaatgagctgccatgtcaagctgaggaagtttttgctcagcttcccaatccctgccaagtaccactacctgatgcatatcgatagcaagctctacgcgttgatcatcagggacagcccgatggccagatgcttcacatcatggaggacggcaagggagaggtggtgagagttatcatcgaagtggagggtccgtctgatgccattcatcgttgtctttgacctcgtgaaggcgtcttagccacttcaatttgattggaaatattgttgttttaagatacgggtccatggttaatgttgtacgcttctctgcttctctgagaagacctgtcattttaataatttggttctggagcaacctggagctgtatattgatctagcttcttttagtaacaaatgtaagttgctcacatttt

SEQ ID NO: 131482 - DNA, 614 bp, Zea Mays
gctgaaaatgagcatgtttattttcagctctaggttttatgctcaatttgtttttcaggcatgcaacatcgaggttactttgtttgttggatgaattcagtacggtaagggcattctaactgaagatggcattggtctgcttggaggtacttccagtcattttgcaaactatgatccccccatatgacaatgtgaggacgaaccagaagggcgagttctgggtggcgatccactgtcggagaagtatgtatcctcggctaatgagctgccatgtcaagctgaggaagtttttgctcagcttcccaatccctgccaagtaccactacctgatgcatatcgatagcaagctctacgcgttgatcatcagggacagcccgatggccagatgcttcacatcatggaggacggcaagggagaggtggtgagagttatcatcgaagtggagggtccgtctgatgccattcatcgttgtctttgacctcgtgaaggcgtcttagccacttcaatttgattggaaatattgttgttttaagatacgggtccatggttaatgttgtacgcttctctgcttctctgagaagacctgtcattttaataatttggttctggagcaa

SEQ ID NO: 131483 - DNA, 1783 bp, Zea Mays
gcgcccgtccctcccatggctcaagaacaagggaatcgaagccattccctcttcaagaggggatcatcagattgggcttattattccttattactccaggcaaggatcggagttgctctgaattgactgaaccatggcggcgacaatggcagtgacgacgatggtgacgaggagcaaggagagctggtcgtcattgcaggtcccggcggtggcattcccttggaagccacgaggtggcaagaccggcggcctcgagttccctcgccgggcgatgttcgccagcgtcggcctcaacgtgtgcccgggcgtcccagcggggcgcgacccgcgggagcccgatcccaaggtcgtccgggcggccgacaactgcgacatcgcgcgccagcttggcgccgccgttcccgggcagcaggccgcctgggaggcggaggaagaggcagcgaagaggaggaagcagaagggcggcggcagcaagaagcagcagcagctgggcgatctgagcctgaggaaggtcagggtcaagatcgccaacccgcacctgcggcgcctggttagcggcgccatcgccggcgccgtgtccaggacgtttgtggcgccgctggagacgatccggacgcacttgatggtcggcagcatcggcgtcgactccatggccggggtgttccagtggatcatgcagaacgaagggtggaccggcctgttccgcggcaacgccgtcaacgtcctgcgcgtcgctccgagcaaggctatcgagcatttcacctatgacacggccaagaagttcctaacccccaagggcgacgagccgcccaagatcccgatccccactccgctggttgccggagctctagccggattcgcctcaaccttgtgcacctaccccatggagctgatcaagaccagggtcaccatcgagaaggacgtatacgacaacgtcgcgcacgcgttcgtgaagatcctacgcgacgagggcccgtcggagctgtaccgtgggctgacacccagcctgatcggcgtggtgccgtacgcggcctgtaacttctacgcctacgagacgctgaagcggctctaccgtcgcgcgaccgggcggcgtcccggcgcggacgtgggccccgtggcgacgctgctcatcgggtccgcggcgggcgccatcgccagctcggccacgttcccgctagaggtggcccgcaagcagatgcaggtgggcgctgtgggcgggaggcaggtgtaccagaacgtcctccacgctatctactgcatcctcaagaaggagggcgccggcggcctgtaccgaggtctcggccctagctgcatcaagctcatgcccgccgccggcatcgccttcatgtgctacgaggcgtgcaagaagatcctcgtcgacaaggaggatgaggaggaggaggacgaagccggcggcggagaggatgacaagaaaaaggttgaatgatcaaagttcttggccaagaaggtagcaatgtcgtgaagcgtacgtgaactggaaacggatggacaagtatatttggagtttgatgtggtgtttccggatcgtgtgtttgtctcagatgaaaaaaatacaatattttgagtccaagttaatcaatgttccatttgcctatccggagctcaatttgttaggttgcatgttccatgtaattactatatttgcctatttcaattttcaagctcttttcgttgtgtttagtaaactgtggtgtgaccacttacggtcacaataaccatttttatctgtttttggtataataagcatgtctgtgttcggtcc

SEQ ID NO: 131484 - DNA, 1715 bp, Zea Mays
gcgcccgtccctcccatggctcaagaacaagggaatcgaagccattccctcttcaagaggggatcatcagattgggcttattattccttattactccagtgacgacgatggtgacgaggagcaaggagagctggtcgtcattgcaggtcccggcggtggcattcccttggaagccacgaggtggcaagaccggcggcctcgagttccctcgccgggcgatgttcgccagcgtcggcctcaacgtgtgcccgggcgtcccagcggggcgcgacccgcgggagcccgatcccaaggtcgtccgggcggccgacaactgcgacatcgcgcgccagcttggcgccgccgttcccgggcagcaggccgcctgggaggcggaggaagaggcagcgaagaggaggaagcagaagggcggcggcagcaagaagcagcagcagctgggcgatctgagcctgaggaaggtcagggtcaagatcgccaacccgcacctgcggcgcctggttagcggcgccatcgccggcgccgtgtccaggacgtttgtggcgccgctggagacgatccggacgcacttgatggtcggcagcatcggcgtcgactccatggccggggtgttccagtggatcatgcagaacgaagggtggaccggcctgttccgcggcaacgccgtcaacgtcctgcgcgtcgctccgagcaaggctatcgagcatttcacctatgacacggccaagaagttcctaacccccaagggcgacgagccgcccaagatcccgatccccactccgctggttgccggagctctagccggattcgcctcaaccttgtgcacctaccccatggagctgatcaagaccagggtcaccatcgagaaggacgtatacgacaacgtcgcgcacgcgttcgtgaagatcctacgcgacgagggcccgtcggagctgtaccgtgggctgacacccagcctgatcggcgtggtgccgtacgcggcctgtaacttctacgcctacgagacgctgaagcggctctaccgtcgcgcgaccgggcggcgtcccggcgcggacgtgggccccgtggcgacgctgctcatcgggtccgcggcgggcgccatcgccagctcggccacgttcccgctagaggtggcccgcaagcagatgcaggtgggcgctgtgggcgggaggcaggtgtaccagaacgtcctccacgctatctactgcatcctcaagaaggagggcgccggcggcctgtaccgaggtctcggccctagctgcatcaagctcatgcccgccgccggcatcgccttcatgtgctacgaggcgtgcaagaagatcctcgtcgacaaggaggatgaggaggaggaggacgaagccggcggcggagaggatgacaagaaaaaggttgaatgatcaaagttcttggccaagaaggtagcaatgtcgtgaagcgtacgtgaactggaaacggatggacaagtatatttggagtttgatgtggtgtttccggatcgtgtgtttgtctcagatgaaaaaaatacaatattttgagtccaagttaatcaatgttccatttgcctatccggagctcaatttgttaggttgcatgttccatgtaattactatatttgcctatttcaattttcaagctcttttcgttgtgtttagtaaactgtggtgtgaccacttacggtcacaataaccatttttatctgtttttggtataataagcat

SEQ ID NO: 131485 - DNA, 580 bp, Zea Mays
aaaataatattttgggcatgacttatctccctttgtccctacattgttacatatttgtaaagactttgtggcatatggaacttcttggagctttttgctatggtcttcatcaagttttataccaatgactttatctcccgctaccccgacccgctcatcaaggccatcgacaccatcaagatcgatctggagaccaacaagatcatggacttcatcaagtttgacgtcggcaacgtggtcatggtgactggcgggaggaacaccgggcgtgtaggagtcatcaagaacagggagaagcacaagggcatctttgagaccatccacatgctgcttggagctttttgctatgtctagttttctcctatttgttgtacaggaaaacatagaatagaattcaaatttggtggtcgcaaaagtgtggagactttaattcatataaagttaggcttaacattagtgcaaacagttgtattttagtttagatttagagtacacttatgtatgtgttgtttgacaatgcttatttatgatatattgaatggtacttatttatattatattaattataatgttgttcaat

SEQ ID NO: 131486 - DNA, 1299 bp, Zea Mays
agaatcaatatccaaaagcatctttaataatatacctatgacaatttataataactatgtttgtcctttcttccatgttcacagcatctttaataataatatacctctgcagatatggtgtttctagtttccctacattgaagttcttccctaagggaaacaaagccggtgaagattatgatggtggccgggacttggatgactttgtcaagttcattaatgagaagtgtggcaccagccgggatccaaagggccacctgacttcagaggctaggcttgtgccaagcttgaatcctcttgtgaaggagtttctcaatgctgttgatgacaagcggaaggaagtcctctctaaaatagaagaggatgttgctaagctcagcggttctgcagccaagcatggaaatatatatgtgacagctgcaaagaagatcatggacaagggctctgactacactaagaaggagactgagaggcttcaccgcatgctggagaagtggtgtagctagttcagtaaagatgaaaagcgtcaaactagttgtggaatggtggtattgtttatagtacatgtgtttggactttggacactgggttccaatgacattatgagattccaagttcacacagcaggagttgctagcttgcaagccgattcttactccaaaatgggtaggcttacgggttgtgaagattatgatgctactggtaacgcctaatctttatggcaatttggtggctaacacggctgcaggtattgttggagggacgggcatcatgcctagagactttgtggcatatggaacttcttggagctttttgctatggtcttcatcaagttttataccaatgactttatctcccgctaccccgacccgctcatcaaggccatcgacaccatcaagatcgatctggagaccaacaagatcatggacttcatcaagtttgacgtcggcaacgtggtcatggtgactggcgggaggaacaccgggcgtgtaggagtcatcaagaacagggagaagcacaagggcatctttgagaccatccacatgctgcttggagctttttgctatgtctagttttctcctatttgttgtacaggaaaacatagaatagaattcaaatttggtggtcgcaaaagtgtggagactttaattcatataaagttaggcttaacattagtgcaaacagttgtattttagtttagatttagagtacacttatgtatgtgttgtttgacaatgcttatttatgatatattgaatggtacttatttatattatattaattataatgttgttcaat

SEQ ID NO: 131487 - DNA, 1186 bp, Zea Mays
agaatcaatatccaaaagcatctttaataatatacctatgacaatttataataactatgtttgtcctttcttccatgttcacagcatctttaataataatatacctctgcagatatggtgtttctagtttccctacattgaagttcttccctaagggaaacaaagccggtgaagattatgatggtggccgggacttggatgactttgtcaagttcattaatgagaagtgtggcaccagccgggatccaaagggccacctgacttcagaggctaggcttgtgccaagcttgaatcctcttgtgaaggagtttctcaatgctgttgatgacaagcggaaggaagtcctctctaaaatagaagaggatgttgctaagctcagcggttctgcagccaagcatggaaatatatatgtgacagctgcaaagaagatcatggacaagggctctgactacactaagaaggagactgagaggcttcaccgcatgctggagaagattccaagttcacacagcaggagttgctagcttgcaagccgattcttactccaaaatgggtaggcttacgggttgtgaagattatgatgctactggtaacgcctaatctttatggcaatttggtggctaacacggctgcaggtattgttggagggacgggcatcatgcctagagactttgtggcatatggaacttcttggagctttttgctatggtcttcatcaagttttataccaatgactttatctcccgctaccccgacccgctcatcaaggccatcgacaccatcaagatcgatctggagaccaacaagatcatggacttcatcaagtttgacgtcggcaacgtggtcatggtgactggcgggaggaacaccgggcgtgtaggagtcatcaagaacagggagaagcacaagggcatctttgagaccatccacatgctgcttggagctttttgctatgtctagttttctcctatttgttgtacaggaaaacatagaatagaattcaaatttggtggtcgcaaaagtgtggagactttaattcatataaagttaggcttaacattagtgcaaacagttgtattttagtttagatttagagtacacttatgtatgtgttgtttgacaatgcttatttatgatatattgaatggtacttatttatattatattaattataatgttgttcaat

SEQ ID NO: 131488 - DNA, 1531 bp, Zea Mays
ttcgtggccctgctcgtagcttggaggcggcgacattctccggcaatgggggtcaaggggggcgacaagcccaagcccaactaccgcaagggcctgtggtcgctggaggaggaccagaagctccgcgactacattctcctccacggccacggctgctggagcgcgctccccatgaaagccggtaccaatgtcaagatagctgccattccttcaagcgtcgtggttctgacttcagagacctttgactcaattgtccttgatgagttttatgccccatggtgtggtcactgcaagcatcttgctccgatttatgagaagctggcttcagttttcaagcaggacgacagtgttgtgattgccaatcttgatgctgacaagcacactgacttggctaaaaaatatggtgtttctagtttccctacattgaagttcttccctaagggaaacaaagccggtgaagattatgatggtggccgggacttggatgactttgtcaagttcattaatgagaagtgtggcaccagccgggatccaaagggccacctgacttcagaggcttgtgccaagcttgaatcctcttgtgaaggagtttctcaatgctgttgatgacaagcggaaggaagtcctctctaaaatagaagaggatgttgctaagctcagcggttctgcagccaagcatggaaatatatatgtgacagctgcaaagaagatcatggacaagggctctgactacactaagaaggagactgagaggcttcaccgcatgctggagaagtggtgtagctagttcagtaaagatgaaaagcgtcaaactagttgtggaatggtggtattgtttatagtacatgtgtttggactttggacactgggttccaatgacattatgagattccaagttcacacagcaggagttgctagcttgcaagccgattcttactccaaaatgggtaggcttacgggttgtgaagattatgatgctactggtaacgcctaatctttatggcaatttggtggctaacacggctgcaggtattgttggagggacgggcatcatgcctagagactttgtggcatatggaacttcttggagctttttgctatggtcttcatcaagttttataccaatgactttatctcccgctaccccgacccgctcatcaaggccatcgacaccatcaagatcgatctggagaccaacaagatcatggacttcatcaagtttgacgtcggcaacgtggtcatggtgactggcgggaggaacaccgggcgtgtaggagtcatcaagaacagggagaagcacaagggcatctttgagaccatccacatgctgcttggagctttttgctatgtctagttttctcctatttgttgtacaggaaaacatagaatagaattcaaatttggtggtcgcaaaagtgtggagactttaattcatataaagttaggcttaacattagtgcaaacagttgtattttagtttagatttagagtacacttatgtatgtgttgtttgacaatgcttatttatgat

SEQ ID NO: 131489 - DNA, 652 bp, Zea Mays
tcaaatgtgtccatagatgaggaacactttgatctgcttaactattggaaggtgaatagtcatagatttcctgtggtatcttctatggcaaagaggttcttggctgttccagctagcagtgtgtcatcagaatccacttttagcactagaggtaggatccttgatgattacaagagttcattgaagccagcaacagttcaggctttggtgtgtgcttctagttggatatgtgggtctcgaagttcacctattcttgtaactggagaaggtgatgatggtgacatcgagtccgtggaatttccaaagtgtgtggtggcaagtaattaggcacatagtcacatactcacatggaggaggtggaggagagggagagctaggacccgagagaggagacaagagaggcacatggtcattatattttgttggctctaactgtaagcctataattgttggttgcaacttgtaagttgcaattgttgctaacctggcatattttgttggctccctaaaactttgtcctgaactcctgaacctgaagtcctgatctataattgttggctgcatcactgcatgtattttggttctagaactgaaactctgaaagtatggaattatggattatggaatggaatgaaactattatgaactataa

SEQ ID NO: 131490 - DNA, 95 bp, Zea Mays
ctgagattagaaaagaaatgaaggcatatttggacaagaacaagaggtctaggcctattttccttgatgatcatcatcatgatggtcaggggcag

SEQ ID NO: 131491 - DNA, 342 bp, Zea Mays
tcttgagctctaccctcagaccacagcaaagagtatgaagttcttgtgtccatactagagatagccctctctcccaccaccaactcggtcggcccttgtgcacagggcgctatctccctgctagtggtgacctcattatggccagaacgtaatcgcgccaccgcaaatcgtcgtcgtgtttagttttcatcgtcgaccagccagcatacgtcttccccgagcagtttcatgcacccaccgagaacatggactgtcagagctcctaaaggaagaggtggaaatccagaagaagtggtttctggagagaagtctacttctaaatctgttcctcaagtggattga

SEQ ID NO: 131492 - DNA, 531 bp, Zea Mays
atggccttcctagtgcctgcccttcccctgccgcccctctccgtggacgccgcccatggagggtcgccggctgcactgcttcccatctatcccaccgccatggagctcgccggattgcgtccctgcatccatggcggctgcttggccccagctccttgccgcgcccttccagtccctctgccggccatggagctcggccctagctcggattcttgcgtcgcgcccggctgtttctccctggcgctcgaaacccagtcgcccagcccagctgcagctcgtcgtgccctcgctgctccctgctccttgttcttctcggcacgacagagagtttcctcggccgcgcgtccctacttcccctgcgcgtacgtgcttgcttcctctgtcgcagcagcgaagctgtttcttccccgtcgcgcgcagccgcgtctgctccgtgcgcacgcgctcaacctgttcgccatggttgctgcgcgccacgcatactgctctttggagctcggtcgtaacctcgtcatcgttcggcagctctag

SEQ ID NO: 131493 - DNA, 1419 bp, Zea Mays
tcgctcctgcatctcctagctcgagctcgcctctactccggtgcccagtcgctagactctcgctttcctgtgccgctctcgtccgtggttgtctctctgcccagcctccatctcccttcccagccatggccttcctagtgcctgcccttcccctgccgcccctctccgtggacgccgcccatggagggtcgccggctgcactgcttcccatctatcccaccgccatggagctcgccggattgcgtccctgcatccatggcggctgcttggccccagctccttgccgcgcccttccagtccctctgccggccatagagctcggccctagctcggattcttgcgccgcgcccggctgtttctccctggcgctcgaaacccagtcgcccagcccagctgcagctcgtcgtgccctcgctgctccctgctccttgttcttctcggcacgacagagagtttcctcggccgcgcgtccctacttcccctgcgcgtacgtgcttgcttcctctgtcgcagcagcgaagctgtttcttccccgtcgcgcgcagccacgtctgctccgtgcgcacgcgctcaacctgttcgccatggttgctgcgcgccgcgcatactgctctttggagctcggtcgtaacctcgtcatcgttcggcagctctagcgcctctgtttttttcctgcgcgcgctggtgcccagcttgtttggggctgcgtgtgctcctacgtcgcgctctgcttgcagagttccttcgcatcgtgcatctccagctcgccgagtctgaccccaaaccgttgtgcgccgcctgggcccggtgtctctttctcgtcaccagctcgcgcgcccctgttttctttgtcgtcggtcgtcgtcttcgagttgatttttagctgttgtagtatttttagttatcccggctgcgtctgtggccgtcaaatcatcggagtcgctcaactcaccaatcgtatcttggtcagtcatcgatttcatgtttttcatggtcctcacgtcagccgtccctatccaaacttgccagctcgccgactgaccgtcgtgttccttgaaatccctcgtcggccgatctcgcaacttagttcgtcgtgtcgtgtgtgccgctctatatatgccaccctcctatatcgtcgtcgaagctgtcatctccggctcgatccccacctcaccagttcgctccagactttaattgaaggtcgtcgtcgatctgtgcgtcatcaagaaattccaagagtcaagtgaagacggagccagcaacgtgatattcaccaagtgcgcgacaaaaagctcgagccaggatttatcagcattcgtacgagatttgggtcgcgtttgatgctggtaagctaaatttatttgcttagtaattttagtgctttgccggtaggcgctatcggcatttttatgcgaggaa

SEQ ID NO: 131494 - DNA, 948 bp, Zea Mays
atggcggaatcggtgacagccgataccagagcgcatggcgaggaagcttcgcagtttgatgagagtgtggccgagcgaattttatggcacggactggagaaggactcagcgagcaacaacgcgaggagtaaagtgaggtcgcggttgggcgaacgctatggcacggactgccccgcggccaggacggctgccgcaacgcacacgacgtcgctacgccacaacaccaccatggccaggaacagaggcgcgagcagcttgcaggagaggccgaacactagaaacgacggtcgggtcgctcatgagctcggtatgggcaagctagtttccatggtgagcgacggcgacacgaatagtgctaggcgcggcttggctggagaagacacaagtcccagcgagcagagaggcacggtccgagcacagggtgatggggcgcgctggagatggccgagaaggagaagtccaagcgtcgtccatagaagaaacctcggctgggcgtgcgctgggcgtacaggaagctcggttgaggacagaaccgagcaggatgccacgagcggccctgtctccggcggccggactgggcaagcgccatgggcgaccagggaaaaacagggggcgccaagtggagcaggaagcaggggcgagccaggcgcgcgtgcaggaggtgaggagaggggatgggcgcgccatgggagaagccaagttgaagctggagatggccggcggccgtcacgcaggaagcaagccgcgcacacgcaaggagcaggagacggccgcgcggccaacagaggagccaggggcgctgcgcaggaagaagcgctagggagcagcgtgagcctgggtgaaatccgagcagggagggagagggaagcaggggactccgagcttgaggacgacgttgacttgggcgagcgccagggagctccagggctggagaaaacttccagctga

SEQ ID NO: 131495 - DNA, 442 bp, Zea Mays
aaaccacaccggggcctagaagttcatcctcccacactcgcctcaatctattatggattagcgcctgcataacagaccaccagggaattccgctctcacctcattggggtcctggtgggcgaataagcaccaagccctccgcttggatcgaccatcgtgcgcgtcccttgctcgcgtcgagagatttccaacgccgagctagcgcacagggaagggagagaaaagtgagtgccaccgcggggacgagggaaactcgactcaccacctatcgctccttggagttgtgtcctggggattctccgggcttggaggaggaaggttgaagcagctcttccggggattcgtgttcaacgttgtgggaattcctcgccaccaggaactaccctgccgtggaccgcgggtccgcgtggccaagactgtcctcgctgctagccttggtgag

SEQ ID NO: 131496 - DNA, 107 bp, Zea Mays
cctgcctttttgtgttctaccattctgcgatctcagccgtccattctaccgttctacaatctcagccgtccaatcccgcacaccagttttccgcgcgcagaaaaaaa

SEQ ID NO: 131497 - DNA, 608 bp, Zea Mays
ccattttcacccatggccgagccccattcctccatggccgcccagctccctgtctagagcgcccagaaatttccagcagcgagctcctcccttgcgttgctgtcggacgtccctgctactacctcgctccctcgtcgcgcagcgagctccatcgccgacctgcgcagcaagctgcgcgctgcagcagcacgccatcgacgcccgccgtgtgctcgctgtcttgcgcagcccatccgcgacgccgtcgaaaaccgtgctagtggtcgacgtcgtgccttgcccgttcgacgaaataccgagccatgtggacagccatgcgtctagtcacgacccgttcaggttgattgatttatagtttataatacatacgctttggttgatgtcagacaatgcatgtatatatgtggatgtgtgtaatatgttttggcaatacatgttagtgggatcgcatttgcggttaaagaacaagcggttgttgaggtgtgcgatttgtagtttgtctaattacgttttggtcgatgtggtgtatagtggtgtttgattagatgtgggcataaaatgtttggattatatgtcgtggcaaggtcgcattcgtgttttggtaaaca

SEQ ID NO: 131498 - DNA, 821 bp, Zea Mays
tggtccaagcagtaggtgcttcagctggccttagagttatcaaaagggttgatcagacactacaagagctagcggtgaatttgaagcctaaggtcccaacgaaagcagtttgcatagagcatattgaactgcggaatgagctactcacattgcttaacctacaaaagcagctgcaaaataaagaggctgaagtttcagctaaccgggaaagttccttcacagaggcaccaagcacacctaagcgttctaatagggacattgatcggcccttcatccctgatacaagtgggtttacaggtgaaagagcaggcaaacgggatcacaagcggaagtccactggaagatttatagatgcgcctccatcaccaccccagtcgaagcggcctagaaaattgaagggatctgactgatagtgctgttcaaatgtcaggatgaaaactctagtcaaacaaccaagcacttgcagtcttacagtagagatgaactagtagaacctaataggtcagcaacggcatcaatggaaatccgttgggctggccagtcatgcaggaaccgactttcgctgcttgccctgacttcgggccatatgctgggtggaccggttttggatttataatgtatctatctattattgtcatgtaatgttacacagataactgagaggtcgaaatcgtcacttttcagcagatttctgaattctgagtatgggagaccggtaagcccgacaattccgtttttgctcctgtccaaccagcacggtcaatcggttcacccaatagacgttcaacaaacaggctttgagagcacgctagtgcctgttt

SEQ ID NO: 131499 - DNA, 574 bp, Zea Mays
acccctacattttcttctcttagcgcgcctcttcccatgtcgcggtagggcagagccaaaccctaaccctagcttcctccagtgcgccttcctcgtgaggccgtatacatggacgcgaaggacatactagggcttccgaagacccccttctcgtcctcccaggagaagaaatcgcggccgcccaaggagccgcagcgcaagcctgatggcgtctcgcgcgaggtctatgccctcaccggaggggtgggaatgcccccgctcatgccgaccattgaggcatcgcacctgaagaggcggcctgctgcggagaaagagaaggtagcatggcagtggttacctttcacgtcatccgcacgaactgataaccttcaactctatcactgggttagagttgttaatggtattcagccaactggggattatcagtttgcaaaatataacaagagggcggatgttcttaaatatacggatgaagagtatgagaagtatttagttgaccctgattggagcaaggaagaaacagatcaactatttgaattatgtgaacgatttgaccttcgcttcataataatag

SEQ ID NO: 131500 - DNA, 75 bp, Zea Mays
agtgacttgcagttcaaatctgaatcatccgaagaaattcaattaaacaaactaaatcaaatagctatagcaaac

SEQ ID NO: 131501 - DNA, 480 bp, Zea Mays
atgtgcccggagatgactaccgtctctccacattgtgacattccagattccacaccgtcgcggccgcgagcgttcagtgtgcttctgtcttggactcttggtcccggacgacgaggcgagctgccgctagatacggacctcctgcagctgctgcccgaggctgaccacgccggcgacggtcttgagcgccgagcgagcggagcaggcgtaagagttggctctcccggcggagcagtcgcagggcgcggcggtgtgactgtgagcccggtgcgctcgaaggcgtggttgggaaaggctggacaccgttgctgtcacggtggccccagtccccgtggaggctgggatctgaggcgcatagaacggtggggcgagatgaaaataggtagagcagagctggtggcggcccaatccgatttgcgcaatggaggagcacggacacggttgaggagaatgggcagcggctgccggctggtgatgtag

SEQ ID NO: 131502 - DNA, 122 bp, Zea Mays
tcttttttttccttcagatattatcagtttacaacggtgttattttgtcattgatacatatattaatatctatactatacttaaagcaccagtttcaacggtcgtcatacgtcatcttttta

SEQ ID NO: 131503 - DNA, 895 bp, Zea Mays
attatcagggaagctatcttactaaagcagataagtgggtacaaatcaaggccaagcaagacggagacaaatttgcagcaaggctgtatttttcaggtgaggcagttaaaatcgttgctgcatattgttaacaatcatatattatgattgtattgtatatacttatttattggtttttagttattttttatcaaatctggaatcctaatatgcatgccaaaatgagttagcaataagattctagaacatatttgttttatactgtattcaagagcaaactggagaaatgaatttgcctatttttatccttatgcacttgacaacatgaattattctatttcagttcatctctttcttgccacaaatttaaatgaatataattgtttgtttcggtggcaattctgtgaagcccaaaagttccaagtcaccgtctaagaaaattgaaatggcgagatctcttaatctaatcggtacaccttggaagaacaaagctttaaggtctgacgagcacaaaactgtggtccattcagaagtaattctctgtgttgaaatttatcagaagacatatgcctttgttaagtcctaggaacttcttttggtgggaagccaattccttactgatctaagggataacatttattgtttgcctgttaagatgatggagctggctggacaacacggtcattctgggtattatattatcatggatacgttctacaatgatacaagacattattctaccactgattatagtaagcctatactagattggcttgagaattccagtgatgaggtaggagagaagtaggatgccataacatctggtgttctgaagaagcggcaaaaggacttgctgagcggtttgagtatttgtaatgtgcctaaacttaaatca

SEQ ID NO: 131504 - DNA, 330 bp, Zea Mays
atgaaaccaaactttagctcaggtacagaggcggctaacagattcacacttttttgtggggtgggggggactaatgaaagtaaaagaagattttttagctttggaacctttcagcgtaatgatggtaatcatgcgagattttgggaggacaaatggatgtggaacttctctttgaaagatcacttcccacaactttacaatttagtaagacgaaagaacacagtggttgcaagtgtttttagcaccgttctaaatgtttcttttcgtcatggattggtagaacaatatagtgtccaatggatgaaattattcaggagtgcaaagcactga

SEQ ID NO: 131505 - DNA, 86 bp, Zea Mays
tggcaatgttattaagaatattataaagtatttaaataaatttttgtataattttttatgtacattattttctccctacaacaaaa

SEQ ID NO: 131506 - DNA, 1159 bp, Zea Mays
ctatctccggccgcccgtggctctcgatttttttttcgcgatgctcatctcctgacctgttgtgcagatatttctcctctctatttcaaccgtggagcacctcttcttccccaacgccgcgcgcttgatattttcacgcgcaggctgcttatccttcgtgtgcggtcttcttctccccagctgcctctgctcgctccatctctgtccgtcgcgcctagccccagctctggtgccgcgtctccctgctcgctcgcgctctgccgagcggctctgcctgcgcgcgcgttcctcagccctgcgcgcgagctcaacatctccctgcgttcgctcggcgctcaactcccctgcgcgcgcagccttcctctcggcacgtcggtgaagctctagctcttgctcggccgctgttctcccctgcgtgccgacttctctgctcccgtcgtgaacctcctgctccctctgtccgttcatgccacgtccatctccttcagcttgccggtcgcgagtccctgcccatggccgaggtccctttcctgcgcgcgtgctcgccgtctctgctcctttgtcgtggtcgtcgcgcgcctgcgcgcagctcgcgccctgctagtccctgctgcgggttgtcgagctctctgcgcatgcgcaacttgctctttcgttgtttgtcgtgcgcacgaaaattctctgctcgcaacggcgtgtcaagtttccgcgtcgagctcctctcgtgcgtgcccgtcgtcgtctccgagttgattcttagctgtcgtagtatttttagttatcccggctgcgtctatggccgtcaaatcgtcagagtcgttcaactcgccgatcacatcttggtcggtcatcgattttctatttgccatgatacaacaccgttgttaaatccagtctctaacccgccatggcgttcgtcgtcctctagtcccagttcgaccccacttcaccagctcgcacccgacttcagctcaaagtcgtcgtcgttccgtgcatcagcaagaaatcccaagaatcgggtgaagacgaagctagcagcgccatattccccaagcgctcgacaaattgcctggatcgaaaaatcgctaccgatctcgcggattcgtgtcagctgtggaaacggtaagctgatgaagtgtttagaatagttcgaacgtta

SEQ ID NO: 131507 - DNA, 389 bp, Zea Mays
tcttgattcagttcataattcacatgaaatacaaataagaggtgcattgcatttcttaaggatatgtgcaagctaatatcatttacgtgtcataaaaacaacattcatagtttcgtagcctccagtatagttcttggtgcaagtaagataaacatataaattactaaagctgatggataaggttaccgtccggtttttttttcttagaaatttgttttttgatttaaagctggtaccttctgatagagcaagacgttctccgtgtcaagcattcatacaagggtatttatagaatcggcatagtccaaagcttacttacattggtcataaagtaaccaaataatataggatgcatgataaatatttctacagcaaaaccgagagaaacc

SEQ ID NO: 131508 - DNA, 1440 bp, Zea Mays
aaacacagtcaccaccacctacacccccgttgtctcctctccttccattgccacagtcggccttctccgtggaagccggcgggccgccgcctcctttgtccctgtcgtcgtgctcttccgtaccgccattccctagcactgtccacgggcgaggggaatcaaagccatgtacctaaggctgtcaaatctaagagtccaaggagtggagatgaaaatcagacaaggagaaaagctcccaactcttcttttcctaaggcacccattgtccaggagtcccatggtgactctggtgtcggcagtaataaagctggcaagaatgagtctcactcatccccaattgatgcagcattgcccgatgagtccaaggagaaaaggaaaactcaaaagccaccagcacagctctcttccatcaaaagagatgaagaacagtcaaatggtgagagtgcaaagcctcgaaaagttggaagcacgccatcatatggtttcaccttcaagtgtgatgagagatctgaaaaaagacgagagttctattcgaagcttgaggagaagattcatgcaagagagttagaaataagcaatttgcaagccaagtcaaaggaaactgaagaagcagaactcaaaatgctgagaaagagtttgaatttcaaggcaacaccaatgccaagcttttataaggaaccaacccctgccaaggttgaattgaaaaagatccccccaaccagagctaaatcaccaaagcttggtcggtctaaaaacaagtccatatcagagactgaagaaaatactactacggaccaacctgcccgtctgagccttgacgaaaaggtttctcaaaacggtgtgaaaaaaccaaccccgtcgagttcagcaaagaagccccagagaaagtcactccccaggctgccatctgaagaaacttgtccgcttgatgccacctcaaggcagctgaagaacaacaaactggatgaagttaatgctcaggagacaggatcagctacagggcaggtacaaggaagtgagacggaaacagattctgttcagagcgcaactcaagctggagctaaccctgatgaacagagtgtcgctcagtgaacagagtgtcgctcagtgaagatctcggtggccaagccaagtgatttgtgatggatggtgtgccttatctttgtgtgatgttgtgcttgtctactagagtgacttgtggcctgtatcatgctgtgttatactcctgtttttgttttcctgcgattgagcctgtatgttgcttatcaatctagatagcttttgttcataatctacagatatatccaaattgtcctaagtcatttgcagctggtcgcaagtgcagtcaccgtaaaatcccttaacgcctgtatggttgggttttgaggttgcttttgcttcccaaaagcctaaccaaaacggctgtttttttttaaaaaa

SEQ ID NO: 131509 - DNA, 709 bp, Zea Mays
tattggacatatatggagtttatatttcagacaaaccttatttgttccagcattggtatttgttgtagatccccccaaccagagctaaatcaccaaagcttggtcggtctaaaaacaagtccatatcagagactgaagaaaatactactacggaccaacctgcccgtctgagccttgacgaaaaggtttctcaaaacggtgtgaaaaaaccaaccccgtcgagttcagcaaagaagccccagagaaagtcactccccaggctgccatctgaagaaacttgtccgcttgatgccacctcaaggcagctgaagaacaacaaactggatgaagttaatgctcaggagacaggatcagctacagggcaggtacaaggaagtgagacggaaacagattctgttcagagcgcaactcaagctggagctaaccctgatgaacagagtgtcgctcagtgaacagagtgtcgctcagtgaagatctcggtggccaagccaagtgatttgtgatggatggtgtgccttatctttgtgtgatgttgtgcttgtctactagagtgacttgtggcctgtatcatgctgtgttatactcctgtttttgttttcctgcgattgagcctgtatgttgcttatcaatctagatagcttttgttcataatctacagatatatccaaattgtcctaagtcatttgcagctggtcgcaagtgcagtcac

SEQ ID NO: 131510 - DNA, 761 bp, Zea Mays
aaagtccaagcaaaataacctactctacaaagtaaatttcaattcctctaaaaatgaatggattcaaatggcctgcaatgccgtggtggggtagtctctctcccccacccctggaccctgatccccccaaccagagctaaatcaccaaagcttggtcggtctaaaaacaagtccatatcagagactgaagaaaatactactacggaccaacctgcccgtctgagccttgacgaaaaggtttctcaaaacggtgtgaaaaaaccaaccccgtcgagttcagcaaagaagccccagagaaagtcactccccaggctgccatctgaagaaacttgtccgcttgatgccacctcaaggcagctgaagaacaacaaactggatgaagttaatgctcaggagacaggatcagctacagggcaggtacaaggaagtgagacggaaacagattctgttcagagcgcaactcaagctggagctaaccctgatgaacagagtgtcgctcagtgaacagagtgtcgctcagtgaagatctcggtggccaagccaagtgatttgtgatggatggtgtgccttatctttgtgtgatgttgtgcttgtctactagagtgacttgtggcctgtatcatgctgtgttatactcctgtttttgttttcctgcgattgagcctgtatgttgcttatcaatctagatagcttttgttcataatctacagatatatccaaattgtcctaagtcatttgcagctggtcgcaagtgcagtcac

SEQ ID NO: 131511 - DNA, 1756 bp, Zea Mays
aaacacagtcaccaccacctacacccccgttgtctcctctccttccattgccacagtcggccttctccgtggaagccggcgggccgccgcctcctttgtccctgtcgtcgtgctcttccgtaccgccattccctagcactgtccacgggcgaggtaaagaaaccatctttccaccttctcccaccccctccggacccataggtgccaccggcatttgtcttgcgattgcttggcccagatctgcgtgcattcggcatttctcgtgcgtagatctcgcgtgtacggtgtacctcgtttccctcggcgggtggatcagtgacggcttggtcgagatggacgatgtggttgatgacatcatctgtggaacggatgcggcggttgccgtcgaggatggggccagtgggacgcccgcaatgcctagcttagggtgccagggtgaggaagagcataggaagggcaatgaggacaactcaggtgagagcgaggtgattaacccgccagaagaggctggcggggaggccacctcgcccctggaaggcaggaagcctcgcctttccaaggggaatcaaagccatgtacctaaggctgtcaaatctaagagtccaaggagtggagatgaaaatcagacaaggagaaaagctcccaactcttcttttcctaaggcacccattgtccaggagtcccatggtgactctggtgtcggcagtaataaagctggcaagaatgagtctcactcatccccaattgatgcagcattgcccgatgagtccaaggagaaaaggaaaactcaaaagccaccagcacagctctcttccatcaaaagagatgaagaacagtcaaatggtgagagtgcaaagcctcgaaaagttggaagcacgccatcatatggtttcaccttcaagtgtgatgagagatctgaaaaaagacgagagttctattcgaagcttgaggagaagattcatgcaagagagttagaaataagcaatttgcaagccaagtcaaaggaaactgaagaagcagaactcaaaatgctgagaaagagtttgaatttcaaggcaacaccaatgccaagcttttataaggaaccaacccctgccaaggttgaattgaaaaagatccccccaaccagagctaaatcaccaaagcttggtcggtctaaaaacaagtccatatcagagactgaagaaaatactactacggaccaacctgcccgtctgagccttgacgaaaaggtttctcaaaacggtgtgaaaaaaccaaccccgtcgagttcagcaaagaagccccagagaaagtcactccccaggctgccatctgaagaaacttgtccgcttgatgccacctcaaggcagctgaagaacaacaaactggatgaagttaatgctcaggagacaggatcagctacagggcaggtacaaggaagtgagacggaaacagattctgttcagagcgcaactcaagctggagctaaccctgatgaacagagtgtcgctcagtgaacagagtgtcgctcagtgaagatctcggtggccaagccaagtgatttgtgatggatggtgtgccttatctttgtgtgatgttgtgcttgtctactagagtgacttgtggcctgtatcatgctgtgttatactcctgtttttgttttcctgcgattgagcctgtatgttgcttatcaatctagatagcttttgttcataatctacagatatatccaaattgtcctaagtcatttgcagctggtcgcaagtgcagtcac

SEQ ID NO: 131512 - DNA, 1639 bp, Zea Mays
aaacacagtcaccaccacctacacccccgttgtctcctctccttccattgccacagtcggccttctccgtggaagccggcgggccgccgcctcctttgtccctgtcgtcgtgctcttccgtaccgccattccctagcactgtccacgggcgagatctcgcgtgtacggtgtacctcgtttccctcggcgggtggatcagtgacggcttggtcgagatggacgatgtggttgatgacatcatctgtggaacggatgcggcggttgccgtcgaggatggggccagtgggacgcccgcaatgcctagcttagggtgccagggtgaggaagagcataggaagggcaatgaggacaactcaggtgagagcgaggtgattaacccgccagaagaggctggcggggaggccacctcgcccctggaaggcaggaagcctcgcctttccaaggggaatcaaagccatgtacctaaggctgtcaaatctaagagtccaaggagtggagatgaaaatcagacaaggagaaaagctcccaactcttcttttcctaaggcacccattgtccaggagtcccatggtgactctggtgtcggcagtaataaagctggcaagaatgagtctcactcatccccaattgatgcagcattgcccgatgagtccaaggagaaaaggaaaactcaaaagccaccagcacagctctcttccatcaaaagagatgaagaacagtcaaatggtgagagtgcaaagcctcgaaaagttggaagcacgccatcatatggtttcaccttcaagtgtgatgagagatctgaaaaaagacgagagttctattcgaagcttgaggagaagattcatgcaagagagttagaaataagcaatttgcaagccaagtcaaaggaaactgaagaagcagaactcaaaatgctgagaaagagtttgaatttcaaggcaacaccaatgccaagcttttataaggaaccaacccctgccaaggttgaattgaaaaagatccccccaaccagagctaaatcaccaaagcttggtcggtctaaaaacaagtccatatcagagactgaagaaaatactactacggaccaacctgcccgtctgagccttgacgaaaaggtttctcaaaacggtgtgaaaaaaccaaccccgtcgagttcagcaaagaagccccagagaaagtcactccccaggctgccatctgaagaaacttgtccgcttgatgccacctcaaggcagctgaagaacaacaaactggatgaagttaatgctcaggagacaggatcagctacagggcaggtacaaggaagtgagacggaaacagattctgttcagagcgcaactcaagctggagctaaccctgatgaacagagtgtcgctcagtgaacagagtgtcgctcagtgaagatctcggtggccaagccaagtgatttgtgatggatggtgtgccttatctttgtgtgatgttgtgcttgtctactagagtgacttgtggcctgtatcatgctgtgttatactcctgtttttgttttcctgcgattgagcctgtatgttgcttatcaatctagatagcttttgttcataatctacagatatatccaaattgtcctaagtcatttgcagctggtcgcaagtgcagtcac

SEQ ID NO: 131513 - DNA, 60 bp, Zea Mays
atggcgccacacgaggtgcgaggttcgagcggcgtcatagaaggcgcgagtggagagtaa

SEQ ID NO: 131514 - DNA, 1534 bp, Zea Mays
ctgccgccgaggtccgagcaaactgtcgtacagactgagacgcttgcgcgattagcgaacggaacggaaggaagaccgtggaagcaaaggcgcgcaggcgcaagggagcagagcacacggcacaccacaagagaacaaatacacctcaggtggccttcctaagatcgccgactgaatctacctcgcttcgcgcctccagttccgcaccgggactgccgaatctgtgctcgggatcgtctcttccagcggcaatgggggccgattctgaggacgccgtcaagcagctcagcctcctcatggagcaagtggaggccccgctgaagagatcatttcagaatatgcaccagggctatcccaaagaaacactggtgcgtttccttaaggctagagagtggaacgtaccaaaggctcataaaatgattgttgattctttggattggaggattgaaaatgaaattgatagtgtgctagagagacctatagtcccagtagatttatacagatcaatacgtgattcacaacttattggcctgtcaggatacacaaaggagggtctcccagtttttggcattggtgttggacatagcacatatgacaaagcttcggttcactactatgtgcaatctcatatccagattaatgagtaccgtgatcgtataattttgcctaggctgacacaacagtttgagcggcctgttgtcaggtgcataaaagttctggatatgactggtttgaagctatcagcactgagccaaataaagatgttaacttccatatcaacagttgatgatttaaattaccctgaaaagacagagacctattatgttgtcaacgttccatacatattttctgcttgttggaaggttgtgaagcccttattgcaggagaggacaaaaaagaaggttaaagttttgagtggctgtgggagagatgaactgctgaagattatggactactcatcacttccccatttctgccgccgggagggctctggatcatcaaagcattcgtctgctgatgttgacgattgctactcccttgaccatccattccacaaagaactatacgaccatatcaaagagcaagcgtcgcgtagggagctcatcaagatgggatcgttgcacgtgagcattcctgagccagacccagaggacgccaagatcgttgaggtcatccaggctgagttccagaagatcggcgagcaggatgagtccaccaccggccacaaggattagcatgccccaaggacggtcatgtgcggagcgccgccggtgacctcccatgaagttgatcgctgctgtccgtttctattttttttggttgacagtccccagttgcgtggggaatatagcagcaagctcatgcatttgcatgatggagtttatgtagttggaggagaggctgagagataaacgagccagtgtatattagatgcacatgaagccataatcgccttttttgttagtatataaccaacacatatttagctgtatattaaagaagccaaaatccatggaatcgcctttttccatac

SEQ ID NO: 131515 - DNA, 417 bp, Zea Mays
atggccccgcacccttcttcactcctacctcactatcgcccagctaccctcaggcagcggcggcggcgattctcaatccgcggcgacggcatcactggtgttcaggcgatccggggagccaggctcgatactcgttatttctttgcagaaggtggagaggaggtccaggtgaaccttacgggagggttccacattggtgacgaatgcggtgacagtccgtccacagcgcctcgcggcaccgcgacggtgagcaggagaactggacgaacgagggggcggaatcgaacatggatgggttctacacgtggagcgggtagaggcgaactcggaggaggtttgcttaccggtgaaaaatggctggcgcctgttgactatggtgtgggtacacccggcggtggacgaagcggacctcggtga

SEQ ID NO: 131516 - DNA, 1545 bp, Zea Mays
atggcgccaaccccctgcagcttcacctccctgcgccccctcctctccccttggtcgatgccttctctgcgtgtgcggggttgccagcaggagctccctcccttccatggtcagcgcctaaggctccagcccctcctccctgccgtgcacaagctaggccaccagggagcttggtgcccaaccttttttttctggcttggacgcagcaagggtggcgcagaaatttttcttggcgattttcccctgccggccctgctcctcttcaccgagccgagctcggcgtccttgccatggtggacgctcggcgtccgagctccattccccctgctatgtgctgctgcgcagtgcaccgttcatgcttgctatgcgctcgacggaatgcacaacaaaccttgcgtcgtcgattccctacagcagcacccctcttcgccttgcatcgtcgtcaaacttcgctgctgtttccccccccaagaccagcacccctgcagcagccccagcccgctcgaccctccactccacagcgccgtcgttgtccctgcctatgcgcagtccaaatccctgcaacaagcctcgccgagcattgccccgcagcagcatgcaccttcgcctcgcgcgtgggtgctcgacgaatcgcagcagcgagccacgccctccggcttcgcttcagtcttccatgtgcaacgacgtgttcgtcttcgcgtcacatgtgcagcaaccccgaccgagggccggggcgccgtcctcggcggcggccgcggcgcagtgctccactgtttccgtgttcctcgccaagatcaacagcgcctcgtcactgccacctggagcaggagcctcatcaaccaatccttcaccatctccatcgacggcgacgtgccggtcacccacaaggtggagctgaagccttggccgttctggagcaagaagggcggcaaggcgctcgacgtgggcggcggcgaccacgtcgacatgttctgggacctgcgctcggccaagttcgcggcgggcagcggcgcggagcccgccggtggctactacatcgctctggtgagcaacgacgaagtcgtcctcctgctcggcgacggcatgaaggacgcgtgcaaacggaccaagtcgcgcgcgtcgctggaggacgccgtgctggtgtgccgccgggagagcgtgttcggcggccgcagcttcgcggcgcgcgcgcggctcgtcgccaagaggagcaaggagcacgagatcgtcatcgactgcacgctcgccgccgcgggctccagcaggtatcccgaaatgtggatcacggtggacggcttcgtgctgctgcacgtcaagagcctgcagtggaagttccggggcaacgagacgctgctcgtcgaccaggcgccggtgcaggtgatctgggacgttcacgactggctcttcgccggaccaggtgcgcaggcagtctttgtcttcaagcctggtgcgccgccggagataaaagaggacagtggagggaatagcatcgaggatgacgggactgacttttgcttcttcctccaagcacggaggatggaatga

SEQ ID NO: 131517 - DNA, 672 bp, Zea Mays
ttggtagaaggacaattcctcaagaaaattaaaagcgagccgtctcttctttagataactacttacatggtaataattgcatcatcatgtttattagtagtagcaggggaatgaagagaacatcaaagggaaattaagcgcagcagccatgaccatggacactgaaatcgagcttaattctgattattacgacatgctctgccgtgcagcgtactagtatatatgcgagtatgtacagccagcgtgcacgccgccgatgcggagagtccatcggcggtcgcgtcgtgcgtgctctgccccgacgcagtggccggtcaggagaggtaggtgccgcagacgccggcccccgcgccgcagccgccgcagccgcagcccctgccgcccacgaacacaggcccgttggatcgtccgcgccgccgcggcttcaccccttcctccccgtccccagcgccagaggagccggaagccgcgaagatgatcatggacaggagcgacaggcacacgatggccgcgcagaacacgacgtcgccgcccgccaccgtgcccgcgtggggctcgaacaccatgctgccaccggccataccgctctctcgctcgctcctcccagggagactcgttgctgctgcgtgcagggtgtgggtcgggtggggtgcgggcaagtgcgagcgagcg

SEQ ID NO: 131518 - DNA, 252 bp, Zea Mays
gaacgatacgagggacgtatcaaaagggcctcagtgtgtgtaacaacatagagcgatcaacggcggacgaatccgcctcaccgaaatccgctaagatcctttcggatccaaatcatcatgagcccaaacctcgaatccatccctcacacgatagggtgcggggcaaaagaagacacagaagcacaaaactaatgaacaggagaagagattagcacgacgaagaaaaaccgagcaaataaagcgcagagtggc

SEQ ID NO: 131519 - DNA, 1191 bp, Zea Mays
gcaatacaacatgcaaaatgcaattgtttgttagtctgcagtattactccatggtaatatcgtccttaatacatataatgaacctaatgtttatctgacacaggttctgtcagtgacactggacaagtggtctgacagtgaagttgactccatgatagaagttggtgggaattctcaggcaaacgcaatatatgaggcttttataccagagggctaccagaagccacattcagattctacccaggaagagcgagaaaaattcatcaggtctaaatatgagctgcaggaatttctgaagccaagcttgcgcattgtttctcatcagcctagtgactctggaaaacatgccggaaatgcttctcattctgatggttccaagagtcaagtcggcatgatcgagttcattggaatattgaatgtcaaggtgattggaggcaccaacctagccatcagggatatgtcaagcagtgacccttatgtcgtcctgacacttgggcaacagaaagcacaaacttcagtaatcaatggcaacctgaatcctgtctggaatgaagaactgaagctctctgttccccagcaatatggacctctgaagctgcaagtgttcgatcatgacatggtgtccaaggacgacctcatgggtgaggccgagatcgacctgcagacaatgatcaacgctgccgcagcatttggcgacccggagctgctgggcgacattcagatcggccggtggctcaagtccgaggataacgctctcgtcagggacagcgccgtggtggtctctggtggcaaggtgaagcaagggatggcactgaagctgcagcacaccgagtccggcgagctggagttggagatggagtggatgccgcttaacgtgtagaaatctgctcaagttgccacctttataatgggtgtgggatacaaagaatttgttttgcttttgttgccaagagaaattgttatattttggtaattggcaagggctctcttcaaaataaagatctgaatcgctaaaaggtgtgttgtggatactaaaatttgagagatgattcacaagaaactcctttttttctaatctaaattcaaggttcaccatgcagtttataacaatcaatgtcctctcgatttgttgatatcaatgtccattacatgcaaaacgacgcaaaatagaattgtgggtttgttttgcta

SEQ ID NO: 131520 - DNA, 1403 bp, Zea Mays
acctgttctagttctagtgatcagaggggagggaaggggaggtgaacggagggagcggaggaagatctcgggctctcagagctgcatcctgaacccatcgcgtaggaaggggcaaaggagtcggagctgatccggcagtcgctctctctcggattgagtacgatttgacgcatttgcggccgagctttcttgcacccaagatgagtgggcatggtgacactgcgacctcagctaagatggcgaaactgaaggagttgttgcaaaagagtgaaaaccacatttgtgctgactgtggtgcatctgatcccaaatgggcatcagctaatattggggtattcatttgcgtaaaatgttctggcgtccatagaagtctcggtacacatatttcaaaggttctgtcagtgacactggacaagtggtctgacagtgaagttgactccatgatagaagttggtgggaattctcaggcaaacgcaatatatgaggcttttataccagagggctaccagaagccacattcagattctacccaggaagagcgagaaaaattcatcaggtctaaatatgagctgcaggaatttctgaagccaagcttgcgcattgtttctcatcagcctagtgactctggaaaacatgccggaaatgcttctcattctgatggttccaagagtcaagtcggcatgatcgagttcattggaatattgaatgtcaaggtgattggaggcaccaacctagccatcagggatatgtcaagcagtgacccttatgtcgtcctgacacttgggcaacagaaagcacaaacttcagtaatcaatggcaacctgaatcctgtctggaatgaagaactgaagctctctgttccccagcaatatggacctctgaagctgcaagtgttcgatcatgacatggtgtccaaggacgacctcatgggtgaggccgagatcgacctgcagacaatgatcaacgctgccgcagcatttggcgacccggagctgctgggcgacattcagatcggccggtggctcaagtccgaggataacgctctcgtcagggacagcgccgtggtggtctctggtggcaaggtgaagcaagggatggcactgaagctgcagcacaccgagtccggcgagctggagttggagatggagtggatgccgcttaacgtgtagaaatctgctcaagttgccacctttataatgggtgtgggatacaaagaatttgttttgcttttgttgccaagagaaattgttatattttggtaattggcaagggctctcttcaaaataaagatctgaatcgctaaaaggtgtgttgtggatactaaaatttgagagatgattcacaagaaactcctttttttctaatctaaattcaaggttcaccatgcagtttataacaatcaa

SEQ ID NO: 131521 - DNA, 1563 bp, Zea Mays
ggaccacctgttctagttctagtgatcagaggggagggaaggggaggtgaacggagggagcggaggaagatctcgggctctcagagctgcatcctgaacccatcgcgtaggaaggggcaaaggagtcggagctgatccggcagtcgctctctctcgttggcgctgtgtagacttgcgattcgcgattcttctctgagtaattgggctgccacctgcgcttggtcccaattcacagtaaaatctacgcattgcgtggccacgttggctaggaatttggaagcaagtactctccgctttcagtaatcccaacggattgagtacgatttgacgcatttgcggccgagctttcttgcacccaagatgagtgggcatggtgacactgcgacctcagctaagatggcgaaactgaaggagttgttgcaaaagagtgaaaaccacatttgtgctgactgtggtgcatctgatcccaaatgggcatcagctaatattggggtattcatttgcgtaaaatgttctggcgtccatagaagtctcggtacacatatttcaaaggttctgtcagtgacactggacaagtggtctgacagtgaagttgactccatgatagaagttggtgggaattctcaggcaaacgcaatatatgaggcttttataccagagggctaccagaagccacattcagattctacccaggaagagcgagaaaaattcatcaggtctaaatatgagctgcaggaatttctgaagccaagcttgcgcattgtttctcatcagcctagtgactctggaaaacatgccggaaatgcttctcattctgatggttccaagagtcaagtcggcatgatcgagttcattggaatattgaatgtcaaggtgattggaggcaccaacctagccatcagggatatgtcaagcagtgacccttatgtcgtcctgacacttgggcaacagaaagcacaaacttcagtaatcaatggcaacctgaatcctgtctggaatgaagaactgaagctctctgttccccagcaatatggacctctgaagctgcaagtgttcgatcatgacatggtgtccaaggacgacctcatgggtgaggccgagatcgacctgcagacaatgatcaacgctgccgcagcatttggcgacccggagctgctgggcgacattcagatcggccggtggctcaagtccgaggataacgctctcgtcagggacagcgccgtggtggtctctggtggcaaggtgaagcaagggatggcactgaagctgcagcacaccgagtccggcgagctggagttggagatggagtggatgccgcttaacgtgtagaaatctgctcaagttgccacctttataatgggtgtgggatacaaagaatttgttttgcttttgttgccaagagaaattgttatattttggtaattggcaagggctctcttcaaaataaagatctgaatcgctaaaaggtgtgttgtggatactaaaatttgagagatgattcacaagaaactcctttttttctaatctaaattcaaggttcaccatgcagtttataacaatcaa

SEQ ID NO: 131522 - DNA, 1413 bp, Zea Mays
ggaccacctgttctagttctagtgatcagaggggagggaaggggaggtgaacggagggagcggaggaagatctcgggctctcagagctgcatcctgaacccatcgcgtaggaaggggcaaaggagtcggagctgatccggcagtcgctctctctcggattgagtacgatttgacgcatttgcggccgagctttcttgcacccaagatgagtgggcatggtgacactgcgacctcagctaagatggcgaaactgaaggagttgttgcaaaagagtgaaaaccacatttgtgctgactgtggtgcatctgatcccaaatgggcgttctgtcagtgacactggacaagtggtctgacagtgaagttgactccatgatagaagttggtgggaattctcaggcaaacgcaatatatgaggcttttataccagagggctaccagaagccacattcagattctacccaggaagagcgagaaaaattcatcaggtctaaatatgagctgcaggaatttctgaagccaagcttgcgcattgtttctcatcagcctagtgactctggaaaacatgccggaaatgcttctcattctgatggttccaagagtcaagtcggcatgatcgagttcattggaatattgaatgtcaaggtgattggaggcaccaacctagccatcagggatatgtcaagcagtgacccttatgtcgtcctgacacttgggcaacagaaagcacaaacttcagtaatcaatggcaacctgaatcctgtctggaatgaagaactgaagctctctgttccccagcaatatggacctctgaagctggtaatgaactacaccattactatatatcacatacagtaacagataatgccatctaaattttgagggtcccaataattatgccaacttgaacaaaccctttgatccgttctttcactcacgcaacaatgaaagcagcaagtgttcgatcatgacatggtgtccaaggacgacctcatgggtgaggccgagatcgacctgcagacaatgatcaacgctgccgcagcatttggcgacccggagctgctgggcgacattcagatcggccggtggctcaagtccgaggataacgctctcgtcagggacagcgccgtggtggtctctggtggcaaggtgaagcaagggatggcactgaagctgcagcacaccgagtccggcgagctggagttggagatggagtggatgccgcttaacgtgtagaaatctgctcaagttgccacctttataatgggtgtgggatacaaagaatttgttttgcttttgttgccaagagaaattgttatattttggtaattggcaagggctctcttcaaaataaagatctgaatcgctaaaaggtgtgttgtggatactaaaatttgagagatgattcacaagaaa

SEQ ID NO: 131523 - DNA, 683 bp, Zea Mays
atggaggcagaagtcattattgcatttgtaaccatgtgcattcatgggagaggtgttgaatctattatgtggatgtggataatttggacttgtgcatggtgattctacttggcgttgagtttttagttacttgtttacttgctgcaatttactgttcaaaagaaaagaaggaagtcctgaacacgtggttgtgtaagcacagttgatttacaatgtcctatttgttgttgttatgtttacttgttgagatgtgttatctcacatcttgcattgtttgatgcaggcacctaatttctccttttgggaatagagggatgtagcagcacggccactacacctttaataaaggaaccaccatttaataatgttgttaatcagagttggacaagtctagtgaattgctttgttcgtggttgagcgtttattttggggtgggctgagattcttatcccatttgttttgcttcagttgggtcataattaagttttaccacttttgcatttcagtttctactatgtgaattatatgtcttaatatcttgtatgagcttcatgtttcccctccttgttatgctagttttcaaaggaggtgctgccggatttttgctatatattcattctttattacttctcttgtgttgagtaagtttggtgggtggggtttgtggtattatccattgtgtg

SEQ ID NO: 131524 - DNA, 605 bp, Zea Mays
gcctgccccttctcctcgtcgcctgcctcatcggcagccgcgtcgtcacgggaggccagctcgaccccgtcgctgacgccgccgcggctgccgccgctgccgtcgcgatcgccaatgtcctagcgcgccggctcaagctccgctgcttctggcgccgcaagaattgaaggttgcatgtacacgagatagttcacgggcaacatactgatgaagtggttcctaaagagcttcgggctatatgacagtaacatattgatgaagtggttcctgatgcaagaacatactgatgaagtggttcctaattcaagagccgaagttactcaaggactggtaccgacatcaatgacaaggattgaagaagtggtgactggagggctggggttgtctcataacagattgctacgacagaagatggtagtactatttcagcaggagcaacgtcgtctccacgcattgttagatgtttagttaaaaatcaccctgaagaagaagaaagtgtaatctggccactgaaattgtaatatgtgaagtgcagtgtgtaccgatacgtgaacttgtttgaaactgtaatttgtgaaatgaactactgttctctagtgaaaata

SEQ ID NO: 131525 - DNA, 1374 bp, Zea Mays
gccggaatggaggaagctttcccctttcccgcccgcgtcccttttttttttcttcttcgggggcggacctatccatctcctcccccgactcccccgtcgctcaactcggcaaccggaagcggacagcgcactcggccgacaatgccggtttcagctcacgcctccggccctctgacgggtccatgtcggggcgaatccttgctctgcgcctcggacgggacggggaggggctgcctgcgcctgcgcgcgcggggatcagccgaccacgagaccacacgatcgattacaaacacgtctctccccgctgctgcaatcgcaaaaccccagccaccttttttttccgccggcctgcgccgatccatatccgccgcagtccagccgcagcgattctccaccttgatccagctgccgccgctctagctgctcgctcgttccacacctttcctctttttttccctcccttctcagcgtcctcgctcgctcgtccagtccagctccgtccgtgcttgcctcctccggcttcggactcccaatggccatgctgagggtgtgggagtgggactgggacgtcgacctcgactcggtgctcgacttcgtgctctggtgcctgccccttctcctcgtcgcctgcctcatcggcagccgcgtcgtcacgggaggccagctcgaccccgtcgctgacgccgccgcggctgccgccgctgccgtcgcgatcgccaatgtcctagcgcgccggctcaagctccgctgcttctggcgccgcaagaattgaaggtgtgccatgatcctccgctgctctgttctcagtactccgtaggctcctaggcgaagcgcagaaggccgcagttcgccgatctgagcttcacttgctgtcttgcggatgcctgtggtcggcttcggttgttgcaggtcagcgttgcgctgtccatgaatattaaggaaggatttgctctcgtgttcgtctctcggctcgcacacctttgattcttgtttctaaatcgatcgatttgtgcctggatgcatcgtgcctgtattgagcttccccgccggtggaggttcgtttccgcactggaccggatcggcgtacgtgtcgcccccggggacccatcggagattcggaggggagaccgcagaggaggtggatgcttgccgctagatcagcatggaataggtgactgttcctgttgtcatcatccacctttcaggccagctggccaggctaggcttggtgtccttgtcaagttcttgccgccgccgccgcctcacagattgtagctggactcgccgccgagaatgatcagcgtcaaggcaccatggaaacttttgtggtctctgaccggtttcccttactttctttccggagaaaattttgag

SEQ ID NO: 131526 - DNA, 348 bp, Zea Mays
atgtcctccaacccacaaatcattgtgcaagcactatgtgccatagctcccaaacccaataccttagaaccctctgttgatggacgaaaagaggtgcgtaccatggaaaatttagggggcagtatgccacggcggagtctacgggtgcgtccaggaaaagatggacatttaggcatcgtctcactgaaactaacagatgaagagattgctgaggacttgtatgccatgaccggtttcttactaaacaagacctcaaaacttggtatggggaaagtacctgttcatgcaactaataatatatctctcatggaagtaaaatataccttctcttcattcgtgtggctttga

SEQ ID NO: 131527 - DNA, 1701 bp, Zea Mays
cgtttcaccgggcgcctgctctcgcagtagtcgtaggctgcccacggccctcggcgccgaacacgcatctgcttctcctctcgatcccatccgcattcccatcccatccactccaccaccagatccccgcgagcgtagcctctcctcctcccctctcacgtcccaccgcatgcgcaacacgcgcctgccttcccggtccagccccctgcccccaggtgttgcgtcccccgtcgatcgccactcgaccctgctggtggagtgagtgccggtgatccatccggagttggatttgtcctcggcaaggaggttttgcaccatacaagatcgtcaaaattgccgaaatgggaggtataattagtggggactcgcctaggcacagctcaccagcatcgaagttagagaaaaagatggttgacgctatgcaacagagggcattaaaaggaacctctgtgaaatcattcaatagtgtcatcatgaaatttcctaaaatcgacgagagtttgagaaactgcaggactatcttccaggaatttgatgaagattccaatggtgaaatagatcaactggaactcaagcgttgtttccaaaatttgggtatcgaatcaactgatgaggagataaaagatctttttgaggcatgtgacatatatgaacatatgggcatgaagttcaacgagtttattgtcttcctgtgccttgtttatcttctaaatgaccctgcagtgtctgaagcaagaaaaagaatggggttagggaaccttgaaccaacatttgaaacattggttgagtcatttgtcttcttggacaagaacaaagatggatatgtcagtaagagtgagatgatacaggcaataaatgagaccattggaggagagcgctcttcagggcgcataggcatgagaagatttgaggaaatggattgggacaagaatggcacagtgaccttcaaggaattcctttttgcttttactcgctgggtggggatcgataatgaagacgatgatgatgaagataaagaagaatgagtgtgccaactaaggattaggcgttatgaattggccaggttgactggaggcctccagcagcttcctcctaccgttgttcagaagcagtagttcatgttttttgtgtgccgagctgatgaatatgtttatgttcgtataaacaggatgaacactagctatgttaaggatttgcttataaaaagttacaccgggtcagatgctgttctgttagcgtacattgtctttaaaaactatttgcattctgtatgacaatgtaaacttgtgaacggtagtagtgctttactttgtttcaatttggttgtttgctgcttctgttcattttttgtcatggatgtctattatgctctttaattaatacactagtactagaatgcagagaacccaagttgcctgtggttgtggcaagaatttgctgataagaagttgcagccctaccgctattatgaaatttgcaacccgttgttaagaaaatatgcagaacttccaaggttttggtggtgctcgttgcttttgaagtttgctgttgtgggacgagcaacacgtaccgtgtcctacggcctacgcgcttgcttccagtcttttcttcatcagtagcaaaggtgatcaaattggcgtggtagggatcatcatagtctcataggcaatgagcgcattgactcgctgagttaaagcgccg

SEQ ID NO: 131528 - DNA, 590 bp, Zea Mays
gcgcgccgcgcgcatgcgtttcaccgggcgcctgctctcgcagtagtcgtaggctgcccacggccctcggcgccgaacacgcatctgcttctcctctcgatcccatccgcattcccatcccatccactccaccaccagatccccgagagcgctcttcagggcgcataggcatgagaagatttgaggaaatggattgggacaagaatggcacagtgaccttcaaggaattcctttttgcttttactcgctgggtggggatcgataatgaagacgatgatgatgaagataaagaagaatgagtgtgccaactaaggattaggcgttatgaattggccaggttgactggaggcctccagcagcttcctcctaccgttgttcagaagcagtagttcatgttttttgtgtgccgagctgatgaatatgtttatgttcgtataaacaggatgaacactagctatgttaaggatttgcttataaaaagttacaccgggtcagatgctgttctgttagcgtacattgtctttaaaaactatttgcattctgtatgacaatgtaaacttgtgaacggtagtagtgctttactttgtttc

SEQ ID NO: 131529 - DNA, 2152 bp, Zea Mays
aacgttctaatcattcgttcgctcgtccacatccatcgcccccctccctctcgctcctttccccccgccttcccctcccggatccccttgggcagccggatccggcgaggcagaaggcgcggctcccacagatccgaggcgcctccgctggggactcgtccggtttcggtgggctcgaccttacaggcggggggcgtaattctgacaggacgacggagccgggtggtgcatgagcgctgagaggccccgccgccgctctgcgtaggagcacggtgcgccgccgtgaggcgccatgatcgagcagttcgttaatttcgtcatccggccgccccggtcagaatataatccagatcagtatctatgggagaaagagtttatccttgctggacgtaaatacaaacgactagacttggagcttacaaatgcaagaggctatatcttaaaatgcagccactatgttcctgcttttatcccagagaatactgccctcccatgtgtggtctattgccatggaaatagcggatgccgagcagatgcaaatgaagccgctgttatacttcttccttcaaatatcactgttttcacacttgacttttctgggtcaggtctatccggcggggattatgtcagtttgggttggcatgagaaagaagacctcaaatgtgcggtgtcatgtcttcgggacaataaacaagtttccactataggcctttgggggcgatcaatgggtgccgttacatgcctactctatggagcagaggacccttctattggtggcatgatattggatagtgccttcactaacctgtatgacttgatgatggaacttgttgacgtttacaaaattcgagttcctaaattcacggttaagatggctgtacagtacatgcggcgaatcattcagaaaagagctaagtttgacataatggatctaaatgttttaaggttggctcccaagatgtttatccctgtactatttggacatggtctgaatgatatgtttattcagcctcaccattgtgatcgtattcaccaggcatatgggggggataaaaatataattaaatttgatggtgatcataattctccaagacctcaatcatattatgattcagtttctatattcttctacaaatctttgcatcctcctctgctgcctgcagcacgatcaaagcttcatatgggagcatttaaagttggtaacataaccaatgagaatttcttctttgaaatcatcaatggtctacggccagcaaacactgcaggttgcagttcatcaaccgatgcacctaacatcccacatgatggcacatctgtaattgaattgttgtctgatagcatgaaccaactgtccattaagaatgagaatcacttgctgcaggactttcttttagatgaaaaccacagcctgccagagattgatagtgatagtgttggatcacgattgcaggataaaagaagtaggcgcaatgaggagtcattttcattcacaagctctaacagagaaagttggggcagatgttcatctttaggagcagccagtgatgaatcattctcaggcgataataatgataagcagaatttgacagtcaaggctttggctacgcctgtaagacaaaaccagaggcaaagccagaggaaaccgattgagaaagctaagcagaagaagattcaagccctatggaagaagattaagcgcgaaaaggtggagatgggggacagcctatcttcgcgtttgaagatgtgcctagggcaatctccgcagcacaagaggaatagatcgtctggaaccattacaacttcatagctctgacaactctactgaaccactgattgtccaccatagattctcccttattctgacctactcattgccacgttgtaacctatataccctaggtgaatatatgctacatgaccgcattgtagcatgccaggatgttcgaaagctgagaaagcacttgtatcatctcttgtaattgcctgaaacaagtgtaattgccatctctggctcgttgtcgcatgcaatttcctttcccctcttgcatcctgtgggccttgtatcatctcctgtaattgcctgaaacaagtgtaagtgccatctctggttcgttgttgaatgtaatttctttctcttgcatcctgtagtttg

SEQ ID NO: 131530 - DNA, 1972 bp, Zea Mays
aacgttctaatcattcgttcgctcgtccacatccatcgcccccctccctctcgctcctttccccccgccttcccctcccggatccccttgggcagccggatccggcgaggcagaaggcgcggctcccacagatccgaggcgcctccgctggggactcgtccggtttcggtgggctcgaccttacaggcggggggcgtaattctgacaggacgacggagccgggtggtgcatgagcgctgagaggccccgccgccgctctgcgtaggagcacggtgcgccgccgtgaggcgccatgatcgagcagttcgttaatttcgtcatccggccgccccggtcagaatataatccagatcagtatctatgggagaaagagtttatccttgctggacgtaaatacaaacgactagacttggagcttacaaatgcaagaggctatatcttaaaatgcagccactatgttcctgcttttatcccagagaatactgccctcccatgtgtggtctattgccatggaaatagcggatgccgagcagatgcaaatgaagccgctgttatacttcttccttcaaatatcactgttttcacacttgacttttctgggtcaggtctatccggcggggattatgtcagtttgggttggcatgagaaagaagacctcaaatgtgcggtgtcatgtcttcgggacaataaacaagtttccactataggcctttgggggcgatcaatgggtgccgttacatgcctactctatggagcagaggacccttctattggtggcatgatattggatagtgccttcactaacctgtatgacttgatgatggaacttgttgacgtttacaaaattcgagttcctaaattcacgggggataaaaatataattaaatttgatggtgatcataattctccaagacctcaatcatattatgattcagtttctatattcttctacaaatctttgcatcctcctctgctgcctgcagcacgatcaaagcttcatatgggagcatttaaagttggtaacataaccaatgagaatttcttctttgaaatcatcaatggtctacggccagcaaacactgcaggttgcagttcatcaaccgatgcacctaacatcccacatgatggcacatctgtaattgaattgttgtctgatagcatgaaccaactgtccattaagaatgagaatcacttgctgcaggactttcttttagatgaaaaccacagcctgccagagattgatagtgatagtgttggatcacgattgcaggataaaagaagtaggcgcaatgaggagtcattttcattcacaagctctaacagagaaagttggggcagatgttcatctttaggagcagccagtgatgaatcattctcaggcgataataatgataagcagaatttgacagtcaaggctttggctacgcctgtaagacaaaaccagaggcaaagccagaggaaaccgattgagaaagctaagcagaagaagattcaagccctatggaagaagattaagcgcgaaaaggtggagatgggggacagcctatcttcgcgtttgaagatgtgcctagggcaatctccgcagcacaagaggaatagatcgtctggaaccattacaacttcatagctctgacaactctactgaaccactgattgtccaccatagattctcccttattctgacctactcattgccacgttgtaacctatataccctaggtgaatatatgctacatgaccgcattgtagcatgccaggatgttcgaaagctgagaaagcacttgtatcatctcttgtaattgcctgaaacaagtgtaattgccatctctggctcgttgtcgcatgcaatttcctttcccctcttgcatcctgtgggccttgtatcatctcctgtaattgcctgaaacaagtgtaagtgccatctctggttcgttgttgaatgtaatttctttctcttgcatcctgtagtttg

SEQ ID NO: 131531 - DNA, 2171 bp, Zea Mays
aacgttctaatcattcgttcgctcgtccacatccatcgcccccctccctctcgctcctttccccccgccttcccctcccggatccccttgggcagccggatccggcgaggcagaaggcgcggctcccacagatccgaggcgcctccgctggggactcgtccggtttcggtgggctcgaccttacaggcggggggcgtaattctgacaggacgacggagccgggtggtgcatgagcgctgagaggccccgccgccgctctgcgtaggagcacggtgcgccgccgtgaggcgccatgatcgagcagttcgttaatttcgtcatccggccgccccggtcagaatataatccagatcagtatctatgggagaaagagtttatccttgctggacgtaaatacaaacgactagacttggaggcaagtacggagaccatttatcgagcttacaaatgcaagaggctatatcttaaaatgcagccactatgttcctgcttttatcccagagaatactgccctcccatgtgtggtctattgccatggaaatagcggatgccgagcagatgcaaatgaagccgctgttatacttcttccttcaaatatcactgttttcacacttgacttttctgggtcaggtctatccggcggggattatgtcagtttgggttggcatgagaaagaagacctcaaatgtgcggtgtcatgtcttcgggacaataaacaagtttccactataggcctttgggggcgatcaatgggtgccgttacatgcctactctatggagcagaggacccttctattggtggcatgatattggatagtgccttcactaacctgtatgacttgatgatggaacttgttgacgtttacaaaattcgagttcctaaattcacggttaagatggctgtacagtacatgcggcgaatcattcagaaaagagctaagtttgacataatggatctaaatgttttaaggttggctcccaagatgtttatccctgtactatttggacatggtctgaatgatatgtttattcagcctcaccattgtgatcgtattcaccaggcatatgggggggataaaaatataattaaatttgatggtgatcataattctccaagacctcaatcatattatgattcagtttctatattcttctacaaatctttgcatcctcctctgctgcctgcagcacgatcaaagcttcatatgggagcatttaaagttggtaacataaccaatgagaatttcttctttgaaatcatcaatggtctacggccagcaaacactgcaggttgcagttcatcaaccgatgcacctaacatcccacatgatggcacatctgtaattgaattgttgtctgatagcatgaaccaactgtccattaagaatgagaatcacttggactttcttttagatgaaaaccacagcctgccagagattgatagtgatagtgttggatcacgattgcaggataaaagaagtaggcgcaatgaggagtcattttcattcacaagctctaacagagaaagttggggcagatgttcatctttaggagcagccagtgatgaatcattctcaggcgataataatgataagcagaatttgacagtcaaggctttggctacgcctgtaagacaaaaccagaggcaaagccagaggaaaccgattgagaaagctaagcagaagaagattcaagccctatggaagaagattaagcgcgaaaaggtggagatgggggacagcctatcttcgcgtttgaagatgtgcctagggcaatctccgcagcacaagaggaatagatcgtctggaaccattacaacttcatagctctgacaactctactgaaccactgattgtccaccatagattctcccttattctgacctactcattgccacgttgtaacctatataccctaggtgaatatatgctacatgaccgcattgtagcatgccaggatgttcgaaagctgagaaagcacttgtatcatctcttgtaattgcctgaaacaagtgtaattgccatctctggctcgttgtcgcatgcaatttcctttcccctcttgcatcctgtgggccttgtatcatctcctgtaattgcctgaaacaagtgtaagtgccatctctggttcgttgttgaatgtaatttctttctcttgcatcctgtagtttg

SEQ ID NO: 131532 - DNA, 2056 bp, Zea Mays
aacgttctaatcattcgttcgctcgtccacatccatcgcccccctccctctcgctcctttccccccgccttcccctcccggatccccttgggcagccggatccggcgaggcagaaggcgcggctcccacagatccgaggcgcctccgctggggactcgtccggtttcggtgggctcgaccttacaggcggggggcgtaattctgacaggacgacggagccgggtggtgcatgagcgctgagaggccccgccgccgctctgcgtaggagcacggtgcgccgccgtgaggcgccatgatcgagcagttcgttaatttcgtcatccggccgccccggtcagaatataatccagatcagtatctatgggagaaagagtttatccttgctggacgtaaatacaaacgactagacttggagcttacaaatgcaagaggctatatcttaaaatgcagccactatgttcctgcttttatcccagagaatactgccctcccatgtgtggtctattgccatggaaataggtctatccggcggggattatgtcagtttgggttggcatgagaagacctcaaatgtgcggtgtcatgtcttcgggacaataaacaagtttccactataggcctttgggggcgatcaatgggtgccgttacatgcctactctatggagcagaggacccttctattggtggcatgatattggatagtgccttcactaacctgtatgacttgatgatggaacttgttgacgtttacaaaattcgagttcctaaattcacggttaagatggctgtacagtacatgcggcgaatcattcagaaaagagctaagtttgacataatggatctaaatgttttaaggttggctcccaagatgtttatccctgtactatttggacatggtctgaatgatatgtttattcagcctcaccattgtgatcgtattcaccaggcatatgggggggataaaaatataattaaatttgatggtgatcataattctccaagacctcaatcatattatgattcagtttctatattcttctacaaatctttgcatcctcctctgctgcctgcagcacgatcaaagcttcatatgggagcatttaaagttggtaacataaccaatgagaatttcttctttgaaatcatcaatggtctacggccagcaaacactgcaggttgcagttcatcaaccgatgcacctaacatcccacatgatggcacatctgtaattgaattgttgtctgatagcatgaaccaactgtccattaagaatgagaatcacttggactttcttttagatgaaaaccacagcctgccagagattgatagtgatagtgttggatcacgattgcaggataaaagaagtaggcgcaatgaggagtcattttcattcacaagctctaacagagaaagttggggcagatgttcatctttaggagcagccagtgatgaatcattctcaggcgataataatgataagcagaatttgacagtcaaggctttggctacgcctgtaagacaaaaccagaggcaaagccagaggaaaccgattgagaaagctaagcagaagaagattcaagccctatggaagaagattaagcgcgaaaaggtggagatgggggacagcctatcttcgcgtttgaagatgtgcctagggcaatctccgcagcacaagaggaatagatcgtctggaaccattacaacttcatagctctgacaactctactgaaccactgattgtccaccatagattctcccttattctgacctactcattgccacgttgtaacctatataccctaggtgaatatatgctacatgaccgcattgtagcatgccaggatgttcgaaagctgagaaagcacttgtatcatctcttgtaattgcctgaaacaagtgtaattgccatctctggctcgttgtcgcatgcaatttcctttcccctcttgcatcctgtgggccttgtatcatctcctgtaattgcctgaaacaagtgtaagtgccatctctggttcgttgttgaatgtaatttctttctcttgcatcctgtagtttg

SEQ ID NO: 131533 - DNA, 147 bp, Zea Mays
tgtggtgttgcttgaggagtgacgtttgtgttgtcggcatgttcttgccaacgtcaccatgtttaccctgaaaaaatgtaatggttatatgctatttaaagaaaacgatgaatacaaaccttcattgaaaatacaagtaatacaaaa

SEQ ID NO: 131534 - DNA, 96 bp, Zea Mays
atgaaaccatgatccatgaacctctgacctctcctcaagtggtttatgcaaaacttgacttattcaacggggcatgtctatggcaaatcaggaacc

SEQ ID NO: 131535 - DNA, 123 bp, Zea Mays
ttatattccacgactttccaaattttgctgcccaatgcacaaggactgattcgggtggagaaatgctttgaaacatctacaaaatactatttccgttccgttgttcaaaaaaagaagaaaaaa

SEQ ID NO: 131536 - DNA, 461 bp, Zea Mays
gtgaaattttctcagggatcgaccatgaatgtcagaattatttattttgcagtgatttatggagccctttggtagacttacctgcatgtcccatctctctggatcatcatcatttgaatagatctcgtcgtcaatagcaataatatcaggtatcttcttgatccacaacaacgactcattatgcgacctcgacaattttgacagtttcttagcggcactgcgctttgatgcctttaaccagcgctcctcaaagttctcacccacagcatcaagatccttcacccagtcaggcttgctgtcagcctccttccacagcatcctcgagttcaacacaaaaccagcccactccaaatccctaggcagaacaggggttgcttcaccaacaactgtggccgtcttcccagagaagggcaatgagttgaacgtgtgccatccaatcagatgccctgaggagttgcaag

SEQ ID NO: 131537 - DNA, 1333 bp, Zea Mays
acttatcttccttatcctatctccatcgccccatttcctatcctcccagccgatcccctctccctcacggcgccctctcccatggccgtcggccctccccgccatggacgccgctcttccttcctatagtacatcagcgacctcgtctccctcccttcccgtggactcctgctgcaggagctgttcctctactgcgctcgcctaagatggccggactcgcccatgatggctttcccctgtcgatgctgttctctagccgccatggcagtgcctccctgtatcagtccggtgaccgggccctccccttcccacgtcatgctggtgccatgtcttctccctcaccggccaacctcgccagccaccaggaaggtgtctccctctcggcagctcccatggccaccatcagccctagctgtgcttgccctggttccagcagctcgacgccagcccctctcaatcttccatcgctgccgctcagcttgtcccagatatattgatgttgacaattggaaatccatgtagcaaataaatgattttggaactgggggcaggtcagagtctagagcatgctcattccacgtatgttggtttcgtgacttgttttcggtgatttcagatctgaatggctaacattctgtctccatcgatatttaatagtaaagcaaggtttgtgacctggatttattgagtgctgtagacattggaggtggattttcctcaattggagatattgacaaattggaaaaaaatgtgacttgacctgtgctgcaacaaccttaaactaggaggggcttctaattcttcatctctaccaacagtcctctcctgttactttttaaaccaataactttttcaagtttgtgcagatgcacacatccttgagccaaaatagaaaaaaatcatagaagagttctttggtaaatataaattgtgcactcataattttgcaagtgcatctatggataccttcacttattcctaacgctattaactttgatgtctttcaggctgtcacgtgattcaagagtattaatgatatacaaaagtttgctttatggcaagtcaggtaaccacaaattttgggcaatgatagggatgtgcagtggtggtctcttaaaagaattttgtgttccagcgtagctatttccactgcaaactatcaaatcattacaaactagtgagttggcactgctgctgcctgcgtccgtccatcaaataatgtgcatgaactggaacaagcaacttgtgcacgaaagagcattacttgaacaagcagcttgtgcatgaatgagtaatactgtagatgattggtcatattataaagaaagtacat

SEQ ID NO: 131538 - DNA, 517 bp, Zea Mays
tcctgtacccgaaaatctacagaaaatatgatatacaaaacaaggtagcactgcggcagttgcaagttaccaacttatcacagttatcagaactgaggcatattacctgtccacgaggagcagaaagcatatttgcccatgtatgctggggttggtatgcagccattgcaatctctgtatctctagttccttccatggatctctggttgatgttagcggatccaattatcacatattcatcatccacaatcatgcctttcgagtgcacatacaccatgaatctcctattcttccgagcttggtcctgattggatatccaagttgcagcataattgtatttttttggggaaatcagtacctccttcagttttgggcatttctaaagtgtaccggaatcagcagcagaaaacagaacaatagtctgcagtctaacctgtgggttactggctgagaatggtccactagatgtgcaagtagtgtcctcagcttcacggttaccaaggcagaagaaattcag

SEQ ID NO: 131539 - DNA, 457 bp, Zea Mays
ctgagaggattttttgtagcgtggcgcgcgcctccctccacgccggtcggcccatccccaagaacatgttgagcgcacctggtggaagcacggggagccggagagcgcgggcccgtcgaagagacccgcgtcggcgacggtggcgaggtcgagcgcgaagtccccgatggccaccggggggagcggagcctgcggtggcgacccccgccggcggaagaccccgaagggcaggttctggatagggaagtgcgagcccgctgccacctccacgaacgaccgcagcaactgctggcccggctctgccattgctccccctcctcctccgctctctcgtggagtcgtggtcgtggcggatggtgtttggtttgttggtgtctcgatcatcttggcatactcctgcccacagccacccaggctcccagccacaggccacgacaacccgccgtgaaaactgaag

SEQ ID NO: 131540 - DNA, 350 bp, Zea Mays
tctacctcgagctctactcacataccactgcatgggtgttggggttcttgtattcctgatagtgatgaccctctcccacagccaccaagtctactctgtccagagcatcaagcgccagtggtgaccacgctcacaattcttcaccccaccatagccagaacgttctagggagttgctggcctgtatgaagcttgttccgtaatcatctcagaactcctaccagaaggagtgaagattcaagctgaagtggtgactgaagaggaatctactccagtggctgctgatcaagtggaggagccatctaactagggtttagtagagggatcgagtacctcttcactgcaataagg

SEQ ID NO: 131541 - DNA, 119 bp, Zea Mays
ttattcctctgatttttcgcttcgtgattcggcaattagagtgtgtagccgttttccgtatagcgtatcgacactttgtttatcgctaaaatatctgtatttcacttttgttaaaaaaa

SEQ ID NO: 131542 - DNA, 891 bp, Zea Mays
cactgcatgggtgttggggttcttgtattcctgctagtgatgatcctctcccacagccaccaagtctactctgtccagagcatcaagcgccaatggtgaccacgctcacaattcttcaccccaccatagccagaacgttctagggagttgctggcctgtatgaagcttgttccgtaatcatctcagaactcctactagaaggagtgaggattcaagctgaagtggtgactgaagaggaatctactccagtggctattgatcaagtggaggagccatctaactggggtttagtagagggatcgagtacctcttcactgcaataaggcaagcccccgtgcatttgccaccttccttgtgtttacaaaattttatcacttatatgttgcattaggtgatagaagttgattggttaaactcttgatgcattaccatccttgaaagcttgattaccataccttgccacctgttttataaaagctagagatgcttagtcatgctgatagactaagaaaaatgtttttgatctatgactcatgtttttacaaaaaagaaaatgggcttgggataatgaaggcatcaagacgttgataaattcattatccaggcatggcccctctgttaggcgccaatttttttgaaatagtttaaaatgggaccagacgttgagcaggaaaggtcgcccgtctatgtcgattaaggaccgtaccgattgttggcctgatgatctaggaccttttaactggccacatacctcgtcatgggtaagcctgaactcgactattccatacgtgaaaagacaaccgtgcactgggcgtgggagatggtgggagtagcagttaccctcctggcaagaggctgatggtagggtaatgtgctcacgggtagcacgga

SEQ ID NO: 131543 - DNA, 1734 bp, Zea Mays
cccatcttggcttcgcagtatatatgtgttcgagcgcaccaccacaaccacggcaccgacacgaatctgccatcctctccaacacgaagatggcgttcatcagcaatgtcgcagtgaaggcggcggccgtggccgcgctgctgctggtcgcagcggtgtcgcctgccgcgcgcgcggcggcggtggcggtggcgggaggggcgccgtcggtgccggcgggtccgctggacatcgcgcagctgggcgccaagggcgacggcaagtcggacagcaccccgatgatcctcaaggcgtggaagaacgcgtgcgaggcgacgggggtacagaagatcgtcatcccgccgggcaactacctgacgggcgggctggagctgaagggcccctgcaagtcctccatcatcatccgtctcgacggcaacctgctcggcaccggcgacctcagcgcgtaccaaaggaactggatcgagatcgagaacgtcgagaacctgtccatcaacggccacggcaccatcgacgggcagggagccctggtgtggagcaagaaccagtgccagcattcttacaattgcaagatcctcccgaatagcttggtgctggattttgtgacgaacgtccagatccgcggcatcacgctgctcaacagcaagttcttccacctcaacatcttcgagtgcaagaacgtgctgatcgacaaagtgacggtcaaggcccccggcgacagccccaacacggacggcatccacatcggcgactccagcaacgtgaccatcagcagcaccaccatcggcgtcggcgacgactgcatctccatcggccccgggagcaagatgatccgcatccatggcgtcaagtgcggcccaggccacggcatcagcgtcggcagcctggggcgctacaaggacgagaaggacgtggaagacgtgcaggtgacggggtgcacgatcgccggcaccacgaacggcctgcgcatcaagtcgtacgaggactccaagtcgtcgctcaaggccagcaagttcctgtacgagggcatcaccatggacaatgtctcctaccccatcatcatcgaccagaagtactgccccaacaacatctgcgtcaagtccggcgcctccaaggtggccgtcaacgacgtcgtcttcaagaacatccacggcacctccaacacgccggaggccatcacgctcaactgcgccaacaacctgccatgccagggcgtgcagctcgtcaacgtcgacatcaagtacaatggatccggcaacaagaccatggccgtctgcaagaacgccatcggcaagtccatcggcttggcaaaggagctcgcctgcatctgaaccaattgactaacatgcatatattatatatataatcactcttcgtaacctctctctttctcacgtactctcaagtctccaccgaatatataatccgctggtttgtattttctttcttctttggatcatcacaaaaccaaccgatgtaattattattagaccgacgcctcacaatcttggaacttattcattatgctagtgtatatctgtaatcccattccataatgttaatgttgatttgtggtcacgtttcaatgagagctagcatgcccacgctgttgcaaacaacttcgattgaagtaagaacataacaaatcgatgaaacgaacggaaggattagttaaacctatattgagcctctacttcaagtgaaagactcctaaacgcttcgtagtaaaacccg

SEQ ID NO: 131544 - DNA, 270 bp, Zea Mays
atggcgacgagctcgagggagggagaaacagcagccaagaagcaggcgcgcgcaggggagcaggttgggcgcggcagcaagaagggcgcgcggccaggatcccagcgaggccagggcaccacgggagagagagctcggccatgggaagagagaggaaggaagccgagcgagcaagaagcctgcgcgcgtgagaagaagcgagcaggggcaagtgcgcagcggccatggaagcagggcgcggccaggcgagcagggaaggagctcgggtga

SEQ ID NO: 131545 - DNA, 1742 bp, Zea Mays
catcgcagtatatatgtgtgttcgagcgcaccaccacaatcacgacaccggcaccaatctgccatcctctccatcacgaagatggcgttcatcagcaatgtcgcagtgaaggcggcgggcgtggccgcgctgcttgtggtcgcagtggtgtcgcctgccgcgcgcgcggcggcggtggcggtggcgggaggggcgccgtcggttccggcgggtccgctggacatcgcgcagctgggcgccaagggcgacggcaagtcggacagcaccccgatgatcctcaaggcgtggaagaacgcgtgcgaggcgacgggggtacagaagatcgtcatcccgccgggcaactacctgacgggcgggctggagctgaagggcccctgcaagtcctccatcatcatccgtctcgacggcaacctgctcggcaccggcgacctcagcgcgtaccaaaggaactggatcgagatcgagaacgtcgagaacctgtccatcaacggccacggcaccatcgacgggcagggagccctggtgtggagcaagaaccagtgccagcattcttacaattgcaagatcctcccgaatagcttggtgctggattttgtgacgaacgtccagatccgcggcatcacgctgctcaacagcaagttcttccacctcaacatcttcgagtgcaagaacgtgctgatcgacaaagtgacggtcaaggcccccggcgacagccccaacacggacggcatccacatcggcgactccagcaacgtgaccatcagcagcaccaccatcggcgtcggcgacgactgcatctccatcggccccgggagcaagatgatccgcatccatggcgtcaagtgcggcccaggccacggcatcagcgtcggcagcctggggcgctacaaggacgagaaggacgtggaagacgtgcaggtgacggggtgcacgatcgccggcaccacgaacggcctgcgcatcaagtcgtacgaggactccaagtcgtcgctcaaggccagcaagttcctgtacgagggcatcaccatggacaatgtctcctaccccatcatcatcgaccagaagtactgccccaacaacatctgcgtcaagtccggcgcctccaaggtggccgtcaacgacgtcgtcttcaagaacatccacggcacctccaacacgccggaggccatcacgctcaactgcgccaacaacctgccatgccagggcgtgcagctcgtcaacgtcgacatcaagtacaatggatccggcaacaagaccatggccgtctgcaagaacgccatcggcaagtccatcggcttggcaaaggagctcgcctgcatctgaaccaattgactaacatgcatatattatatactaggtatatgcccgtgcattgcaacggaaaacacttgtgtatacacaggtcattttttagtaatgctatcaagaatcaactcataaatcataacaaatgtcgaagtctatcatttgaaacaaccaaaatttgactcaatgccattattaatcgaaatagacaaatcctaggttgataatataggatatgatgatgtaccatggccttcatagaacaattttgtattgtagggtgaaaaattataaaaagctatattctaagcatattgaaagggatggtgagttgtgattatcaaaattcatgttcaactcaagttcacacaattgccaggcctctattgtacatacttgttctcaagcaacaaaatatatatatatactcaggttag

SEQ ID NO: 131546 - DNA, 3196 bp, Zea Mays
ttcagccacaggcatggagcggaatggcgagagccacctcaaggacccgcttctgccgacgacatctggcgcctctcctgctggggcgtctccaaggaaggagaggaagacgaggaaggtcctgttcagtgtccggggcatctcctgcgcttcttgtgccgtgtcgattgagaccgttgtggccggcttgaacggggtggagagcatccaggtctcctcacttcagggccaggccgtggttcagtacaggccagaggaaactgatgcaagaaccataaaagaagctattgaggacctcaactttgaggttgatgaacttcaagaacaagaaattgctgtgtgcagactacgcataaaaggaatggcttgtacaagctgttctgaatctgttgaacgggcgcttcaaatggtacctggagttaagaaagctgcagtgggtcttgctctagaggaagccaaggtccattacgatccaaatgtcactagtcgtgatcgcataattgaagctgttgaagatgctggatttggtgccgatctcattagttctggggatgatgtgaacaaagtgcatctaaagcttgagggtgtgaattctccagaagacaccatactcatccagtctgtactggaagctgtggaaggggtgaacaatgttgaatgggacacagttgagcagacaatagaagttgcatatgatcctgatttcactggtccaagattacttattcagtgcattcaggacactgcacagccccctaaatgctttaatgttaccttgcactcaccaccaaagcaaagagaagcagagcgcaatcatgaaattaggaattacaggaaccaatttctttggagctgcctgttttcggttcctgtattcctgttctccatggttcttcctatgctttctccttttggggattggttggagtacagaatctgcaacaacatgacaataggcatgctactacggtggttgctgtgttccccagttcagtttattgttggttggagattttatgttggagcctatcatgcactcaaacgaggatactcaaacatggatgtgctggttgctttgggaacaaatgctgcttacttctattctgtgtatattgttctgaaagcacttacatcagactcatttgaaggccaggacttctttgaaactagcgctatgttgatatcttttatattgctgggaaaatatctcgagatagtggcaaagggaaagacatcagatgcgttgtcgaaattgacagagcttgcaccagaaacagcgtgccttcttactttggacaaggacggaaatgccatttcagaaacagagatcagcactcaattacttcagagaaatgatgtcatcaagattgtgcctggcaccaaagttcctgttgacggcgttgtcataaaaggtcaaagccatgtcaatgaaagtatgataactggggaagcaaggcctattgcaaagaaaccaggcgacagggttattgggggtactgtaaatgataacggttgcataattgttaaggcgactcatgttgggtcagaaacagctttgtcgcaaatagtccagttggttgaagctgctcaacttgcaagagctccagtgcagaagttagcagacaagatttcacgtttttttgttccaactgtggtggtggctgcatttcttacatggcttggctggttcatacctgggcaacttcacctctacccccagcaatggatcccaaaggccatggatagttttgagcttgctttgcagtttggaatttctgtcctagttgtcgcatgcccatgtgctttgggacttgctacaccaactgctgttatggttgcaactggtaaaggtgcttctcaaggtgttctcattaagggtggaaatgcacttgagaaagctcataagattaaggctatcatatttgataaaactggaacgctgacagttggtaaaccttctgtcgttcaaacaaaggtcttctcaaagataccacttctagaactctgtgatctggctgctggtgctgaggcaaacagcgagcatcctctatcaaaagctatcgttgagcacacaaagaagctcaaggaacaatatggatctcacagtgatcacatgatggaatctagggactttgaggtgcatccaggagcaggtgtcagtgcccatatcgaaggcaggctggttttggttggaaacaaaaggctgatgcaggaatttgaagttccgttgagtcctgaggtggaggcgtacatgtccgaaacagaagagcttgctaggacctgcgtacttgttgctatcgataagatcatctgtggggccctcgctgtttcggatcctctgaagcctaaggcaggccaagtcatttcttaccttaagtcaatgggcatctccagtatcatggtgaccggtgataattgggctaccgcaaaatcaattgcaaaggaagttgggatcagccaggtgtttgccgagatcgacccagtgggaaaagctgaaaagatcaaagacttgcagatgcaagggttgacggtggcaatggttggcgatggggtaaacgactccccagcattggcggcggcagacgtgggcatggcgatcggtgctggcacagacgtggccatcgaggctgctgacatcgttctaatgaagagcaaccttgaggacgtcatcaccgccattgatctctcgcgcaagaccctctccaggatccggctgaactacgtgtgggccctgggctacaacgtcctgggcatgccgatcgccgccggcgtcctgttccctttcacgggcatccggctgcccccttggctcgccggggcatgcatggctgcctcgtcggtgagcgtcgtctgctcctccctgctcctccagctctacaagaaaccgctgcacgttgaagacgcgcccaggcccagggaggactcagatttggtgtgactgcgagtgaggactgatccctcgatctcgatgtgtactaacgagagcttgctggcgtcactgatgcttaacgagccaacacctgatcgatccgtgtacagcaagcaacacgttttggaacagttcgccaattgattgtgcaataattcaagacaaggtttataactttatatgatactagtacaatgacagcacataatcatagattttttttcggaaattacaagaaaacatttgctcttttgccataacatacaa

SEQ ID NO: 131547 - DNA, 98 bp, Zea Mays
ccgcctgcttcacgccgcgctccctgctccgcgtcgcctttattatagtctgatgccactacgcccgccaaggcacctgccaatccctcctctttcaa

SEQ ID NO: 131548 - DNA, 816 bp, Zea Mays
atgtcgccttcgttgtcggcgccagagtcagagttcgccgaccccatcggcttcatctctgcgcggacgtgggcgtggctgcctgggacctctggaccggtgtggaggacatctgccatagtcccaatcttttatgcctccgggtttcaagttgaccaaacagagtggatacagtcatgctcaaagttggcaagctgtgtcaacaagcaggccccatctgctactcgcttcatgggcatgcagcaaagccttggtattcagccgacgcagcttgggaaggatgcacctgcagcaggagctgcacgtagagttagtgctcaacgaaagatgatcgaggttgagtctgttgtagctgctgataaacaagagattcgagaagatgattatgcagcggaaaaacttgatattgagctgagtggaagttacctgttaccaccacgttattctgagggtgcattgattaaaaagctagaagaacttggaattgggaggccatctacttatgcatctataatgaaagtgttactgttatgcgatcaagtgactggtgatgtgatttgccacggtgagaaaaacttcttacaagatgggcgtaagagctttcctagtggccacacttcgcggagtagggaagccactgtcgatctcttcttaaagtcagctgagtatttggactatgcagttcatcatgatcgctgcaacagccatgcagttagactcgtatttatgcaattcgttacaccgcgtaaaaaatctggcatgttgttcactggtggacgcatctccgggttggatcgtaataaccttaagttttga

SEQ ID NO: 131549 - DNA, 531 bp, Zea Mays
gatcaccggccgtcgagcgagcagtctcccaattccacccaataactaataacatctcctcgaacgccaggttccttggaccactatatccaggagcgacgaagtgatccacccgccagccatggagatgaagaaggtcctctgcgccgccctcgtcgccgccgcctcggccaccgccgtgctggcctcggtcgcctccgaggcgccctccgaggcgcccgccggcgcggccggtggtgcggctggccctagcgcaagcggcgccgccgccgccgccgtgcccgccgccggggcgctcgtcgcctccttcctcgcctactacctccactgagcgacgacgcgcggggcggcaacgttgggatgcatcgtgtttggttcatccgattaattaattgttttttttatttacgtggtttgcgattggttaattgtttgtttgttcgttcgtttcgtggtcgtgtgaattgtcgaagggtttgttctgtaatcgtgactcgatgctaatattattatgatcccaattttatttta

SEQ ID NO: 131550 - DNA, 1696 bp, Zea Mays
tcccggcgcgcacactcaaaagggcggcaaaattttccgctcgttcccgccgctctcccgtctcgcgtgtataaaatcacaattgccacagatgtccttacctctctcccagtcaccgccaccacagccgccagcagtccatcaccggttccgttcgaatgggccgcaagggacgcaaggctagggtttcgcgcgacgccgacgtcgacggcagcgaggatgagatggccgccgctcctgccgccgctgcgggcaggagcctctacgagatcttgggagttgagaagactgcttcacaacaagaaataaagaaggcatatcacaaattggctctgcgcctccatccagataagaatcctggggatgaggaagccaaagagaagtttcagcagctgcagaaggttatatccattcttggagatgcagagaaaagagctttatatgatgagactggcattactgatgatgatgcactggtgggagaagctgcaaatgatcttcaggagtacttcagaacaatgtacaagaaggtcactgaggctgacattgaagaatttgaagctaaatacagagggtcagattctgagaaaacggacttgaaggaactctacacaaaatataagggcaacatgaacaggcttttctgcacaatgatttgctcagaaccaaagcttgattcccaccgcttcaaggatataatcgatggggcgattgctgaaggtgagctgaagtcaactaaggcgtatgagaaatggtctaaaaagatttcggagatggagccaccaacaaatccattagagaggagagcgaagagtaggaagaaaagtgaggagaacgatctgatcctggccatctcacagcgcagggctgagcggaaaaaccagttcaactccatcctctcgaacatcatgtccaagtgtgattccaaggcaagcagttctgagcccacagaagaggagtttgagctggcgcgacagaggctggagagcaaaatggccaagaggcgcaaatgatgcctgctgccagccttctttccctatgcgtctatgccgaacatcgtcttaagctttgggtgtgatctgattttaccagcacgcaagtgatggttgtgagagctagcttgagcgtgtcaggatctgtatcatatctcgtgtcctctgggacagtaggtcgtgtggttatcgccttgccgagagggaagctttctctgaacttcaataccatggatacgtgggtaatggctatgcagttgtagtttagtgtgtgtgtggttatatatataatgtaatcgtgccagcagctatccgattatgttctttgaagaaagctgtagtgccctccaggcctcgaggatgcaagtgttgaagggcggacaacaggcgggctgtggcttataatccagtcctcacgaggtgtaattgccattaatgtcgaggtttacaacagcatcaagtcctgcaagtaccgatgcaaataccatcaccatgtttatcatttacaagtgtaagagctttccatttgaataacgctctagagtcagagactcgccgctgttggctttttgactagagcaaaaacggtgctcaaggcaatggccatcgttgctgctgaaatcgcagaaagtgaagctggcatatgattagagatgtcaatgggaaattttccaccctttatagtatcctatcatgtttgatct

SEQ ID NO: 131551 - DNA, 690 bp, Zea Mays
atggagattccagcaggagacagtggaggagatttcagtttattgtgttcatatactgttatgcactgtaacatccgacccacttgtctgaagtggtgccatcgcagcccactacacggcccaaatcgagatgtacaaaagcagcagctaggtctggacagagggggggggaaagaggtggaagattaccttgctgaatctaaagaaggggctatggatgaggtgctgcaggttgagctgatcgatgatgaagttcaatgggatgaggagtcacctaaccagagtgtgcataaaggcttactgccacacacagtcaggaaaattgtatatctaaaggggttcagtcagggaggaggaatatcaaccatgacagaagtccagaggtgccatcctttagcttcattatctactactaaactttcagttgctatagcaattgtaagggttgctggatgtgagtttgcagtcaagtattatccttcatttaatgaagcaatacagagaatatatgtgaatgacatagctctagttatggtggatcattcgtgctctggctattgcagcgaagctgatgctcactattgcagaactggcaactccccgttatgttgcagaactgacagtgatagtttaattgagaatggttatgcttgttctgtggaaggaatcagcgtggccataggagtttaa

SEQ ID NO: 131552 - DNA, 610 bp, Zea Mays
cttccctctcagctcccttgctgtggatttttcccagcgcgcttctctgttggccatcactgctccctgatgcccggactcgccggtcaccggtctttagctcccacgcgcgtcgctggctcactgccgtgcgctcgccccgctcggatttcgccaaccgtcattctctaacccgtgtgccggtcagcatcgtggaattttggtttgatcggctcgttattgaccttgccggtgtcgtcgaaccccttcctcagtcgcgtcgggtctccctgcctgttgtcgtcattccgcgcgttatcaagaaatctcaagagtcggatgaagacggagccagcagcgtggtgttcaccaagtgcacgacaaaaagctcgaacgtcctgcgcgactcaagttcgattcgtcaaaattattcagtcgaagaaaagatcttcagcaattgattaccgaagaaaagaaggcccctggatgacgtcaaccggaaaccgtcatcgtacttctgactattgcgtcgaagtagtcagggtaagcaaatttgttattcgtgtcagcggatggatggatggtttgactacgtataatatttattagattgcctgagtcgttttggtaa

SEQ ID NO: 131553 - DNA, 1173 bp, Zea Mays
aggggaacatgttggatatgtcctcagactcggtggagtacatgctgcgatggtgggatccctgcatcctactccagttgccacactgccatttctcgctccacactctgctgtggtacctttctgtgaaggggtctacaaatacgccacagcttgggacgctttgagaaaagatgctgcagtattaactcaagatgtaacacttttggcagaagatgctgcacagaaaagcgggatcaccatcgaacaagtcagggataggttacggtcagtgttgtctttgactgatgtcactcgatttccagtcccaaagaacccacaggcggtcatctttgttggtgcaacggacgatggttatattcccagacattcagtgatggagctccagaaggcatggccaggctcagaggtccggtgggtaacaggtggccatgtctcctctttcttcctccacaacgatgcattccgcaaggccatcgtcgacgcccttgatagattgtaacaccagaaggtgagagagaggccatccttgtgatggcactttatgttgtgtgacatttctgaacttggggttgcggcatgagctgaaccctctgtaactgccaacctaactgctcttagtgacgctgagattggaggtagggtggctgtacatgacaattgtagaatgtagcaccccattatttggcaattgttctgcaaaatatttgtttgtcaccatgtatcaatttgaatgctacatcttctgattgtctgacatgcatgtcaatcagctaggcaatttggcagtttcagttattattccttcctagtactattttatattcatattgatactgctggatcagccactatttagtttatatactccacagttacatgggtcatcagaattcctgatcagtgatcacctctatctgtatctttgaaactatctctactttgtaacgtctatagtaaaccgtctctactttggtagggcggtgtctggctgggcctggccgcctgggtgctcgccgctcgctcatgtccttgccgggtgtgccagagttcgctgagcgcgcggaggcggtgggagtagtcggcgatggcgaggaagcaccgcgctgactgccgcgccgtcaggatctgcggcagccggtgcagcgtctgcagcctaagcgcgtccgcctg

SEQ ID NO: 131554 - DNA, 882 bp, Zea Mays
cagaacccataagatgttagcatatccactcacaaaaggtcttccacccaacgtgtttagagagcacgtagccgacatggaattaaaggaaaacctatgattctagatcaaggggctattaaacaaccatctcacaagataaaaaaataccctaccttgatctagaggggcatgttctagtcaattagttcggtggttggtctctgcaatgcattgggtttaatgtgtcattttgtcaaatggtgaaacatagaaagttaaagaataagaaagctgagaacagaggggagcatgttggatatgtcctcagacttggtcaaggaacactcacaaaaggtcttccacccaacgtgtttagagagcacgtagccgacatggaattaaaggaaaacctatgattctagatcaaggggctattaaacaaccatctcacaagataaaaaaattaccctaccttgatctagaggggcatgttctagtcattagttcggtggttggtctctgcaatgcattgggtttaatgtgtcattttgtcaaatggtgaaacatagaaagttaaagaataagaaagatgagaacagaggggaacatgttggatatgtcctcagactcggtcaaggaaccgagctaggatctaacccatgtgccctgatcgggggtgcaaacctcctgtggttgtggcccccggtcacatgtgctgtattaacgaatataggggccgagatggaagccaactcttccacgctttcgacaaccctagccgccacacacccagaaaggggccaatttttctaccagcgcctaatgactgaaaatcgcccaaactccccagcaatgacacccgtggatcctaacagttctatgctactagtcaccgacgtt

SEQ ID NO: 131555 - DNA, 771 bp, Zea Mays
atggcgtcgtcatctccgccgcagcacgccggggcgggctcgtccgcggacctcgcgcgattcaagagcagcggcgttagatcgatgaacatggacgacatcatccgtaacatctacgaccccgaggccgtcaacgctgccgccgccgaaagcgccggcgtcggcccggcggagccctccctggcagccccggaggctgcggctcggcggacgtcggaggaggtgtggaaggagatctccgtcgctggagggctccccacgcccgtcctccctatccctcccgccgccagctccggcggcagcggcgccgtggagatgacgctagaggatttccttgccagggattcctgcggtagggcggcggtgatggaggggaacatggcgctggggttccctgacggtgacagagatgcggcagggagagtggcggggggagtgggcggcgtgaggggaggcgggaagcgggcgcttctggaccacgcggactgcgccgtgatgcagcggcagaagcgcatgaagaagaaccaagagtccgcagcgaggtccagggacaagaaacaggaggaatccatgattagcatcgctgatgctttgtgtcagtctccaaacacggaggtttatgtttcgctttcatgtccaatggttctgtctttttttgatccattcatgtccgattcattagacaagttttgtttagtagggatgaccaagcgatgcacaggagctatgaacaacgatgactaccgacctgcagcacatacgagcccatga

SEQ ID NO: 131556 - DNA, 147 bp, Zea Mays
tattgtcttttttttttgtttgtttttcctttcgttttctagtaagtcttttacacatagggacgacgttgccaaattttgatctccctccggccgggtaggttatttataatctggcagtatttcttggtcatccaaagttctaaa

SEQ ID NO: 131557 - DNA, 281 bp, Zea Mays
atggagattttttagtatgttcggcaaatggattcgtatccaaatatttcaatcgcttatcggatattttttacgatgcctgtgactgtggcatcagttgagagaagcttttcaaagttgaaattgttgaaaaactatttaatgtcaacaatgtctcaagatcggctcaacgaattggctactttatgtatttatgtattgagaaaaaatattaattagatgtggttaatagcaatactattatcaataacttcgcatcaagaaatgttagaagaattttt

SEQ ID NO: 131558 - DNA, 121 bp, Zea Mays
gtgttctttgcaacttaaattttatgtggcttttatctatctaatacttttatacttttacataatcttttatgtaattgttgtggattttttaagatatattatgggatgttcttttaat

SEQ ID NO: 131559 - DNA, 520 bp, Zea Mays
gccgcgctctgtactactctagctcgcattcattcctaggttcgagtttgtgtaccacctgttcgacaaaatgtgtgaaccagttatcgacctcgccatggccagccggtgtgccatatatcgctcctcgccgatgtctccctctgccattcctacaacaggtgaggcacctaggatgtttgtgatgaaaaaagggggtttcagcacatcgcacatctggtactccacgtacagattgaatcagagtcgtcgtcatttccacagtctgattttgtgggatgagctcttttgctatcctgattagtagcatagatggtggatacgtaggactagtttagctagaatgcattcaatatttgcaatatgcttaaattctcgatatttagtagacactttgagtgattaagttaagtcaacgatgcgaattgtatattaggtgtttataaagatgccttatctcatgtaatgttaagtggtacgcaaaaacattaagtatgcatagtcatctgatgaaatgact

SEQ ID NO: 131560 - DNA, 209 bp, Zea Mays
cacaacctttcctttttcaccaaatcacaaaaagaaaatgacggcagatggtccccatggccatgtagaaaacgcaacttcaactgaacaagagatatcacacgcaatcaggacaacacatgaacattccaaggcacagttaatatgtatcacatacaaaccataacactaaactttttctgcacacacctaaccaaccactattgtcc

SEQ ID NO: 131561 - DNA, 1366 bp, Zea Mays
aaatttggatcattccaaacgagactgtgaactctcccagctcaagcccacctccctgctcaagcccagccgtccactgcctggctccctcgtccggtcgttcccgtctccctcctcgcgtcgcgtccaccattgttcctgtcgacgctgcgccgcacggctcgcaccgccgacagtgcctcagtcctatcgagcctccctcttcccagatcaggccctagctgggctacagccgccgccgccgctgccgcatccgtcaccttcacaccgcgtgcgcgcgcgctctctctctctctctctctttgcgacgactggacgggctaccgcagtcgccaccataggcaccacgcccttcgctgatctattcgctggcgaagaacgctctcaataagatcgatggagtgcgtggtgcagggaatcatcgagaaccagcatgtcgatgctcttgaggttctactccagggactctctggtgtcccgaaagagcgttttagggtgcatgagctctgccttaaaagtgggcccaatctaggtgttgtcccatcggaggttcgtttgttgtgtgacttagctcagcccacaccatcctggaccataagacatgttggtggtgccatgagaggtgctggtgcggagcaaatctcagttctggttcgtacagttgtggagagcaaagctagcaagaacgtcttgcactacttctacaccctagggtacaagctagaccatgaactcttgaagagcggttttgcatttcgtttccaccgaggtgcccaaatcactgtcactgttacatctgctaacaagatgtcaaggctccatgcaaccgatgaagctacgccagtcactcctgccatacagctagtggaaatcacagctcctgctgctgctgataattacaatgatgttgtttcagctgtcactgcgttctgtgaatatcttgccccgctgctgcatctgtcaaaaccaggacactcgacaggaatcgttccaacagcagccgctgctgctgcctcactcatgtcaagtggcggtggcaaaaccttgtaatgctgctaggacagccaaagtccgttcttgctgctaggacagccaaagtccgttctttgagatgagtgggcgtggctaatgaggtggccttcttcgtgccgagcatttgagcagtcagttttgcctgctagtgttgtccatgtctgacacatcgttgtgccaaccttgctcttggtttgactggttgcatgattgctgatgggtaatgccctgccttgtagttgcagggtgtaacaatctagtattaccaatattaaaatttctcaaaaatccaaaccataatttcttttctcaaaaagaagtttatctcatgtgt

SEQ ID NO: 131562 - DNA, 1529 bp, Zea Mays
aaatttggatcattccaaacgagactgtgaactctcccagctcaagcccacctccctgctcaagcccagccgtccactgcctggctccctcgtccggtcgttcccgtctccctcctcgcgtcgcgtccaccattgttcctgtcgacgctgcgccgcacggctcgcaccgccgacagtgcctcagtcctatcgagcctccctcttcccagatcaggccctagctgggctacagccgccgccgccgctgccgcatccgtcaccttcacaccgcgtgcgcgcgcgctctctctctctctctctctttgcgacgactggacgggctaccgcagtcgccaccataggcaccacgcccttcgctgatctattcgctggcgaagaacgctctcaatgtattcccactcccacccccttcttctctctacccgctgtgcgaaaacgagttcccgaactctaacctaactatttgatgtctactaacttctaattttgttttttactgccatactggtccacccctgatacacatataacaaatccactaacgtgattctttttttttgggtgcaaaatcattgtgggacagtagaagatcgatggagtgcgtggtgcagggaatcatcgagaaccagcatgtcgatgctcttgaggttctactccagggactctctggtgtcccgaaagagcgttttagggtgcatgagctctgccttaaaagtgggcccaatctaggtgttgtcccatcggaggttcgtttgttgtgtgacttagctcagcccacaccatcctggaccataagacatgttggtggtgccatgagaggtgctggtgcggagcaaatctcagttctggttcgtacagttgtggagagcaaagctagcaagaacgtcttgcactacttctacaccctagggtacaagctagaccatgaactcttgaagagcggttttgcatttcgtttccaccgaggtgcccaaatcactgtcactgttacatctgctaacaagatgtcaaggctccatgcaaccgatgaagctacgccagtcactcctgccatacagctagtggaaatcacagctcctgctgctgctgataattacaatgatgttgtttcagctgtcactgcgttctgtgaatatcttgccccgctgctgcatctgtcaaaaccaggacactcgacaggaatcgttccaacagcagccgctgctgctgcctcactcatgtcaagtggcggtggcaaaaccttgtaatgctgctaggacagccaaagtccgttcttgctgctaggacagccaaagtccgttctttgagatgagtgggcgtggctaatgaggtggccttcttcgtgccgagcatttgagcagtcagttttgcctgctagtgttgtccatgtctgacacatcgttgtgccaaccttgctcttggtttgactggttgcatgattgctgatgggtaatgccctgccttgtagttgcagggtgtaacaatctagtattaccaatattaaaatttctcaaaaatccaaaccataa

SEQ ID NO: 131563 - DNA, 1336 bp, Zea Mays
gaaatttggatcattccaaacgagactgtgaactctcccagctcaagcccacctccctgctcaagcccagccgtccactgcctggctccctcgtccggtcgttcccgtctccctcctcgcgtcgcgtccaccattgttcctgtcgacgctgcgccgcacggctcgcaccgccgacagtgcctcagtcctatcgagcctccctcttcccagatcaggccctagctgggctacagccgccgccgccgctgccgcatccgtcaccttcacaccgcgtgcgcgcgcgctctctctctctctctctctttgcgacgactggacgggctaccgcagtcgccaccataggcaccacgcccttcgctgatctattcgctggcgaagaacgctctcaattagaagatcgatggagtgcgtggtgcagggaatcatcgagaaccagcatgtcgatgctcttgaggttctactccagggactctctggtgtcccgaaagagcgttttagggtgcatgagctctgccttaaaagtgggcccaatctaggtgttgtcccatcggaggttcgtttgttgtgtgacttagctcagcccacaccatcctggaccataagacatgttggtggtgccatgagaggtgctggtgcggagcaaatctcagttctggttcgtacagttgtggagagcaaagctagcaagaacgtcttgcactacttctacaccctagggtacaagctagaccatgaactcttgaagagcggttttgcatttcgtttccaccgaggtgcccaaatcactgtcactgttacatctgctaacaagatgtcaaggctccatgcaaccgatgaagctacgccagtcactcctgccatacagctagtggaaatcacagctcctgctgctgctgataattacaatgatgttgtttcagctgtcactgcgttctgtgaatatcttgccccgctgctgcatctgtcaaaaccaggacactcgacaggaatcgttccaacagcagccgctgctgctgcctcactcatgtcaagtggcggtggcaaaaccttgtaatgctgctaggacagccaaagtccgttcttgctgctaggacagccaaagtccgttctttgagatgagtgggcgtggctaatgaggtggccttcttcgtgccgagcatttgagcagtcagttttgcctgctagtgttgtccatgtctgacacatcgttgtgccaaccttgctcttggtttgactggttgcatgattgctgatgggtaatgccctgccttgtagttgcagggtgtaacaatctagtattaccaatattaaaatttctcaaaaatccaaaccataa

SEQ ID NO: 131564 - DNA, 1316 bp, Zea Mays
gaaatttggatcattccaaacgagactgtgaactctcccagctcaagcccacctccctgctcaagcccagccgtccactgcctggctccctcgtccggtcgttcccgtctccctcctcgcgtcgcgtccaccattgttcctgtcgacgctgcgccgcacggctcgcaccgccgacagtgcctcagtcctatcgagcctccctcttcccagatcaggccctagctgggctacagccgccgccgccgctgccgcatccgtcaccttcacaccgcgtgcgcgcgcgctctctctctctctctctctttgcgacgactggacgggctaccgcagtcgccaccataggcaccacgcccttcgctgatctattcgctggcgaagaacgctctcaatgtattcccactcccacccccttcttctctctacccgctgtgcgaaaacgagttcccgaactctaacctaactatttgatgtctactaacttctaattttgttttttactgccatactggtccacccctgatacacatataacaaatccactaacgtgattctttttttttgggtgcaaaatcattgtgggacagtagaagatcgatggagtgcgtggtgcagggaatcatcgagaaccagcatgtcgatgctcttgaggttctactccagggactctctggtgtcccgaaagagcgttttagggtgcatgagctctgccttaaaagtgggcccaatctaggtgttgtcccatcggaggttcgtttgttgtgtgacttagctcagcccacaccatcctggtaaccgagacaagctgctgaaagtctaccttttgttatgtttatcattaattgtgacaagattgtaggaccataagacatgttggtggtgccatgagaggtgctggtgcggagcaaatctcagttctggttcgtacagttgtggagagcaaagctagcaagaacgtcttgcactacttctacaccctagggtacaagctagaccatgaactcttgaagagcggttttgcatttcgtttccaccgaggtgcccaaatcactgtcactgttacatctgctaacaagatgtcaaggctccatgcaaccgatgaagctacgccagtcactcctgccatacagctagtggaaatcacagctcctgctgctgctgataattacaatgatgttgtttcagctgtcactgcgttctgtgaatatcttgccccgctgctgcatctgtcaaaaccaggacactcgacaggaatcgttccaacagcagccgctgctgctgcctcactcatgtcaagtggcggtggcaaaaccttgtaa

SEQ ID NO: 131565 - DNA, 357 bp, Zea Mays
atgctcccggtgcacctgctccaggcaagattctctcctctcctctctcagaaggctagacggccgacgatgaatcgccaggcgagtcggcgaggccaccgggtgcgccatgtccggctcggctcgcttctccggctccgcgtgcggcttttcggcctccttgtccgctgcctggaggacttcaactggtaccctagggggaggtcgaggccacataataagatgatgctcagtcacgctgacactgggccagcggagagggagaactcccttcaggcagacgccattgcagattgcttagagtttatcaagagatcctacctacctgctggtgatcagcagccagattgctgctag

SEQ ID NO: 131566 - DNA, 1924 bp, Zea Mays
ttttttttttttttgctaaaatttacgcttctcatggcatacagccagttgaatttgttccagccaagcaaaacatagctgggctattttgagtacaaaccggcccaaataaaacatgggattaactaaaagcctacggcccaaacttttcgcaaagcttcaccgtttaaaaccgaaacctgacctgcgggctgcagcagcgtccgctccaaaacgcaacggtcgaatctcctcgaattcgaattgcagccggtgccacccacctcacatggcggcggcggaagagatgatggcggtgctggacaaggagacgctggcgctgatgggtctgggcaacgccgccgccgcggtggttgccgagtgcgagaagttcaaggagaacgcgaggccgctcaagcgcgggcgcgacgtgtccaaactcaaccacgcgctcaaggcacacgccgatcccgcccagcgcgccactcttctcgaagcccgaaagaagctgattgaggcaatctacgagtaccaaggcgaggatccgctccaaccgtggctggactgcatcaagtgggtgcaggagtattttccgaccggcggcgagtgctcagggttggtggtgttgtacgagcagtgcgtgcggaccttattggacgacgagcgctacaaggacgacctccgcttcctcaaagtgtggctggaatacgcggggaactgtgctgatgctgaggtaatatacaggttcctggaggccaaccagattgggcagggccatgcgatctactacatgtcttacgcatcgttgctggagtcaaagaacaagttgaggaaagctaatgagatctttgaccttggtatagctagaaaagcgaagcctctggagaagttggaagctgtatacagggcatttcttcgaagatcaatcaaaaagagggaacaagagcaggatgatacagtagatgatgatctgccaaaacgcagtttcgggaataacttgaaacgagatgaaaacagaaatcagcaagcagggaactcccacctggggagaccaagggcactgcagaggccgctttcagtttacaaagatgaaagtccattaccaaatcagggccttgacagagtgaggagcaaagaaaataacacaagttggcgcgtcctcggaacacgagcagaacggaacaaggaaaataacatgatgcctgctaaatggacgtctcacaagattccacagaagttaggagcaagaggagcggttcaatcaacccgagccagttgttccattgaagtcttcgtcgaggaagactgcacacaggaacctgctcggccggtgccaaagagcccaaatccttctgttctgaagctcaggcaaacaacaagcaaaagccttaagaaggagactgaattgctcaaggagaacccgctgcgcaacttccccctgagcaggcttaggtaatcagcatcttgctggttctgagaaacatctcgtacgttatgatttggtcgtatgtatggttgctgtgaggtgttgtgcccaaaaaaggctttattagcctctaaagcttagacgagcaatgtatgcctatggcattatccaagtgatgtaaggctgtgcattatattgacacggcgtgcttattatgaatagacctgcagatctcgtgcgtgcctatgtgaatctagcctcgcaaaataatctgcttctgcaaattctaatagcttgttctgtaacgaaaatgcctttggactaatatctaatagcgtctcattcagtttgtttatatttgaatgcctgagaaattagaaaacatatttgaatgttttattccgtccataaatatagaatctctgtaagcatgtagctaaactcaatagaaacattttatgcgtagaatgtgtttaggatggcaaaaatgtgtattgatatgcatgaaaacaaaaaaaa

SEQ ID NO: 131567 - DNA, 1921 bp, Zea Mays
ttttttttttttttgctaaaatttacgcttctcatggcatacagccagttgaatttgttccagccaagcaaaacatagctgggctattttgagtacaaaccggcccaaataaaacatgggattaactaaaagcctacggcccaaacttttcgcaaagcttcaccgtttaaaaccgaaacctgacctgcgggctgcagcagcgtccgctccaaaacgcaacggtcgaatctcctcgaattcgaattgcagccggtgccacccacctcacatggcggcggcggaagagatgatggcggtgctggacaaggagacgctggcgctgatgggtctgggcaacgccgccgccgcggtggttgccgagtgcgagaagttcaaggagaacgcgaggccgctcaagcgcgggcgcgacgtgtccaaactcaaccacgcgctcaaggcacacgccgatcccgcccagcgcgccactcttctcgaagcccgaaagaagctgattgaggcaatctacgagtaccaaggcgaggatccgctccaaccgtggctggactgcatcaagtgggtgcaggagtattttccgaccggcggcgagtgctcagggttggtggtgttgtacgagcagtgcgtgcggaccttattggacgacgagcgctacaaggacgacctccgcttcctcaaagtgtggctggaatacgcggggaactgtgctgatgctgaggtaatatacaggttcctggaggccaaccagattgggcagggccatgcgatctactacatgtcttacgcatcgttgctggagtcaaagaacaagttgaggaaagctaatgagatctttgaccttggtatagctagaaaagcgaagcctctggagaagttggaagctgtatacagggcatttcttcgaagatcaatcaaaaagagggaacaagaggatgatacagtagatgatgatctgccaaaacgcagtttcgggaataacttgaaacgagatgaaaacagaaatcagcaagcagggaactcccacctggggagaccaagggcactgcagaggccgctttcagtttacaaagatgaaagtccattaccaaatcagggccttgacagagtgaggagcaaagaaaataacacaagttggcgcgtcctcggaacacgagcagaacggaacaaggaaaataacatgatgcctgctaaatggacgtctcacaagattccacagaagttaggagcaagaggagcggttcaatcaacccgagccagttgttccattgaagtcttcgtcgaggaagactgcacacaggaacctgctcggccggtgccaaagagcccaaatccttctgttctgaagctcaggcaaacaacaagcaaaagccttaagaaggagactgaattgctcaaggagaacccgctgcgcaacttccccctgagcaggcttaggtaatcagcatcttgctggttctgagaaacatctcgtacgttatgatttggtcgtatgtatggttgctgtgaggtgttgtgcccaaaaaaggctttattagcctctaaagcttagacgagcaatgtatgcctatggcattatccaagtgatgtaaggctgtgcattatattgacacggcgtgcttattatgaatagacctgcagatctcgtgcgtgcctatgtgaatctagcctcgcaaaataatctgcttctgcaaattctaatagcttgttctgtaacgaaaatgcctttggactaatatctaatagcgtctcattcagtttgtttatatttgaatgcctgagaaattagaaaacatatttgaatgttttattccgtccataaatatagaatctctgtaagcatgtagctaaactcaatagaaacattttatgcgtagaatgtgtttaggatggcaaaaatgtgtattgatatgcatgaaaacaaaaaaaa

SEQ ID NO: 131568 - DNA, 2039 bp, Zea Mays
ttttttttttttttgctaaaatttacgcttctcatggcatacagccagttgaatttgttccagccaagcaaaacatagctgggctattttgagtacaaaccggcccaaataaaacatgggattaactaaaagcctacggcccaaacttttcgcaaagcttcaccgtttaaaaccgaaacctgacctgcgggctgcagcagcgtccgctccaaaacgcaacggtcgaatctcctcgaattcgaattgcagccggtgccacccacctcacatggcggcggcggaagagatgatggcggtgctggacaaggagacgctggcgctgatgggtctgggcaacgccgccgccgcggtggttgccgagtgcgagaagttcaaggagaacgcgaggccgctcaagcgcgggcgcgacgtgtccaaactcaaccacgcgctcaaggcacacgccgatcccgcccagcgcgccactcttctcgaagcccgaaagaagctgattgaggcaatctacgagtaccaaggcgaggatccgctccaaccgtggctggagtaagtttttctcatagcccctttaactcgcctttttcgatttcttggttcgtgccaggactggtagctgttctagcagatagattgttcatttcttctctgattcgtccgcgtgcagctgcatcaagtgggtgcaggagtattttccgaccggcggcgagtgctcagggttggtggtgttgtacgagcagtgcgtgcggaccttattggacgacgagcgctacaaggacgacctccgcttcctcaaagtgtggctggaatacgcggggaactgtgctgatgctgaggtaatatacaggttcctggaggccaaccagattgggcagggccatgcgatctactacatgtcttacgcatcgttgctggagtcaaagaacaagttgaggaaagctaatgagatctttgaccttggtatagctagaaaagcgaagcctctggagaagttggaagctgtatacagggcatttcttcgaagatcaatcaaaaagagggaacaagaggatgatacagtagatgatgatctgccaaaacgcagtttcgggaataacttgaaacgagatgaaaacagaaatcagcaagcagggaactcccacctggggagaccaagggcactgcagaggccgctttcagtttacaaagatgaaagtccattaccaaatcagggccttgacagagtgaggagcaaagaaaataacacaagttggcgcgtcctcggaacacgagcagaacggaacaaggaaaataacatgatgcctgctaaatggacgtctcacaagattccacagaagttaggagcaagaggagcggttcaatcaacccgagccagttgttccattgaagtcttcgtcgaggaagactgcacacaggaacctgctcggccggtgccaaagagcccaaatccttctgttctgaagctcaggcaaacaacaagcaaaagccttaagaaggagactgaattgctcaaggagaacccgctgcgcaacttccccctgagcaggcttaggtaatcagcatcttgctggttctgagaaacatctcgtacgttatgatttggtcgtatgtatggttgctgtgaggtgttgtgcccaaaaaaggctttattagcctctaaagcttagacgagcaatgtatgcctatggcattatccaagtgatgtaaggctgtgcattatattgacacggcgtgcttattatgaatagacctgcagatctcgtgcgtgcctatgtgaatctagcctcgcaaaataatctgcttctgcaaattctaatagcttgttctgtaacgaaaatgcctttggactaatatctaatagcgtctcattcagtttgtttatatttgaatgcctgagaaattagaaaacatatttgaatgttttattccgtccataaatatagaatctctgtaagcatgtagctaaactcaatagaaacattttatgcgtagaatgtgtttaggatggcaaaaatgtgtattgatatgcatgaaaacaaaaaaaa

SEQ ID NO: 131569 - DNA, 489 bp, Zea Mays
agtctttcgcccagcaatgggggaaaaggagttgtggttttgtaacttttgtttgctctggatttctttttcttgggcctgggtctgtggggaggagacaagttgctgcagtaatgcaaatatatatcatgtgtgttcatcgttcggttcatttgcttgatccaggaagctgattgaggcaatctacgagtaccaaggcgaggatccgctccaaccgtggctggactgcatcaagtgggtgcaggagtattttccgaccggcggcgagtgctcagggttggtggtgttgtacgagcagtgcgtgcggaccttattggacgacgagcgctacaaggacgacctccgcttcctcaaagtgtggctggaatacgtgagtgatgctttgccagcttgattgtttttctctgtagtttgtgtcagtgcagtggaggcacctcatatatcattccgctgccgatcttgtcctttttgcaggcggggaactgtgct

SEQ ID NO: 131570 - DNA, 602 bp, Zea Mays
cgcttgccccctctctcgccgccggcaactcactctcctccccttccttctctcccaccgctggcaactcactctcctccccttcctcctttcctgctttcagcaactcactctcctccccaccattctctccaaccatcgacaactcactcatcttccctacctcttgcaactacttgctttcctctcctctcaacaacaacaactcacctcccttcccttcgattggtgactgcttccatccctcccctcccaccaagacctccttatccattacaaagatgcaagcctcagcgacatcggcggccaacatcatcccacatagttaggaatggtaagtattcttattttttccttttctgtgtacatgtctctctatttcttgttccatgtataatgtgaacctatatgttagggttaagtgatgtatgcatgttaaaatcctagagtttagctactattatgtggtatcctttggtatttatttgttgttaattcgattgtcactaagtagagctatgtattttagttggaattattttaggtttatatctttgaggggataatttttttccttctcgtgaggtgttttttgttgtaag

SEQ ID NO: 131571 - DNA, 798 bp, Zea Mays
acaacgattctcgtcggtcgtttctgtgccctatccgtcgtcggctatcgcaacagcagcgcctcttccctgtcgccctgactcctccctagcagcagaaaaccggcggcaagtcttcggtggcggcgaggccaaggctttgcctgagagaatgcaagacccaagggatgatgatttcttggcgccaaagttgcataagaagaaggttgtctaccggccgcagccatcaggccatctgaagggtgaacctgaactgttgcggagagagtttccgcaatcatcaggcatggtccaaaagccacccaaaagaagcttgaagggtgagcctcgcacgcccccttccgacagggggaccccggattccctgccggaatctggtcctaccgacgaataccgtgcgttaaggaggaagtacctgatgctggaggaagagaactttgcactggacaaagaactgagcatggaagatgaagaaatgaaggccctagaggatgaaaagcttgcactgcttgatcagcttgttgtcttggaaggccttgtcgagccatcccagttgcagtctcaacctaggccgtaaggtgttttggtttatgtataatcgttgtcgttcattataattcagctactagtagctgttatactatctgggcttaaacagtgtgtagaaacagcatagtagacctgttacttctatcggacatcgacgaataaaaaaaactcttatgactgtttgcagggttgacaacttcttagtccgtttgtgtaaagtaagaagaatttagttgcgaaggtagttct

SEQ ID NO: 131572 - DNA, 820 bp, Zea Mays
ggagcagcccacaggccacaacgattctcgtcggtcgtttctgtgccctatccgtcgtcggctatcgcaacagcagcgcctcttccctgtcgccctgactcctccctagcagcagaaaaccggcggcaagtcttcggtggcggcgagggaaggccaaggctttgcctgagagaatgcaagacccaagggatgatgatttcttggcgccaaagttgcataagaagaaggttgtctaccggccgcagccatcaggccatctgaagggtgaacctgaactgttgcggagagagtttccgcaatcatcaggcatggtccaaaagccacccaaaagaagcttgaagggtgagcctcgcacgcccccttccgacagggggaccccggattccctgccggaatctggtcctaccgacgaataccgtgcgttaaggaggaagtacctgatgctggaggaagagaactttgcactggacaaagaactgagcatggaagatgaagaaatgaaggccctagaggatgaaaagcttgcactgcttgatcagcttgttgtcttggaaggccttgtcgagccatcccagttgcagtctcaacctaggccgtaaggtgttttggtttatgtataatcgttgtcgttcattataattcagctactagtagctgttatactatctgggcttaaacagtgtgtagaaacagcatagtagacctgttacttctatcggacatcgacgaataaaaaaaactcttatgactgtttgcagggttgacaacttcttagtccgtttgtgtaaagtaagaagaatttagttgcgaaggtagttct

SEQ ID NO: 131573 - DNA, 348 bp, Zea Mays
atggccttttctggtgggggcgagacgagcaaggccatcggaggtgcttgggagagaaacagggtcgagcagggagtaagacggatgccgcggccagagggagtcaaggccgacggcgtccatggcagagggcagggcgagcgccagcagaggaggagcgccgcgagagctttccggcgaggtcgcggtcaggtagggagctccatggcgtggactgctccgcggccggatagctgccacgacgcgcacggcaagagggagccgagggcgcgacgattggagctccagggcgtgcggcggcgagcagagaggaagcggctgccaggcaccgtaggagatgggcgctga

SEQ ID NO: 131574 - DNA, 688 bp, Zea Mays
ttattattccccctatctggtcgccctcatttaagttgtggcttagatatttctacttagagatctggtacatgtttttttatgcttacttttttcatttatcaaccataggtgcgattaatgtttttatttgcttagacctaaacaaaacattcttgatagccacatctgaaacattaatttcaagttctacattcattcatttatattccgtcaactttttaaatacaacacttattgtgtttgacaagaaattgattttgtgaaatcttcaaacaaggcttggcaatgatttattcatcgacaatgcatcaaccctatctgcatcgtaaactcctacagtgaagttagacaaaagtctcatctattcattctggttttagctggttgatcactttttcccaatctccagtgaacacatctaggatgactcttcacatccgtcagcttcctaggaaaaactgacaccatatcatcgaggcatctttcaaaacatttgctatgacccttcgatgagcaatagaatatgacatgcgctactaaggaactaccccaggctccaaaggtgttttgtcaagatcataacattgcgggtatggacgaatgtatatttttattgcagtgcgcatcaataagaggaaacctggaggacaggcaactacaacttggtgtctgttgcttacattgg

SEQ ID NO: 131575 - DNA, 933 bp, Zea Mays
aaactaaaccctatttctcaaaccctagattcggatccgccatcaacaggctccgccatcaacaggctcgaacgccctctcctcaaaccctaccagatcttgtcgttcggcgcctcaaaccccagattcggatccgccatcaccatagaggtgggggcagacggcatagcgctcatcaccatcgccaacctgcccgtggtggatgcgccatcgcctgaggcgagccgcggggaaatgagggatccttggaggcagagctggcgtcgcgtcgccggtggacgctggtgctggtgaacatggcgtcggtgctggaaaagatagacgagatgttgctgctcgccgtgtacaagaaggtgtgcacgtcgctgggcgcttctcgacggcgctgggctcccaaaccctttgtcgcgcgctcgttcaagccgcctactacctactcaaagcctacgcctccacgcgccatgatcgggcccgtgtcgtcgctgtcggagccttcacctgggccaccatcgccttcctcgtcgccatctccggcagcttcctctaggaaggccatctggtatttcgaaggaatctatgcgtactcccctcagataccagattcaggaggggactgctggatggcacaaagtggcgaatgaagcagccaagactattccgggaagggagaatggtggtaattgtgacataaaaaacctaagcagaggttccaaagtttatctgccagtatttgtcgaaggagcgaatcttagcaccggtgatatgcacttctctcagggcgatggtgaagtttcgttttgtggagcaattgaaatgagtggattccttgagctcaagagaatcaggaggatcagctcctcacgagaatcaggatctggagctaaagaagcaggagttggagctttgtcaaacgggcccttactcaccaactaa

SEQ ID NO: 131576 - DNA, 1054 bp, Zea Mays
aaactaaaccctatttctcaaaccctagattcggatccgccatcaacaggctccgccatcaacaggctcgaacgccctctcctcaaaccctaccagatcttgtcgttcggcgcctcaaaccccagattcggatccgccatcaccatagaggtgggggcagacggcatagcgctcatcaccatcgccaacctgcccgtggtggatgcgccatcgcctgaggcgagccgcggggaaatgagggatccttggaggcagagctggcgtcgcgtcgccggtggacgctggtgctggtgaacatggcgtcggtgctggaaaagatagacgagatgttgctgctcgccgtgtacaagaaggtgtgcacgtcgctgggcgcttctcgacggcgctgggctcccaaaccctttgtcgcgcgctcgttcaagccgcctactacctactcaaagcctacgcctccacgcgccatgatcgggcccgtgtcgtcgctgtcggagccttcacctgggccaccatcgccttcctcgtcgccatctccggcagcttcctctaggaaggccatctggtatttcgaaggaatctatgcgtactcccctcagataccaggtgttcgtttcccaggattaacccatcctggtatagtgggaactgcaccgtcagccaaacttcttaatgtatggaatgagagggagaaaagattggccgagacaagcccacagacccttaaactgtttgaagtgctacaccagaggccccttgccaatttaccgacccctgagaactgcttacttggaaagattcaggaggggactgctggatggcacaaagtggcgaatgaagcagccaagactattccgggaagggagaatggtggtaattgtgacataaaaaacctaagcagaggttccaaagtttatctgccagtatttgtcgaaggagcgaatcttagcaccggtgatatgcacttctctcagggcgatggtgaagtttcgttttgtggagcaattgaaatgagtggattccttgagctcaagtaataaactttctacttgtttacact

SEQ ID NO: 131577 - DNA, 945 bp, Zea Mays
atggagatctccttccacttcaaatcctccgtcaacccgttcatcggccgcatcgagccctccgacacctaccgcatctggaagcatggcgccgcgctccaggccgacatgacgcgcgctggcttcgacggctttcgcatccagcacttggaccagacgttcctcttcctcggtgacggcgccaggcctaagggaaatctggaagcgcggtgggcgagcaagatgagtagcgtgtcaccgagctcgtacactttggagagttcccttacttggaacttgatcaacaaggatgtgctaccactgacctggctgctcttcgtttggaatcggagcattccaggagataggcccgttccgcgtggacacggacagcaagaccctctgcaatttcaaatacgcctgaaacacagatatcatgatgtagtggcgaacgtgctatacctagagagccccgtgggcgtgggcttctcgtacgccgccaacacggacgtgtacaaggtgatgggcgacaacatgaccgcagacgactcgctccagttcctgctcaagtggctggaccgcttcccggagtacaagggccgcgacttcttcatcgccggcgagagctacgctggccactacgtcctggagcttgccgcctccatcctcgctgccaagaacgcgcggcccaaggacatggcctccgtcaacctcaagggaatcgcgatcgggaacgcaatcctggagttcgcggcggagcagagcgcgctgtacgagtacttgtggcagcacgcgttcctgtcagacacggcgcacacgctcatcggccagcgctgcaagaacgccgaggacaactcgccgctctgctcggggaccaaggacgtcgcctacaaccagctcggcaacatcgacgcgtacaacatctacgcgatgacctgccatgacaagaaagtcaagcccacatga

SEQ ID NO: 131578 - DNA, 1099 bp, Zea Mays
ctctgctcgctcatctctctggtgtccatccccagcccaccgagctccctccatcttgctccccatggccgagcgccctcccgtcctccaactcgccagcgcttggcttcctgcttgccaagtccatctccctccctagcgctgtcccacctcctgctcctccacggcgctcagttccagctcgccggctgtgcaactcgcccatggcgcccatctctctggccgcgacctccctgctcctcctttccccagccgcggtcttccctgctctagcccagccgagctcgtccctgcgcgcgtgttctcctgcgtccagccgagcgcgcgaaacttctctgctcacggcactccctgtctgctcggccatggtgaaaccctccttaccatggatgccggagttcctctgctcgttctcatggccgccgtcgagcttccggcgcgcgcccatctcctctgctcccccgcgcgcgtcctgggactctccatcgcgccgatctgtgcccggccgtggccgtcgaactcgcccagctcggatttttgcttggtcgcccgccgtttaccagtaccgtggtctcgctcggacgcgtactgtcaagattgttcctgcacgcacgccctggtacccctgctcgctgttgggccgaccgtcagcagcttcccggcctccgtcgtgctcagcagcgagtaatttatgtcggagcagttactgagacgccctcctttgcgtcgtgctcgccagatcaagcctcgcgtcgtcgatttgcgcagttcatgttcggcaatcggtttagtctccgtcgaacttctatttaccgtgacgccgagctccttcaacactgccccactccgttgtcgttattccgtcgcctcacttcgatgtcagttccttcatgacatctcctacttgtgttcgcgccgacaaaaggatcctaagagaatgtggaaaaacaagccccaagttgatgcctcaaatactcgacgaaaagcctgaactataaattatcgtggttcttgcagagttcgcgtcgaatttaattttggatgagctgatttgctactactattattttgttttaatgaatagattgatagatatgta

SEQ ID NO: 131579 - DNA, 2333 bp, Zea Mays
ctgcccctccgccgcggtcgtcacatacccactgaagccgccgctcagtcccccaagcagatgatggcttccccacctcagacggagctccaagcggtagcgctcgcgctcctcgtcctcctcctcgccggcgcggcgccggcgcgcgcgcagcaggagtacgaggccaacaagcagaacgcttgctatgccaccaacgccagctccgtcctcggctacacctgcaacgctaccaccgcctccactccagcctgcgactcctacctcatcttccgctcctccccgacctactacaacacgccggtctccatctcctacctcctcaactcctccgtctccgccacggccgccgccaacgccgtcccgtcggtgtccccgctcgcgccctccagcctcgtcctggtccccgtcccctgcgcctgcacgcccggcggctactaccagcacaactcctcctataccatccagttccgcggcgagacctacttcatcatcgccaacatcacctaccagggcctcactacctgtcaggcgctcatcgcgcacaacccgctccacgacagccgcggcctggtcgccgggaacaacctcaccgtgccgctccgctgcgcgtgcccctcgcccgcgcaggccgccaaggggttcaagtacctgctctcctacctcatcatgtggggcgacgacgtgacctccatcgccgccaggttccgcgccgatccgcaggccgtgctcgacgccaatagcctcactgccgacgatatcatattccccttcaccacgctgctcatcccgctcaagaccgcgcccacgctggacatgctcgcgtccacggcgccgccgccggccccgaccccgccgcagcccgcgcccgcgccgtcgggtcggtcgggtagcgggaagttggtcggctttggtgtcggcctcggctgcggcgcgcttgcgttggcaggaattctgggcctgctcttcttacgggccaggcggcggcagcggctcccggtcggggaaagtgtccgccaaggcagcaaggtggttatcgacgtgtcatcgtcggcggattacggcgcgctggcgtcggggaagaagataactaatacgaccacctcttcgatgtcctccgcggcctggtcgctggtcgccagcgacgtgcgcggggccgtagagtcgctgacggtgtacaagtactcggagctggagaaggccaccgcggggttcgcggaggagcatcaggtgccgggcacgtcggtgtaccgggccgtcatcaacggcgacgcggcggcggtgaagcggttggccggcgacgtgagcggcgaggtcggcatcctgatgcgcgtcaaccactcctgcctcgtccgcctctccggcctctgcgtccaccgcggcgacacctacctcgtcttcgagtttgcggagaacggcgcgctcagcgactggatccacggcggcagcggcagctgcagcggcagcaacaccctccggtggaggcagcgcgtgcaggtggcgttcgatatcgccgacgggctcaactacctccaccactacacgaacccgccgtgcgtgcacaaaaacctcaagagcagcaacgtcctcctcgacgccgacctccgcgccaaagtgtcgggcttcgggctggcgcgcgcggtcaccgcggcccacggcggcgcgcagctcacgggccacgtcgtgggcacgcaagggtacctcgctcccgagtaccttgaggacggactcatcacgcccaagctcgatgtgttcgccttcggggtcgtcctcctcgagctgttgtccgggaaggaggccgggttcgcggatgccggcacgggcgaggaaatcctgctgtgcgagtccgcggaggaggcgctggtggcggacggcggcgaggacatggaccgcgccaaggtgcgcgcgttcatggacccgcgcctacatggcgacttcccgatggacctcgcgctctccatggctgctctggcgctgcggtgcgtggcgatggagccccgggcgcgaccggccatggacgaggtgttcatctcgctctcggcggtgtacaactcgacgatggattgcgatccctcggattacggcacctccggatcttcgatgatcgggcggtagtaaccatcagcgtataagttaaaattgcaaagaacttcgagctatgctattaggggcggtgatggatcttcacaataaatttgagtgcttaattaaatttagtataaaaatgaataaaaataaagtgttcgtgttttgatcggagtattctaaccaaccagtgaatttgtgctacgtgttctggtctacatgggtaatacaagaagacataagattta

SEQ ID NO: 131580 - DNA, 100 bp, Zea Mays
gcgcgccctctcagctcgctcggccttaatccctatctcgtcgtcgacctcgccgcgacttagttcgtccgtcgtgctggtgctgtcccatactgtgcct

SEQ ID NO: 131581 - DNA, 282 bp, Zea Mays
atgaattcaattctccacacttttgtggccaccaaatttgaattccattctatgttttcctatacaaaaaataggagaaaactagacatagcaaaaagctccaagtagcacgtggatggtctcgaagctgcccttgtgcttctccctgttctttatcactcctacatgcccggtgttcctcccgctggtcaccatgaccacgttgccaacgtcaaacttgatgaagtccatgatcttgttggtctctagatcgatcttgatggtgccatttctgcaaacttt

SEQ ID NO: 131582 - DNA, 2494 bp, Zea Mays
aaaaaaaaaaaaacagcatcagggcggtagcgtaatttccctggccggttgcggccgacgacctcttcgagagaacgaacgattcttcctcccgtttgcttcccctgcccgcactctgcctcgtcaatctcgctccgcgtcccgcttccgctgttgctttcgtcgccatctcgctccggtccccgccgctgctccaagtgggagccaagtcatctctctggccgaagatccaggttgagtcggcgtcgccggcagaggcaagagactccggcgcgatgtcgttggactcggaggcttcctcgcagggtggggactaccgtagcttccgccagatcacgcgagatcgtttattatttgaaatgctcagatcaactaggaagaattcgaaatcaacatggaaggttcttatcatggataagtttacagtcaagattatgtcatatgcatgtaagatggcagatattacagaagaaggtgtttcattggtcgaagatttatataaacggaggcaaccattgccttcactggatgccatatatttcatccaaccaactaaagagaacattgtcatgttcctatccgacatgtcaggaagaagccctttgtacaagaaggcatatgtgtttttcagttctcccgtacataaagaattagttgctcaaataaaaaaggattcaagtgtactacctcgtattgccgcacttagtgagatgaatttggagtactttgctattgattcccagggtttcataactgaccatgagagggcattggaagaactttttagtgaaaatgcagaaggatctcacaagtataatgcttgtctgaacacaatggctactcgtatatccacagtatttgcatcaatgagggaattccctcgtgtacactaccgtattgccaagacgattgatgcttctacaatgacaacactacgagacttagtccccacaaagcttgctgccagtgtatggaattgtcttgcgaaatataaaacgacaatacctgaatttcctcaaacagaaacttgtgagctacttatagtagaccgttcaatagatcagattgcaccaattattcatgaatggacttatgatgctatgtgtcatgatctgctttgtatggatggcaacaagtatgttcatgaggttccaactaaaaatgggtcggcaactgaaaaaaaggaggtcctgttggaggatcatgaccctgtctggcttgagcttaggcatgcacatatagcagatgcaagtgagaggctacatgataagatgaccaacttcatttcaaagaacaaagctgcacaattgcatcaagcacgaaccgatggagaattatcgacaagagatttacaaaaaatggttcaggctcttccacagtacagtgatcaaattgataagctttccctgcatgttgagattgcaggaaaactcaataacataataagggaacaatgtcttcgggatgttggacagctagagcaagatcttgtgtttggcgatgctggaaccaaagaactaatcaactttttgagaacacaattggttgtaagtcgtgaaaataaattacgcttgctgatgatttatgcagcacttaacccagagaagtttgaaagcgacaagggtgcaaaattaatgcagttggcaggattatctgctgatgacatgattgctgtaaataatatgcgttgcttatgtgggcctgataccaaaaagtcttcagtagggggttttacactgaaatttgatgttcacaagaagaaacacacaaatcgaaaagagcgaacaggggaagaatcaacatgggcactctctcgattttaccctattttggagcaattgattgaaaatcttagcaaaggtgagctgccaaaagatgaatataactgtatgaatgaccctagtcctactgttcatggactgccaaccagtagctctgcccgaacaagccccgctcactcaatgcgatccagacgaacaggtggcacatgggcaagacctcgtggctctgatgatggatattcaagtgattctgtgttgaagcatgcctccagtgacttcaggaaacttggtcagcgtatatttgtttttgtaataggcggtgctactcgatcagagttacgtgctgcacacaagctttcatccaagctgaagcgagacatcatccttggttcatctagccttgatgatcctccccagttcatcacaaaattaaagttgatgtcagtagaagaattgacacttgatgaccttcagctgtaaatggtgtccgcccacacggagtgtaaccttttattttctctgttctgtcagctcttatttgtgggggcctgtcatattcattcggtgaaatgcattcttaataccacttttactggtgaatgtaagaaaaaaactgttatgcaattaatcttttcatgcaattattgtgcaaccaaaataccagaagtcatgagaagttctcaaaattttattgatgaattttatttactcaa

SEQ ID NO: 131583 - DNA, 114 bp, Zea Mays
ggtagtattttatttatccatatattttgttttatcttgtatagtgtctctccttcttttctctttattctcttttctccattcaaatcaaattcaaattcaaactcccatttt

SEQ ID NO: 131584 - DNA, 550 bp, Zea Mays
aatgcggttcgctcaccttcctggacgcgcgcgacggcgtcccagaagaagccgaacgccgatacgtcatgcttgccccccgcggacgcctttctcgtactgcggcggcggcacctgcaccggcggcagcgcgacattcacagaagcaggcggcgggggcggggtgaacaccaccgcaggcgccacggcccggctctcgtggttccgcggagagggagaaagggagggcgacggggctgccctctgcgggatgggtgtggagatatccgagcgcggggactcgagcggcggcgtgcgcccagcgccccggggcgtgctagcgggggatggcggcgtgatgaagatggtgaggttcccggcccgcccaatcatgggcagtggcagcggcggtggtggcggtggcgaggacgaggaccccatcgcggcggctggtaccgtctgcgggagcgcggcgtttagttgcctagggaggagagcgaaatgggcagggcagggggggcgctcgtgggaaatgccccagacgccattgcaattccatacaaggcagtag

SEQ ID NO: 131585 - DNA, 691 bp, Zea Mays
gttatatattctattcacaagctcattgagagtgtcgatgagtgcatggtgctccacaatgacacgctcaagcttgccacaccaacttttggtgatctcaaccaccttatctctgcaacaatgaatggtgtggtgtgttgccttcgtttatctggtcagcagaattcttattttcagcagcctacaattaacctgattcccttcccatatctccatttcttcatggtgggattcacttcactgacctcatggggctcccagcagtaccgtgccctcattatgcccgagctgacccagcagatgtgggactccaagaacattgtgtgtgctgctgactctcatcatgatccctatctcacaacgtttgctatgttccgtggaaggatgagcaccaaggaagtggatgggaaaatgttgaaagtgtagaacaagaactcttcatatatcgtggagtggatccccaacaatgtgaagtcacgtgcaccatggagcactacacaagcattctttgagcatactacaattccaagactatgtgaccacgttgttgtttcattagatagaggtttgagtgcattcttgagctgtgactccgctgttttgtttcttgcgctcctttcttgactcgtgtgtgtgttgttgttgcggattgagttcttgtgtgtgtttctactccctccttactcttgtg

SEQ ID NO: 131586 - DNA, 1493 bp, Zea Mays
ctctaaactagggtgaatcaagcagcagccaatggcttctcgttcgcccaccattgccctggtcctcatccttgcctgcttctcctcgccggcggcggccttcaacatcaccaggctactcggacaattctccgacttcacaacctttaacaacctcctgtctcagacgaagctcgcggaggatatcaaccgccggcagaccatcaccgtgctcgccgtggacaacggcgccgccggtggcatctcctccctcccatcagacgtccagcggaaggtgctctccatgcacgttgtcctcgactactacgacaccgccaagctggaggccatcaagaaccactccgccctgctgacgactatgttccagtcctccggccaggccaccgaccgcatgggcttcctcaacttcaccaagcgctccgacggtgtcatggtgttcggctccgctcagcccggagcgcagatgacctcccatatggtcaagtccgtcacttcccgcccgtacaacatctcagtgctgcaggtcagcgcccccatcgtgccgcccggtgtcggcggctcggcagacagcggcaagggtggcgcgccgccgccgcataaggccacggcgcccgcacccgggcccgcaacaaagggaaagaagggagctcctccgtccaaagatgaggaggcccctgctccggcaccgtccgacgacgccagcgcagacgcgcctgccgatgcccctgggccggcggcggacggcccaacggctgatggccccgcggcagatgcccctacggcggacggtccggcagctgacgcgccggcgcataagaagagtagcgacgaggcggctgacgcgccagaaggttcagccgccggcaggataaaggccgctgcgcgtctgggaatcgtggcgcttctgatgacgattatttgacattgactgctattgctggaaattagaatggagctttcgtgatttgggattgacagtaagctgaactctatacagtacgatgcaagggcttgtccactgactcaaacagacttcatttttttttgcgcgtttaatggattggacatctcgtgctactggaggctggaacacgtagtttcttttttctttctaatttcatgttcatgtgatggagcttactgatgtcttgtgcatatataaacattgtgtgtacgaagatgttgttaatctgttcaagctggaaaaaaactatagaagaattacttcgatcttgttactatcattttactagaacatggggcgcccttacgggcgctctaatggatgcttcctcgaaactttgaaaacaaataatttttttagacttgatgactgaaaaatgcaacacaataatggatgcttcctcgaaactttgaaaacaaacattttttttagactcgatgactgaaaaatgcaacacaaacaaaagcatagtcgatagagaaccaggcttgacatttatcttagaggaagatacgccagtatctatttg

SEQ ID NO: 131587 - DNA, 1356 bp, Zea Mays
atcactcaccaagaaccagagaggagcttcatcagctcattcaattctcgttccatccctcgtctcttgtgtcccgcctccgttccataattcaccagcgtcgtcctacccatatctcccatcgtcttctccctcgcgccatcagcttccccaagccagcggcgaccatgatctccccggacaccatccgcacggccatcggcgtcatcggcaatggaactgcactcgtgctcttcctctccccagtgcctacgttcatccgcatctggaagaaagggtcggtggagcagtactcgccgatcccgtacgtggcgacgctgctgaactgcatgatgtgggtgctgtacgggctgccggcggtgcacccgcacagcatgctggtgatcaccatcaacggcaccggcatggcgatccagctgacctacgtggcgctcttcctcctctactcggtgggggctgcgcggcgcaaggtggtcctgctgctggccgccgaggtgggcttcgtcggcgccgtcgccgcgctggtgctcagcctggcgcacacgcacgagcgcaggtccatggtggtcggcatcctctgcgtcctcttcggcaccggcatgtacgccgccccgctctccgtcatgaaaatggtgatccagacaaagagcgtggagtacatgcccctgttcctgtcgctggcttccctcgtgaatggcatctgctggactgcttacgcgctcatccgcttcgacctctacattactatccccaacgggctgggcgtgctgttcgcggtggcgcagctggtgctgtacgccatctactacaagtccacccaggagatcatcgaggcgcgcaagcgcaaggccgaccagatcgccatgaccggggtggtcgtcgacggcggcaagaccaacaaccaagccggcgcgggccaatactgaccgacgatcaagtgacgatcgacaccaatatgctcaagcaagaagccagcggcaaatcaattatgtcgccgctgggttttatgtattttgtgattctatatgcacgctgcttgtccgtcccggccaatggaaaaaaaagggggaagaaaaaatgtctgtcggtatatgtgttctcgccgaataactctcgcgcatagctagctggtggggctgagtcactgccttcgctatatgtatacgtgcaaaaattagaggtggagggttgttttagctaatcccaccttaattccaaggcagagtgacctttttttttctccttctgtttcggctaggattttgctataattgagcaatttagcgcgacttgttattggtgttggtgtgtctcaatcaaatagtaaaatgttcattttactctttcaatcgcatc

SEQ ID NO: 131588 - DNA, 292 bp, Zea Mays
atcactcaccaagaaccagagaggagcttcatcagctcattcaattctcgttccatccctcgtctcttgtgtcccgcctccgttccataattcaccagcgtcgtcctacccatatctcccatcgtcttctccctcgcgccatcagcttccccaagccagcggcgaccatgatctccccggacaccatccgcacggccatcggcgtcatcggcaatggaactgcactcgtgctcttcctctccccagtgtaagaatcaattcattcattttgtctctcagtacagtaagaaac

SEQ ID NO: 131589 - DNA, 454 bp, Zea Mays
atcactcaccaagaaccagagaggagcttcatcagctcattcaattctcgttccatccctcgtctcttgtgtcccgcctccgttccataattcaccagcgtcgtcctacccatatctcccatcgtcttctccctcgcgccatcagcttccccaagccagcggcgaccatgatctccccggacaccatccgcacggccatcggcgtcatcggtgagtaatcgtcaatacctgcgcggactgtaccgtaccgtaccgtacctctgcatagaacgcgcatatacgcacagagcatgctgcaacatgtatgcagcagagaaggccagcctggagcctgctggttgcttgctgcctccctttggtagatggcactagcaggtcatgtgggttgccgggctgttttcatgctccagccttcctgcctgcacgcgctcacttcctcctttattagtttcta

SEQ ID NO: 131590 - DNA, 99 bp, Zea Mays
gccacaaccaaggagaaacacataaaaagatcatatgagaagctaaaacacataccatggccaattctagatatcctattacagctgatatccaacaag

SEQ ID NO: 131591 - DNA, 642 bp, Zea Mays
atgcggctcgccgtcaccgtgctcgtagggctcgcgcgcgtcccggaggttgcggccgacgagggggtcgtttccaccgtgcccctagtcaccgaggttgtcgccaaatcccgcatcgtgtgctgcaggactgatccagcaatcactgaagaatgctttgaacttctgtcacttattgcaatagcatctgaagatggggcatatgagttttgtgagcctggtgtaatagacatgatcttccttcaaatcttaatcttaacagatggacatattgctaagaatctgccacattatgtttgcttgagtttgcaatatttccttgcatatcgaagatttctagagatagatactctccattcttctcggcaactctacttatgtgagaaaatatctcttactggtgagatgtactttgccatcacccttgataggaaaactactggtccagtcaggcccgcaggagaaaaaatgaagttttggggctgccacatcctgcttggtgaatacatctccaatcttccagagagtgcgatacttacgataacagacatagaaggtgctctcaaagacattgaaggacctctcagagatattgagggaactctgatcgctactgaaggagctctcatgaccattgaatga

SEQ ID NO: 131592 - DNA, 1043 bp, Zea Mays
ggccgccgcgtatccggttctccaagcaaccgaaagaaaatagagaacctattcctactcggtcgtcgggtcccgtccggaggtgggcccaagaaaggtcctgcgtcggcggccccacgaagacacgacccatcggcaccgtcaaaatcctcacatcccgttagatcgaacggctcacatctcctgccgtgctcgtcggggccttttgcttcttctttctataaatcaaaccaaaaggcaacgacccaagtcccaacggaacttagctgccgagcgcccaaagccccaccgccgctcccatcaagcggcgctaaaggtttcctcgcccgcaacgcgatgccgaagaacaagggaaagggaggcaagaaccggaagcggggcaagaacgaggcggacgacgagaagcgggagctggtgttcaaggaggacgggcaggagtacgcgcaggtgacgcggatgctgggcaacggccgctgcgaggcgctctgcatcgacggcaccaagcgcctctgccacatccggggcaagatgcacaagaaggtgtggatcgccgccggggacatcgtgctcgtcggcctgcgcgactaccaggacgacaaggcggacgtcatcctcaagtacatgaacgacgaggcccgcctgctcaaggcctacggcgagatccccgacaacgtcaggctcaacgagggcgtcgttgatgaggaggaagccggcgcgcaggatgactatatacagttcgaggacgaggacatcgacaagatctgatgatcgcctcttccacacggtccctttccatggtaaactaaacgtatgcaaaacaattgtatccttctgttttgtggtggctaccatgactgaagaatggtagtcgtggtgatggtataatgatttgggcggagagtactgtgtataatgatttgggggcacttgttgtgcccaataaccccatatggtgatatagcaagtatgggactgaacgaaccgttcctctccctttctgttaatatgatatatttggttgggcatgatccaatttttttttt

SEQ ID NO: 131593 - DNA, 687 bp, Zea Mays
ctcccgttacgcgcccgcgccgccgccccctcaattcacacttcataaagccgatggctatgcaccgcgccgccgcgctcgcactgcgccgcctctccgccgcagcggcggcagtggctccaagccccgtctcccttacccatctccggccggtggtggtggcggcgaccgctaccaatgccaggtttgttatgcagcctacgaccgcggctgctgctttgcgcctccggcgcggttacgcggcaggcggtggtgcgggccggaaggcggtgatcgaggacgaggatgatgacgaggatgagctcgaggctatgggcagcgacggcgagttcgacggcgacttcgacgacgacttcgacggcgacttcgacgacgaggatctcgatgaattcgaggacgactctgatgatggttctgagcgcgaagccgggccctagcgcggaagacgctgagctgcagagctctgctcgctgcttattgcgtttttttggtattttttacggggaattcaaacagaaaaaacagtaagttagaactcaacggatcaatcagtatgtgttgtgctaaaccggttgttgtaatctcctattttgattgggttattcgaaaattgtaccgcgtcaaagaacagatcttggcgtactgtaattcgcagcggtgaaaaatagtatttcatttttttgatgc

SEQ ID NO: 131594 - DNA, 1457 bp, Zea Mays
cgtcgttcggcatccgcccagccccaattattagcgcagcgcaggcagcggtggcattcccgcaaatccctcgcgacgccggaggtcttgtgggtgcgcagcgagccctataaacttggggcggcgtaacctgcccgtcatttacactgccatgccacagccacagcatcacgtccactcattagcaaggtagcccgtgctgcacctgcctgccagccgcagctgtcctgcctttgccttcccatagcatagccatggacatttggaagtccaaggtgttgcccaagatcaagctcgtcttcgtcaagagcgccggcaagaaggccgccgccgccgccgagctcgtcaagtccttcgacgagtccaaggaggggatcgatggcgagttccaggagaagaaggctgatctccagcccaaggtcgtcgagatctacgagtctgcccctgcaccactcaaggtcctgatcaaggagaggagcaaggtgtccgggatcaagaagaactccgccgcaatcaccaagttcttcgaggagctggccaagatcgaattccctggagccaagcaagtgagcgacggcatctccaaggccggcccggccctgctgtccggccccatcttcgccacgttcgagaaggtctccacgctgctccctgtcgtcgctgccgaggagccggccaaggaggccccggccccgcccgccactgaggaggcagccacgaaggaagcgcctgttgacgagaagaaagaggaagcccccgcccccgccgccgccgtcgagaagaaggaagagacccaagaagaggagaagaaagaagacacccctgcaccgcccgccgccgagactgctcctcctgctgatgcagcagctgctacagagcagcccgctgcggaggccgcggcagaagctgaggctccacctgcacctgccgtggcggagccggccaaggccgaggaggagacacccaaggcctagctagctagggttcagcaggttcatcttcttgcgcttgctgcccctagctagctagctggtgtaccgtgctctttaatcacgtcaccatccatattgttgttgcatatatatgcacacaatgtttttgttgctccagatgttattgctgtgcaaacccgtgttagatatttatgtatgtatatgtaagcctatattattttttttgccactacgtattcatatgcagtgtgaggaggtatgtatattattgccagttttggttcaactcaatcattctttaatttggttcactcatgattgatcactacctctctacatcacgaaattaaatctcaggccattgacgagtacgtaggccccgttttgtaaggctccggctccaaagatggctctggctctagcttttaaacagctccttaataggagccaatgtatttctttgtaaatcgtttaataaaatggctccttcagaaattttcctac

SEQ ID NO: 131595 - DNA, 1637 bp, Zea Mays
cgtcgttcggcatccgcccagccccaattattagcgcagcgcaggcagcggtggcattcccgcaaatccctcgcgacgccggaggtcttgtgggtgcgcagcgagccctataaacttggggcggcgtaacctgcccgtcatttacactgccatgccacagccacagcatcacgtccactcattagcaaggtagcccgtgctgcacctgcctgccagccgcagctgtcctgcctttgccttcccatagcatagccatggacatttggaagtccaaggtgttgcccaagatcaagctcgtcttcgtcaagagcgccggcaagaaggccgccgccgccgccgagctcgtcaagtccttcgacgagtccaaggaggggatcgatggcgagttccaggagaagaaggctgatctccagcccaaggtcgtcgagatctacgagtctgcccctgcaccactcaaggtcctgatcaaggagaggagcaaggtgtccgggatcaagaagaactccgccgcaatcaccaagttcttcgaggagctggccaagatcggtgagtagatcgatgtagtactaggccacacagtgacagtgccagacagacagcaaattaataaatacacattcgcatatctcatcaatgaacagtaagtagttgctactagctcgatcctatctgtgtactgtgctgatgacgaggggcgccacgccacgcgcgcgtgatcttctgagcagaattccctggagccaagcaagtgagcgacggcatctccaaggccggcccggccctgctgtccggccccatcttcgccacgttcgagaaggtctccacgctgctccctgtcgtcgctgccgaggagccggccaaggaggccccggccccgcccgccactgaggaggcagccacgaaggaagcgcctgttgacgagaagaaagaggaagcccccgcccccgccgccgccgtcgagaagaaggaagagacccaagaagaggagaagaaagaagacacccctgcaccgcccgccgccgagactgctcctcctgctgatgcagcagctgctacagagcagcccgctgcggaggccgcggcagaagctgaggctccacctgcacctgccgtggcggagccggccaaggccgaggaggagacacccaaggcctagctagctagggttcagcaggttcatcttcttgcgcttgctgcccctagctagctagctggtgtaccgtgctctttaatcacgtcaccatccatattgttgttgcatatatatgcacacaatgtttttgttgctccagatgttattgctgtgcaaacccgtgttagatatttatgtatgtatatgtaagcctatattattttttttgccactacgtattcatatgcagtgtgaggaggtatgtatattattgccagttttggttcaactcaatcattctttaatttggttcactcatgattgatcactacctctctacatcacgaaattaaatctcaggccattgacgagtacgtaggccccgttttgtaaggctccggctccaaagatggctctggctctagcttttaaacagctccttaataggagccaatgtatttctttgtaaatcgtttaataaaatggctccttcagaaattttcct

SEQ ID NO: 131596 - DNA, 1548 bp, Zea Mays
atggaggacgtcgtcaggatcgggagcttcgacttggacgccgtcagcggcgcgtacccgacgacgctgcccagcccgaggatggtcgccgcaggacgagagctccagctcatccactcgccacgccagccgtcgtcggggttcagggagagcctcaacccgatctacaccgaccacgacaccacgacgacgaccacgacgacggcaaccacggattcgtcaccgttggccgccgcggcaaaccacgctgcgacggcggcagcggcagcggcacgggccgacggcggcggcagctcggtgcccgcgcgtcgccacactgccagcgccgccgggaacgggcgctgggaggccatccgcgtggccgagccaccgctcagcctgggccacttccgcctcctcaggcgccttggctacggcgacatcggcagcgtctacctcgtcgagctccgcggcggccgcggcgcgctcttcgccatgaaggtcatggacaagggctctctggccgggcggaacaagctgccccgcgcgcacacggagcgggagatcctgggcctgctcgaccaccccttcctgcccacgctctactcccacttcgagaccgacaagttctgctgcttgctcatggagtactgctgcggcggcaacctccacgcgctccgccagaagcagcccaacaagcgattcaccgaggacgcagccaggttctacgcctctgaagtcctgcttgcgctggagtacctgcacatgctgggcgtggtgtaccgggacctcaagcccgagaacgtgctcgtcagggaggaaggccacatcatgctctccgacttcgacctctccctgcgctgctccgtcagcccggcgcttgtccgctccccgtccggccgggtcagcggaggcggcggcctcgcccacggctgcatgctcccgcgcatcctccaggtgaagaagaagaagaagggagacaaggctaataaggccaataagctggacaacgagacggtgactagcaagaagccgtcgtcgctggagttcacagccgagccgacaagcgcgcggtccatgtcgttcgtgggcacgcacgagtacctggcgccggagatcatccgcggcgagggccacggcagcgccgtcgactggtggacttttggtatcttcctctacgagctcctgcacggcgccacgccgttcaagggctccgggaaccgcgccacgctcttcaacgtcgtcgcgcagccgctcaggttccccgacgcgccggtggtcagcgccgccgcaagggaccttgtccggggactgctggcaaaagagccgcacaaccggctcgcgtcccggcgcggcgccgcggaggtgaagcagcacccctttttcgaaggcgtcaactgggcgctcgtcaggagcgcccagccgccctacatccccgacgccgccgttgatcactgttcccacttcgcctgcgacggagcggcgcaaggtgccacgcccaagagctccgcacggaaaaccggctcgcgtcgcactgattcctcgcatgtcgatattgagtatttttag

SEQ ID NO: 131597 - DNA, 653 bp, Zea Mays
cggttgtcgtctgatgtaccctagcactcgtgcttgcccctggctcgcgttagcgcttgcgtgcctgctcgttgtcactgcgacgcactcgctcttcgtccatcaggcttcgcgcgtgctcgtgtttgccgtcgagctgttgaacccgtcctcccttgttcgtgacttcgtcgtcgccagagccctcacgggattcgtgtccttgccagctcactccagactcgatctcgtcgtcattccgtgcatcatcaagaaatcccaagaatcgggtgaagacgaagctagcagcgtgatattccccaagtgctcgacacaagggcggaaccagaatccttgccgtgttcgcggatagcgcgtcagatttagtatggtaagccgattcatatttttgttagcttaattattggtttgatgaatatattgtgtacataagtataaagtggtcgtgtcacgcgaaactcaagtttaaaatgattattgtgtaagaagaattaatagcgtgaagaattgatttagtaatccaaacgattatcgataaggctttcatcgttaattttgtaggatattttggtagtcaaacctgaaatatttgattaatcgttgacatgtaaaatatgtgaggtgtgaaataaaattaaaatagttctttgtga

SEQ ID NO: 131598 - DNA, 1944 bp, Zea Mays
gaaaaggaaagagagaacgcaaaccaccactccgcagtgccccaaggacggtcaccggtgccggtacattcactagccacccctgctctcccgatcaggattcaggagcgcgccatcatccgccatggaccaccttctcgaccgtcgcctcggcgcgcctctcgtcgtcatcttctcctgcctggcgctcattcttgccgggtgcagcagcgcgctcgcagccccgcgcccggtcttcgcgttcccggcagtcgccgccaaggcgcaggcaatggcgcgccacgagcgcctgcgcgtcgcgctcgacgccgccgccacgcgcgtgggcaaggcgctcggcgcgctggccgccgccacgccggcctcctcgtcgccgctggccgcggccgcccgggaggactgcgcggagctgctggacgaggccctccagctcctggccggcgcgggggcgcccggagcggcccgccgcgacgcgctcacgtggctgtccgccgcgctcaccaaccacgacacctgcgccgatagcctcgccgaggccggggcgcccctccacgcgcacctcgccgccgctcgcggcgtggtccgtgacagcctcgccatgtacgcgtccaccgccgcggaggccgcaaccgccaccacaacaactggggccggcggcgcgggcggcctcgtcatgggcgaggaacgcagcggcaagaacgagacgaaacggcggggcccgtgcggtttcccgcggcggcagccggtgagggaccggcgcctgctgctagcccccgcggcggcgctggctgcgagcgccgacattgtggtcgccaaggacggcacggggacacacgccaccatcgccgacgccgtgaaggcggcgcccgagtgcagcgagcgccggacggtgatacacgtcaaggagggacggtatgacgagaacgtcaaggtggggatgaagaagaccaacctgctgttcgtcggggacggcaagggcgtcacagtggtcgccggcaaccgcagcgttgctgacaactataccaccttccggaccgccacctttgccgcgtccgggtttgggttcatgatgcgcgacatgacggtggagaactgggcggggccggcggggcaccaggcggtggcgctgcgcgtgagcgccgaccgcgccgtcgtccaccgctgcagcatcgccgggtaccaggacacgctgtacgcgcattctaaccgccagttctaccgcgactgcgacatctacggcaccgtggacttcgtcttcggcaatgccgccgccgtgctccagcgctgcaacctctgggcgcgcgtgccgctgccgggccagaagaacaccgtcaccgcgcagagccggaacgattcgtgccagcgcaccggcatcgtcctccacgcctgccgcctcgtggcggccgcgccggcagaaggcctctcgcccgcggcggccccggcgcccgtcccggaccgttcgccgctgctcctctccccgacgacgtacctgggccggccatggaagtccttctccagggtggtggtgatgatgtcgtacatcggcccgcacgtgccgccgcagggatggatggagtggaacgccaccagcacctacgcactcgacaggctttacttcggcgagtacatgaactacgggcccggcgctgggttggccgggcgtgttgcgtggcctggccaccgcgtcatcaacagcaccgcggaagcggagagcttcacggtggcgcggttcatcgacggcgcgtcctggctgccggccgccggggtctccttcgttgccgggctctcgctgctgtaatcgtcttgatggaaatcccagggcacaccagggaccaggcaggctgagtgacaagtagacgtgataatgtacttttagtggcggcagttcgaatcaattcaaatcattttgctgtgagatttcagataacaaatttgcagcacaaa

SEQ ID NO: 131599 - DNA, 235 bp, Zea Mays
cttatgtttcttttgccaaattttgttcatttttcctccattttagccacattttggatatagggtttcatcatgtgttagagataaagtagtctaactacttttattggaagagataaagtagtctaactacatttttggatatagggtttcacattttagccacattttagccacattttattgttagagataaagtagtctaactacatttttggatatagggtttcaccat

SEQ ID NO: 131600 - DNA, 438 bp, Zea Mays
gtccatatttttcgtttatatcgctgatttgtttgtcctgatttatttctcatccagttttatttttgtgactgatttgtttattcgtccagatttttttatccggcgagcacagcagctgtgtgccacagtgctcacaagccgtcaacttctccccttgtttgttcagctaaccacaataaaaatcaaatgagaacactcttacttcaatcatgatcaaataaaaatattatattttcattgagttcttttgaacataaattttaaatacataataacatattaccagtaaaaagcacacatattcctttttttcttctgcactaaataaaagtatactccattatatacttgtctcatggatgatatattttagaatttattgcatatcagctgttgtgatcgccggattaaaaaaatctggacgaataaacaaat

SEQ ID NO: 131601 - DNA, 414 bp, Zea Mays
ttttgatgattttatgtagaaagaaatgaataatgtacaaatagcctcagaaatctatgaagttatacgaaggtacaacatatggccacatatagtcataaaaataatgggaccataaaatccacaggatgtaaacgttttttctattttatttccacttattgcgtgagttacacgtgaaatcactctaagtatccaagtttcaacataattaatacttcactttaccatttttatgtgggaacttgagattatcttctattaaatgtttattagtattaatttacttgcaatttcgtggtcgaacaagaatattttatgataaccaattaatgcattatccgacaagtatccgatatccgatcaaataatatccgtatccgtcacttatccgcccggataaatatccggtcc

SEQ ID NO: 131602 - DNA, 177 bp, Zea Mays
cgattattgttttttatgcctaccacatgcactatttacgctgaaaactgtacaattttatgcttgaacacagagctcgtatatcagtttactgtatgcatattttttgcatgcacattgtaaaggcaaatccttgatttatgttgtttgtaattaccataaaaaatcaaatcattt

SEQ ID NO: 131603 - DNA, 2065 bp, Zea Mays
attccagtccaccctcccttccccgcacgaaacccccaccagtattcatccatgtcagccgccgtccgctcccgcgccgcagcggccgccctctcggccgcgcgccgcatccacgctggccacgccgcggggcagaagcagcagggcagcaacagcactggcgcctttcgccgaccttggaccctcttcaggcgccagcagcaggaggagcggagccacgttccccgcgccgccgctcctgtcctggatgctgtcgccgatcacagggccggcggttcggacggtgcggagcccccagagatctggcgacagcccggagaagcccctgtcgctcccgagggtgtgggcgccgtcgggaggatcgacgtggttagggttgcagcccccggtggggaagactttgatggaaaggacgggggcggggaaagcgggggttggggtggctctaacctgggacgacggtttcccacgcccaaggagatttgccgtgggctggacaagtttgtcatcggccagcagcgagccaagaaggtgttgtcagtagcagtttataatcactataaaaggatctattgtgaatcactcatcaacaggtctgctgcggattgcagtcagagtgattcttgcacgagtgacaccgacatggtagagcttgagaaaagcaatattcttgtcatgggaccaacgggctcggggaaaacattgctggcaaaaacactggcaagatttgtgaacgtgcccttcgttatagctgatgcgacaagcctcactcaggctggatatgttggtgaggatgttgaatctattttgtataagctcctagcggctgctgatttcgacgtagctgctgcccagcagggaatcgtctatattgatgaagttgataaaataacaaagaaggctgaaagcatcaatcttagcagagatgtttcaggtgaaggtgtgcaacaagcattgttgaaaatgcttgaaggaacggttgttagtgttcctgagaaaggggccagaaggcacccaaggggtgacaatatccagattgataccaaaaacattctcttcatctgcggtggtgcttttgtggacttggagaaaactatttctgaaaggagacatgattcttcaattggtttccgagcgcaggttcgttcaaatatgcgatctggtggtgtcataaatgctgagattacatcatcgctactgaaatcagttgaaagtggcgatctcattgcgtatggactaatcccagagtttgttggtagatttccaattcttgttggtctatcctccctcagcgaagatcagcttgttgaggttctcacagagccaaagaatgcccttggcaggcagtataccaagttgttcgaaatgaatgacgtcaaattgcattttacggaggaggctttacggcttattgccaaaagagcaatatcgaagaatactggggctcgtggtttaaggtccatattagaaagtatattgacagaagctatgtatgagattccagagacacgaactggaaaagataaaatagatgctgtggttgttgacgaggagtctgttggatctgtaaatcagcatggaattggagctaagattctttgcggagaaaaagctttggatgtctatctggccaatcacaacaataaagaatcaacgggccaactccaggagagaccaaacggggaatcagagatcgatacggaagccccctctagagtggccagcatgtagaggttcctggcaacaataattatgtatataaataacttattgtctgccttgtaactgtaaccaattcaaatgtaaagtcgggccatataaattcatcatgtgaccggcgctgggttgtaatttgtcatgttgaatttcgggggactgaagcttgatcttgcagtatttacataaggaaagtaaagaggatcgctttgcgtctttgggcaaatcagggaaccatccaactctgatttccgtttcatctttcacgcgatggataggtatgctagtagccagatcttttttttgaagcctgcaatgttgttccgtatggtttcgtttcaggtttttt

SEQ ID NO: 131604 - DNA, 2069 bp, Zea Mays
attccagtccaccctcccttccccgcacgaaacccccaccagtattcatccatgtcagccgccgtccgctcccgcgccgcagcggccgccctctcggccgcgcgccgcatccacgctggccacgccgcggggcagaagcagcagggcagcaacagcactggcgcctttcgccgaccttggaccctcttcaggcgccagcagcaggaggagcggagccacgttccccgcgccgccgctcctgtcctggatgctgtcgccgatcacagggccggcggttcggacggtgcggagcccccagagatctggcgacagcccggagaagcccctgtcgctcccgagggtgtgggcgccgtcgggaggatcgacgtggttagggttgcagcccccggtggggaagactttgatggaaaggacgggggcggggaaagcgggggttggggtggctctaacctgggacgacggtttcccacgcccaaggagatttgccgtgggctggacaagtttgtcatcggccagcagcgagccaagaaggtgttgtcagtagcagtttataatcactataaaaggatctattgtgaatcactcatcaacaggtctgctgcggattgcagtcagagtgattcttgcacgagtgacaccgacatggtagagcttgagaaaagcaatattcttgtcatgggaccaacgggctcggggaaaacattgctggcaaaaacactggcaagatttgtgaacgtgcccttcgttatagctgatgcgacaagcctcactcaggctggatatgttggtgaggatgttgaatctattttgtataagctcctagcggctgctgatttcgacgtagctgctgcccagcagggaatcgtctatattgatgaagttgataaaataacaaagaaggctgaaagcatcaatcttagcagagatgtttcaggtgaaggtgtgcaacaagcattgttgaaaatgcttgaaggaacgataggttgttagtgttcctgagaaaggggccagaaggcacccaaggggtgacaatatccagattgataccaaaaacattctcttcatctgcggtggtgcttttgtggacttggagaaaactatttctgaaaggagacatgattcttcaattggtttccgagcgcaggttcgttcaaatatgcgatctggtggtgtcataaatgctgagattacatcatcgctactgaaatcagttgaaagtggcgatctcattgcgtatggactaatcccagagtttgttggtagatttccaattcttgttggtctatcctccctcagcgaagatcagcttgttgaggttctcacagagccaaagaatgcccttggcaggcagtataccaagttgttcgaaatgaatgacgtcaaattgcattttacggaggaggctttacggcttattgccaaaagagcaatatcgaagaatactggggctcgtggtttaaggtccatattagaaagtatattgacagaagctatgtatgagattccagagacacgaactggaaaagataaaatagatgctgtggttgttgacgaggagtctgttggatctgtaaatcagcatggaattggagctaagattctttgcggagaaaaagctttggatgtctatctggccaatcacaacaataaagaatcaacgggccaactccaggagagaccaaacggggaatcagagatcgatacggaagccccctctagagtggccagcatgtagaggttcctggcaacaataattatgtatataaataacttattgtctgccttgtaactgtaaccaattcaaatgtaaagtcgggccatataaattcatcatgtgaccggcgctgggttgtaatttgtcatgttgaatttcgggggactgaagcttgatcttgcagtatttacataaggaaagtaaagaggatcgctttgcgtctttgggcaaatcagggaaccatccaactctgatttccgtttcatctttcacgcgatggataggtatgctagtagccagatcttttttttgaagcctgcaatgttgttccgtatggtttcgtttcaggtttttt

SEQ ID NO: 131605 - DNA, 370 bp, Zea Mays
caccacaattatatattcacaaaagcatcacaattatagtatcattcacaactagatcatttacagatagctagctagatcattcacaaaagctcctgagatgatcaatcacaaaagcaccacaacgacatcactgcagcttgaagcaattcaaaaagcccacaactacatcactaatgtttcatatcactccagctattgttcaaaagcccacaactacatcagtctagctgctccagagttgatcagtcacaaaagcaccaaagctacactaatgcttcaagcagttcaaaagccttcagacaaccactccagcttcttgtatcctcctgttttaaggtacaagctttctttgtcgagaacaccctag

SEQ ID NO: 131606 - DNA, 339 bp, Zea Mays
atggtgctggcggtcgtggtgctgctgggcgccgtggccgtccttgtggtggtgctgctgctgcagccccgcgcgccgggcgtcctcccgctggcgtacgtggggcgcgcgcaaggcgccccgctgggcgacgccggcagcgccgccatggaggtcgcgctccgcgacggcgtggtgccgttccgggtggagggggaggcccggatgcgatggaaggtcgcggggatcgtcggcgtcgaccagtggacgtgcctgccgtgccagctccgcttcttctggcccaacggcaccgtgctccccttcagatgcagctccaagtccaagttcttgttcttctga

SEQ ID NO: 131607 - DNA, 154 bp, Zea Mays
cttgtgtgtggaccccatgcgccagcaccttctttaatctccagccgcgtctgtttccttcgaacgcagatagcgctgccagcggttttaactcgttgctgccttttcgtcaaccctgtgcccgtccagctccagtggaacagcataaagcctg

SEQ ID NO: 131608 - DNA, 773 bp, Zea Mays
ggacggcgccggtggtaggccggtctcgcggacgcacggggcaccaccgggcggcctagtgctggtctccaaggatccggacaacatccgcgagatcgcgctgcgtgagtacaccgagctggtgatcgacgagacggaggtgtcggaggccactccagcagaagatgatgacttacttaaagttggtacaggcatttgctcttcaacacctaaaattgttgaaccccagcaacataattgtacctctgtaacagaagatcatctgataatccctaaagaagctgacaatgtttgtgggcagcattatcctatcactgagaaaatctaccgttcacacatgtggcaaagagagcaatcaaaagaagaatggtgcaggatgcattggacagtaatgcttgagtatggtacatcagggggctgtcagctacaaccttgatggaatacctccatcgatctaagggatattatagcagaaattgatcttcacccgggaatacacgacctactggcacatttgatcaccatccattataggagaattctcaaccaaatctgcttattgtagtttctttgtcgggggctcggggctgttgattttgacccatggaaagaaatctagaagttttggactgcacctccaatgcaagtttttcatttggttagctgctctaaatcagtgttggactgcagtcaggttagctcactggggacttgagcatcatgagagttgtccattgtatgatcaagaagaggagaacatacaacatttgctc

SEQ ID NO: 131609 - DNA, 255 bp, Zea Mays
atgacgaaacgatggtgcgcgcatgatgtgaaacgtcctcgtggatgtgcaatagccactgccgagtcggtgtcgaggctggtgtcggacgaatacggggagtatgcgcatgctcctacgccctctgccaagaatggggtgacacggaggtggaggcatgatgggagagagaaaagaagtagaattgcgaacgaggtggtggcaactgaggcgaggaccatcattatcgtgcggaggtatagatggtcaaattag

SEQ ID NO: 131610 - DNA, 362 bp, Zea Mays
acatggcactgcggggaaatcgagtgtcgttgcgttgttacaccgaactgacctcccgaaggccatatagtggactctcgagggtttttgttccacctttcacccccacaaatcatcgctggtcgagagaattaagagagagggagccgttggtggctgccgcactggaattttaggccaagtgcaactaagctcttggcgagtgtccaatagggttcgcccggtcgtggggaaggttgtcgacaactttcctggggcgaatcgtgacacagcgccatagaatctctcgccggagttcacgttctgcggctgtccgcctcgccgcgtgtctgacctcacccgcgacataatcggtcggtaag

SEQ ID NO: 131611 - DNA, 1147 bp, Zea Mays
aagcttgcacatttttcccgcacatgggagaaagatgatgagatgaagatcttggaggctctcgcggcccatgtcaagagtgagggcgtgctgccgaagactgattttcttcttgctagtgttcgtgaccgccttgtcaggaagaactgcaactacacggatatatatgagaaggtacgaaggctaaaggagcgctatgaaaaattggtgagcacgggcactgtaccgagtaaagaagatgagctccagatgtataatctctctaaaacaatctggggagagaagtcaaaggaggctactgctgccattacgtctcaaaaaggtggtgctgtgacaaagcgtaagaaggggcaggctaacaaagagaagatggatggaaatgcaaagagtggtgtggcaaaggaggctgcccatagtactgccaatcaaagtggcgattctcataaaggaagtaagaaggggcaagccaggttgtcagaggacgctaccaccactgtatccccaagtaagagtaagaagcaggaaactcgtaatgaggaattggacaaagatggtggtaatttggccaagggaaagaaggggaaaacagacaaagggaagatggacagagacacagataatctgacaccaaaggaaaccataaatgaaaatcagaatggtgacattctgattaggagtaaggaaggagaaattcatgatgatgaaacaggagatgctaatgtgcaaggtgtgcgcagaggttttgataagctgcagaagttgtattccaaccttgctttttatgtggaggagattgaggcccatcatccatgtggggagactctgaagagagcatttgagttcattgctgatgagaaggcagaaggtctggaatccaagatcaagaagcaaagagtagcagaggcgaaggcggaggtccgtcaaggcgacgtaaagaaggaggttcttaatttgctgctcagcttagtggactaaacctttctggattattgtggtataacattctacttgagttatttagtttcctcttgatgtctggtgcattattattgcccaatttgtagaattcataggttcaaaacttggatttcacatttgaatcaattaatcagtgttactaaaactacgtttaaacgatgtttaaact

SEQ ID NO: 131612 - DNA, 110 bp, Zea Mays
gttcttaccttaaccttaccgaaatggatcattctggatatttaaagaatcacagatcgagatcgtttttgcttaaccaaagaaaagaaggatgcttcttttttactaat

SEQ ID NO: 131613 - DNA, 1112 bp, Zea Mays
ccgccaactcaaaatccgaccgagtcgtccgcatcagttttccttcccattccccgttcccaacccaccgtaaaccctagctgcgagctatggcccgcaagcgccaggcgccgccgccgccgccgccgccgccgccgccgcaggaggaggaggatgagtcatcctccgaggaatctggctccgaagaggagtctcctcgcctccccgagctccgaaggccctcgcaggccgccgccgccaacaacgccgactcgtcggacgcggactcggattccgacgccgacgtccaagccttccagatgcgccaggtgccccgcttccccaccaagcagacacacccagtctctcacccagaatccggtgccgaagaggaggagggcgagttgtcagagtcggagcacgagaacccggtgcctgtggttcagaagaaggccgtggcggcggcagggatgtccaagacagggcaggagaggaagaggcccgcctcggatcctgctccaagcgggaaggcaaaaaagaccaaggctgaggctacccctcctgctaaggcgaagaagggagagaagctggcgcctgatgcgactcctgcaggaaaggcaaagaagggcaagaccgagctagagacactggcacctgatgccactccagcaggaaaggcgaagaaaggtaaggtcgagaagacagctcctgaggccactccctcaggcaaggggaagaagggtggggacaaactggagaagccagcagcgctcgatcgctcaccttcagacagcaagtctgaaaagcttgcacatttttcccgcacatgggagaaagatgatgagatgaagatcttggaggctctcgcggcccatgtcaagagtgagggcgtgctgccgaagactgattttcttcttgctagtgttcgtgaccgccttgtcaggaagaactgcaactacacggatatatatgagaaggtacgaaggctaaaggagcgctatgaaaaattggtgagcacgggcactgtaccgagtaaagaagatgagctccagatatataatctctctaaaacaatctggggagagaagtcaaaggaggctactgctgccattacgtctcaaaaaggtggtgct

SEQ ID NO: 131614 - DNA, 1014 bp, Zea Mays
cgtttgtttcaggcccggcgagccctgcgcgcactacgtggcttggtgcgcctgcaggcgctggtgcgcggtcaccaggtgcggcggcaggtgcacctcaccatgcgctgcatgcaggccctcgtccgagcccaggcccgcgtccgcgcgcgccgcctcacccaacacccgctcctcctcctcccgccgccgacacctccagccagcagtcccaccctgctgttgggagcggggcgtccattatgcgtcgagctggcattgcagggcgaccacgacgtcggtgacgacggcgaggtggccgatctgttgctccagcagagaagcaggagcagaggcaggtttggaagaggcgacgataacggcggcgcgaggagcccttccggggcctgggacagcagtagccgcaccctggaggacgccagggcggagggcgcgcgccggcacgacgccgccgcacgccgggagcgggcgctcgcctacgcctacgcctaccagcagcggcagtggcagcggcaggaggacgagaaggccggcctgggcttccactggctagagcgctggatggctgcgacgacgcaggcgcagcagcaggagcacgcgcccgaccacgccaagacgcaccagagcacccccaccaggacgacgtcatcctacgtgacggcggccgctgctttcgcgaacggcatgtcggagaagacggtggagacggagacgacgtcccggagcccactgaaccaggcctccgcggctgctcacgggcgtccgcccgcgatcccgggctacatggctgcgacaaggtcggctcgagccaaggcgcgccccgcgccgccatcggctacacccacgcatgccaggagccggtcgggtggcgggctcgccggggacacgtcgagctcgggccagaacggcagtgcggtcgccgggtacagcccggactcgagctgcacaggggactggaccccgccgcggctcggtgtcagcacgcgcaccagcagggtggcctatacttgagct

SEQ ID NO: 131615 - DNA, 1084 bp, Zea Mays
gttggagttgaatatgttgtttttttgggggtatttagatctttaagaagatctcaatataacaatattgaaagaaatacaccaatttagcacttggatacctcgtgttgggcctcaccactctgctactccttctgggctcgtgctcgtcatcaccagttcaggacacgacgttgaagcagacgacgctgggttgctaacattcagaccgttcgatcttcgatctagcactagatcaccaactggaaaaaataacacgcacgcaagaggagaaaacaatccgcaaatcggcgctcggcttccgtcctttccgtgcctccgccgatccgccgcaaccgcgtcgtccgtccccccgttcggtcgccgccctctttcccgcctcccttctcggcctccgtcctcctccgcgtccgcggcctcctcctcgtgcttcatgtctgcgctcttcaacttccactcgtttgtgacggtggtgctgctgctgatctgcacttgcacgtacctcaagatgcacttcccctccctcctcatccgccggacagggttccgtggtttcttttggaaggctgctaggataggtgaacgccttagcccctgggtagccattgggtgctctgtgatgggcatatcaattttattttggtgaaattggaagatttgtatggccttctttgcttacgattactccattgtaagatagcccgttacttgcttctttcataagcatgtaagaaactgcacagtccttaattgtccttttatcacatttcagaagagaagcatcagaattttgcagttacagtctgattcttcgagatgtcgcatgcttgtaatcttgtagctgtggtgtattattgtgctatgttatgcattttgactattgggcaccatcatgttatgttgttttattgtatttcaattatccggtttttatatatcatataaataggtatttgagattattatttaaatataattattgtttatttctaaacactgtacgtgtggtctgttggttaactctaaatttctgaagcaagggttgtaggtttgagtactcactttgcagtatttttatatataa

SEQ ID NO: 131616 - DNA, 949 bp, Zea Mays
gttggagttgaatatgttgtttttttgggggtatttagatctttaagaagatctcaatataacaatattgaaagaaatacaccaatttagcacttggatacctcgtgttgggcctcaccactctgctactccttctgggctcgtgctcgtcatcaccagttcaggacacgacgttgaagcagacgacgctgggttgctaacattcagaccgttcgatcttcgatctagcactagatcaccaactggaaaaaataacacgcacgcaagaggagaaaacaatccgcaaatcggcgctcggcttccgtcctttccgtgcctccgccgatccgccgcaaccgcgtcgtccgtccccccgttcggtcgccgccctctttcccgcctcccttctcggcctccgtcctcctccgcgtccgcggcctcctcctcgtgcttcatgtctgcgctcttcaacttccactcgtttgtgacggtggtgctgctgctgatctgcacttgcacgtacctcaagatgcacttcccctccctcctcatccgccggacagggttccgtggtttcttttggaaggctgctaggataggtgaacgccttagcccctgggtagccattgggtgctctgtgatgggcatatcaattttattttggtgaaattggaagatttgtatggccttctttgcttacgattactccattaagagaagcatcagaattttgcagttacagtctgattcttcgagatgtcgcatgcttgtaatcttgtagctgtggtgtattattgtgctatgttatgcattttgactattgggcaccatcatgttatgttgttttattgtattgtcagcatgctaacaaatgtggcttggatattcaggtaacccgttattttattttattgtttgatgtataagaagcattgtagcaagcttttgatttatctactgtgtgtttggt

SEQ ID NO: 131617 - DNA, 105 bp, Zea Mays
ctatttatatagctataacatactcatgggctatacctatccaaccattagaccgaaccattcacagcatctccaacggcctccaaacagtattcctaaaacgtc

SEQ ID NO: 131618 - DNA, 1673 bp, Zea Mays
agcttagatttagaggacaatcttttagttggagaagtaccagcttcccttggcaacctttctaagcttcagctgttgatactgagtcaaaataatttcaatgggtcaattcctggtagcatagcgaacatttcaagcttgacagacatacgcctggcatataataatttgtccggtcagatacctgggttgctgtttcaagtagcacgttacaacttttctggcaatcacttaaactgtggacctaacttcccgcactattgtgcatcgaacacatcctatccgagtggatcccataactcaaaaattggcttaatacttggaacagttgggggaattttagggcttattatcgtgggagctctgtttctaatctgtaatgcaaggaggaaaagccatctgcgggaagtttttgtggatgtagcaggcgaggatgatcgacgaattgcgtttggccagctcaaaagatttgcatggcgagaactgcagattgcgactgataatttcaatgaaagaaatgttcttggacagggaggttttggtaaagtgtacaagggagttcttccagatggcactaagattgctgtaaaacgactgactgactatgagagtcctggtggggaggctgccttcttgcgtgaggttgagcttatcagtgttgcagttcaccgcaatctcttaagattaattggcttctgcacaacacaaacagagcgcttgttggtctatccatttatgcagaatttgagtgttgcctaccgcttaagagattttaagcctggagaagccatcctggattggccttcaaggaaacgggtggctataggtacagctcgtggactggagtatctgcatgaacactgcaaccccaagatcatacaccgtgatgttaaagctgcaaatgtattgcttgacgaggatttcgagcctgttgtcggcgattttggcctagcaaagctagtagatgtgcagaagacgtctgtgacaacacaagtccgcggaaccatgggtcacatagcacccgagtacctgtccacagggaagtcttccgagaggacagatgtttttggatatgggatcatgcttcttgaacttgtgactggtcaacgggctattgacttctcacggctggaagacgaagatgatgtgctattgcttgatcatgtaaagaagctacagagagaaggggagctggactccatcgtggacagcaaccttaaccagaattatgacggcgaggatatcgagatgataatacagatagcgctgctctgcactcaggcatcacctgaggaccgtccatcgatgtctgaagtggttaggatgctggaaggcgagggtttggcggaacggtgggaagagtggcagcatgtggaggtgacaaggaggcaagaatatgagcggatgcagcggaggtttgactggggagaggattcgttctacaaccaggaagcgatagagctgtctgcaggtagatgataatctgtggaaacggatggttgtaaatgcgcaacgaagtggtgcctgctgtgccgtatataactattatttgtagagtagctattagatagatatgttcataagattattcaaacaaacttgctcggcgatagcatgaatgtggatgaaattagatgcataaataaataaatggaagtagagatgaaagtggt

SEQ ID NO: 131619 - DNA, 1422 bp, Zea Mays
accaatgcatagtactttgttatggtttctttgtattttatgagatcactaattccataattatcatcttacatacaggtggatcccataactcaaaaattggcttaatacttggaacagttgggggaattttagggcttattatcgtgggagctctgtttctaatctgtaatgcaaggaggaaaagccatctgcgggaagtttttgtggatgtagcaggcgaggatgatcgacgaattgcgtttggccagctcaaaagatttgcatggcgagaactgcagattgcgactgataatttcaatgaaagaaatgttcttggacagggaggttttggtaaagtgtacaagggagttcttccagatggcactaagattgctgtaaaacgactgactgactatgagagtcctggtggggaggctgccttcttgcgtgaggttgagcttatcagtgttgcagttcaccgcaatctcttaagattaattggcttctgcacaacacaaacagagcgcttgttggtctatccatttatgcagaatttgagtgttgcctaccgcttaagagattttaagcctggagaagccatcctggattggccttcaaggaaacgggtggctataggtacagctcgtggactggagtatctgcatgaacactgcaaccccaagatcatacaccgtgatgttaaagctgcaaatgtattgcttgacgaggatttcgagcctgttgtcggcgattttggcctagcaaagctagtagatgtgcagaagacgtctgtgacaacacaagtccgcggaaccatgggtcacatagcacccgagtacctgtccacagggaagtcttccgagaggacagatgtttttggatatgggatcatgcttcttgaacttgtgactggtcaacgggctattgacttctcacggctggaagacgaagatgatgtgctattgcttgatcatgtaaagaagctacagagagaaggggagctggactccatcgtggacagcaaccttaaccagaattatgacggcgaggatatcgagatgataatacagatagcgctgctctgcactcaggcatcacctgaggaccgtccatcgatgtctgaagtggttaggatgctggaaggcgagggtttggcggaacggtgggaagagtggcagcatgtggaggtgacaaggaggcaagaatatgagcggatgcagcggaggtttgactggggagaggattcgttctacaaccaggaagcgatagagctgtctgcaggtagatgataatctgtggaaacggatggttgtaaatgcgcaacgaagtggtgcctgctgtgccgtatataactattatttgtagagtagctattagatagatatgttcataagattattcaaacaaacttgctcggcgatagcatgaatgtggatgaaa

SEQ ID NO: 131620 - DNA, 761 bp, Zea Mays
cgtagtcgccgtcacttctcccatggccgccccctccctcagccgtggcgggggccgacggcatagcgctcatcaccatcgccaaccttcttgtggtggatgcgccatcgcctgatgcgagccgcggggaaatgagggatccttggaggcagagcgacgcggccccgtctccgtctctggccccagcgacgccgccggcccccgccacctcgtcccccgcggcgctgctccgcccgcagcgggaggcgttcgagcatgggctcctgcccatccctaagctcatcttcccggagggcatgctggcgcagaccctcgcccagctgaaggagaagctcgccgcctcagtccccgacgggcgcgtgcgcgctgcggccctagctgaggcgcagcagatcccgcaggagcaggcggcgctcgccctcggcacgcttgcggcggtgctcccggccgaggaccccgtgcttggggacggcgccatggatggtgctgccgccgacatccgcgacgtgctactcttcctctatatccagtcttacaagcgcctcgtccacctccgccacagatcatcttatcgtctgaagtatgcctggttctctgttttagtgtttgatttttttttcaacagccgccgttttatgccttctcaagctgatgaagaaattcatcagttgtcctttctgcaaaagcatatggcgaatattcttactctcttggcagattctgttgagggtgagggtgacaattcactggtatgccaccat

SEQ ID NO: 131621 - DNA, 2468 bp, Zea Mays
attctgatatggaatgtgaggggactcaacgatcgtgctaagagagactctattaaatccttggttcttgacacaatgccttctattgtttgtttgcaagaaaccaagttgtcatccatctctgatttcgatattcttacaattcttgggtcgccatatggtaattttgtttttaaccctgcccttggaaccagggggtattattgtagcatggcgcgatagatccctttccactggtgtttctgtcatcaaggagtttcgtgtttgttcaatttcagttgatgtccggtcaactttggtggttcacaggcctcatcaggataacctcaaacatacctttcttcaggaactcggtgaggttaggaatgaatgcgtagggccatggatcattgctggggattttaacatgatttatagagcagaagataagaataattccaatgttaattgacctttgatgggagatttcagaaactggatcaattttctggaattaaaagaaatatcgctgattgggaggagattcacgtggtctaaccagagagaagaccctacccttgtcaagctggatcatgtcttctgcactaacaactgggaagaatttttctggattgtatgctctatagtaatgccactgaaacctcttaccactgtcccttgactctcaaactcaaggtggacctaagggggaagcgcagatttcattttgaaagtttttggcttaagcttcccttgttcctagaggaggttgatgcctcttggaatcagccagctcgttgttattgtcctcttgagaaagtgtccatgaagcttaagaggctttccaaaagattgtagtcttgggggcacaaaatggtgggtaatgttgggacccaattgggcttgcctcgtgaggtgttacacagactggagattgctcaggatattaggattctggctgaagaagaggtttggttactaagaaaactgaaacaacattgtcttttcctcacttctttagaaaggacaatcgctcgattaaggtctcggatccattatttgaaggaaggagatacgaatacaagatttttccatatgcatgcttgttttagaaagaagagacattttatttctcatttggaggatgagggcaggactgttactaaccatgatcagatgcaggagttgttggatgggttcttttcagatctattgggggctgaaattcagagacctttcactcttaatttgccaaattgccacagagatccagttgatctaagcgctttagagtctcctttttccgaaagggaggttcaggatacgattgcaagccttcccaatgataaagcacctggccctaatggtttcacagggaggttctacaaatctgcttggcacatcattaagacagacataatggttgcgctggaatctcttcgttttggaaatgctcacagattgggactgctgaactcagcatatcttgtgcttatccccaaaaaagcggatgctttgtcagccagggatttctagcctattagcctaattcacagttttgctaaattggttaccaagttgctggctaataggctcggcccccaccttcagaagttggtggctgctaaccaaagtgcttttgtgaaaggaagatcgattcatgataattacatgatggtgcaacattctattaaatctcttcacaaaaacgagtctcaagtttatttttaaagttggacatctccaaggcttttgactccatttcttgggcttttctcattgaggtgctttctcaccttgcatttggaaatatttggcgaaatttgattttgaatttgttggcttcttcttccactcaagtgctgttaaatgggtctcctggtcttcctattaggcatcggagagggcttcgccagggtgatcccctttcccccatgttatttgttctaatcatggatgacctcagcagtatgtttctgctagccaaagatagggggttgcttcataaccttcaggaagtgaatgttcgaaatagaatttctatttatgccgacgatgtggttatgtttgtcaaacctatagtggaagatctgaactgtgttaagatgatattgaactaccttggtttagcttctggactggtttgtaacatgaacaagaattgcaccatcccaattagatgtagcgagcaagttgtgaagcagggatgcaaccttctcctttgcagctcggcttccttcccttgtacttatttgggtctcccaatatcagatagaaggcttaggaaggcagatattatggactgggttgagaagatagcagatcgactccccaattagaaggctcgactttttaatcttgctggcaggacgacgttggtgcgttttgttctctctgccttcccaatttatctcctcattgccataaatattcccaaatgggtgatcaaatcgattgataagattcgcagagtgttcttatggagaggc

SEQ ID NO: 131622 - DNA, 851 bp, Zea Mays
gtggctaccaatactcgaacagggcctaatgtgtaggcatggcactaggttggatttgggcctaaacaggctttggtgggacatccacatccttgtccgcggcgaaacaaaatttcccacagcgagcgaggttcccctcccgactcggtgatggcggcgccggcggcggacgaggcatggtgccggaagacggtgccacgggtgatggaactggtgtgtcggcgccttccgcagcgggacgcatgcgcgctgcttgctgtcagtccctggtgctaccgtgccctcgttgctaactccaggctctgggaggtacttgatctacgtgagatgaagaatgctggaaaccgacttatttcagcactttcactggcaaggtatcgtcacctcaaagtattaaaccttgaatttgctcaagatattgaggatcgatattttgttcatctaaaagaaatgagtggcatctcactggaaaatttggaattcctgaacctaaatgcatgtcagaagatctctgataaaggaattgaagctgttaccagtctttgtcctaatcttcagcgccttgctatctattggattgtaggactgacagactcaagtattgggcacattacaaagaactgcaagcatctagtgcaccttaacttgagcggttgtaagaatatcaaggataaaggaatgcagttgattgctaataattaccaaggactaaagagattgaacataaccaggtgtgttaagttgacagatgatgggcttaaccaagttcttctgaagtgttcttcacttgaaagcctaaacctttatgccctttcaagttttactgacagtgtttatagggagataggatc

SEQ ID NO: 131623 - DNA, 477 bp, Zea Mays
atggatcttgatccggacgccgaggcggcagagcatgagcttgaggatcacaacgagcgtctagatgagttggccttgtttggaactagcactggcactgacagcaatgcaaatgtggccatagatgttgacgcggcgcccatgactgcctcctcgagccccactgccactggtgatagcactgcccgtgacaaccggcctatgaagaggctagcgacatctagggtttgggatgacttcgaggaagtaactgggatcgacgacaaaggtaagaaggtaaggatctctgctatttgcaaacactgcaaatgtaccttgtctgctagatcttcatctggtactggacacttacttaggcaccaagaacattgtaaagctaaaattgaacatgaccgagcagacatagttcagtcagtccttcaatttaatcctgatgggtctatgcaatgttgggagtattctgctttggttgcatga

SEQ ID NO: 131624 - DNA, 586 bp, Zea Mays
attatatatcattattatatatgaataaaaataacattgaattacagatgtacctccaatttgaaggaaatgaaagtacaagcgtgacgcaagagtgaacaccaaatccgcgtgaacagtacgggggtactgttcacctatttataggcacggggtacaacccatacaaaattacatacatgccctttacatttggtggtaattccatagtaatctatcgaggtctaaatggccctttcatcttcaagtcggttcccctttctgcgaacatgccgaagctttcctgcttcacagcttcggcgctgtgtcaaccttcgtatcttttgagcttctccctctctgatacgagtccgaagatacctgttcacacattgtactctagaaacactgttaaatcatgtttttgaggaccttcggaagccgaaggcccccaacaaacattattaggcaatcctattttcttagtgggaataaataatatttatgcataaaaacatataactctttaattataaatttgaatcacactttacaagcaaagataatcatataattatttatctaaatgtttttgttactaaaaagg

SEQ ID NO: 131625 - DNA, 1179 bp, Zea Mays
atcagagataggagagacgaacaagaaaagacgacatcatatataccgtacgttatagagtaggaaaatagaaatacgaatgatgatcacgggagggcagcgaaaccctgcaaggctgcaggtgtcgtcgtccttcctgcttgcccttgttttcgcatcatcggtgcttgtcggcatcgtggccggcggcagcttctacgaggagtgcgacgcgacttgggagccccagaactgctgggcctacgacgatggcaacaggctctccctcgcgctcgtcagcagttcctcaggttccatgatccggtcgaagcggcagttcgtgtacgggaccgtgtccaccatgatccagcttgtccccggcgactccgccggcaccgtcaccacctactatacgtcgtcgctgggcgacaaccacgacgagatcgacttcgagttcctgggcaacgtgagcgggcagccctacaccatccacaccaacgtgtacgctgccggcgtgggcaacaaggagatgcagttcaagccatggttcgaccccaccgccgactaccacaactacaccatctcctggacaccctgcatgatcgcgtggtacgtcgacggcgtccccatccgcgtgttccgcaactacgcggcgagccacggcgtggcgttcccgacgagccagcccatgtacgcctactccagcatctgggcggcggaggactgggccacgcagggcggccgcgtcaaggccgactggtccaaggcgcccttcgtcgccaactaccacggcatcgacctcggcgtctgcgagtgctacggcgggggcgcctgcgtctccagctgcgccgcggcgttcgccgccagccactgcagcctgagcgacgcgcaggtgggggagatgcgctgggtgcagggcagctacaggatctacgactactgcgtcgaccccaagcgcttggtcaacggccagaggccggtcgagtgcgacctgccgcagtactgaacggatcggagctccgatcaggtccttgttgcgtatgaatgaggaagcaataatcatacgtatttactcaatcaacagtgcaaggggccggccgggaattccaacaagccgacatatacccaccaggttgggtcgagtcacgacgatcaaagaggccgcccgtctcactcgtctattttcatggataatgcaat

SEQ ID NO: 131626 - DNA, 504 bp, Zea Mays
atccctccccctcgcgtccgcatgaacagaaccctgggatttctgcgtggtggtcgcaaggccgtcccaaccaccagccgggattccctcacgctagtggataaaaggggaccaaaccctcccatcatcagctatcgagccggtcgctgccatcacagatttggtgaggggagaagagataatcagggagatctgaagcttgcagggagggaaaagaggtcgccgccgtaggtgaaaccaaagcacgccgccgttcggggtccggcttgttctgggggtcttcactggaccacgtggttggtgtacgtggcctcatcaagcgggattagcaaccggtgaaccaacaatttctcgccgttgccaatgctctatcgcggagccacatcacgccgtggaccactccctggtcgccatctctgcttatgtttgatcttgatgaggacatcacttctatatatacaatgaatggatcgataacacgatcttgtgcacgacagctaaatc

SEQ ID NO: 131627 - DNA, 658 bp, Zea Mays
aatcgatgaaccacgcgtgccacccccctctcccctcaccccgacgggaacaggcggctgcactgccgcagcacacggcggcgatctcgccggagcacagtgctcaggtgccccggatgcattgctgcagagacagcgacccatgggcacgtggatccgtggcgaaaatccaacccagtgagggattccggtcagtccgaggccacattctgcttgatgctgccgtggatagctccgccacaacccaaggatgcttccagatcatgctccgaaggttgggatgcagcacacatacgttggccgcggtggcccgatctcatctctctgcttgcgatggcctttagatcggctcccaaactatgtgcttggcatggctgtggaggaggtgtcagggtaaaacttatatgcgggttaattcgttggcggcgaacaatacccagatcatgcagtgaatttagtttctctggtttgttgcgattccccccgtgtgcgtgatctcgttttgatatggtggagagtggagacagagctgaccaccgggtcccacatgtcagtgtcacaggattgcaggtgttggtggctgtgcgtccgaattttttatattttggcccttcctcggaaaaaaatacacgtttgaatcttagaaaatttgaatgtc

SEQ ID NO: 131628 - DNA, 253 bp, Zea Mays
gttgagtgagcatggtgctcgaagtttccggtccgctcctgaaatcggtcgtaacttgtgctaagtagcatggatatcattttttcatgcacggtttttcaagtttcgagtgacctgcagttcaaatctgaattttccgaagaaattcaaataaacaaactaaatgtactagctataaaaaacactgttataattgtcccaaaatggtacatgtagatctacatagtgtaggaacataccacaaaaattttag

SEQ ID NO: 131629 - DNA, 1349 bp, Zea Mays
agccgcgttgctgggaagtctggaacaaggaagcagccgtccccgtccagccttccgccccgcacgccgcaagccgtgctcctgccttcctacccgtcgcgcgcatcgccgattcaccggtgcccgtcgctcgcagacctctccctcgcccctcgcccagcttgtcggaggccgaaattgatttgctctgtccagctctgggctctgctgctttggcctccaagcgcgccatgtgtttctatcgacaataaaattcacaagtaagacaattcattttacatcagagttaatttagtacggcactcaaagatagaacgttgtaatgcaaaattttgccattactacctctagcaagtgcacttcgaattactggataattggagctgtgtgcagtgtgcttgcccctagcagcttgccggagcttgcaactgttctgctctaaaccagtgaaacgtgaagactgaacctgcttctgcttggctgcttgctccaattcaagaatcctctcttctcggcttacttcatttactcttgcttgttctattccttgttaactgactgctgtaatacagatcaattacattgaattttaccatggcagctgaggaagatgtcaagcagaggcagatcattgaaaatcgtgccagaaatataagccacaatgttaggtgcactgagtgtggtagccaatcgattgaagattcacaggctgatgttgctattctccttaggaagctcattcgtgatgaaataaaagcaggaaagagtgataaagagatctacaagaaactagaggatgattatggggagacagtactatatgcccctaaatttgatcttcagactgctgggatttggctttcgcctgtcattgttggtggtatagcagctggaatctgggcttaccaaaggcataggcaaaggacaaatgttcacattatggctctgaacctggtccgaggggtaccactgactccaagggagaaggagaccatgctagacatccttacacctccaccggctccaaggaaatggtggtggccaggcaaatgatgtagaattcatgtgctggacctggtagatgctcacaaatggttaggatgcaaattacagtttggatgcatgatactttgatcgtgactttcagtttaaccaaaagcctgttcatttggctataattcatacaggcttctactagctcaatagtgttttgtctctatggattgtagctgcagcagctcaaacagttggctttaatccgaagcgaacaactagaagtcaaaactttgtaatgtgtactctatcatcgaactagttgtatgtcacacccgattttggaaggcaaaccg

SEQ ID NO: 131630 - DNA, 1094 bp, Zea Mays
agccgcgttgctgggaagtctggaacaaggaagcagccgtccccgtccagccttccgccccgcacgccgcaagccgtgctcctgccttcctacccgtcgcgcgcatcgccgattcaccggtgcccgtcgctcgcagacctctccctcgcccctcgcccagcttgtcggaggccgaaattgatttgctctgtccagctctgggctctgctgctttggcctccaagcgcgccatgtgtttctatcgacaataaaattcacaacttgccggagcttgcaactgttctgctctaaaccagtgaaacgtgaagactgaacctgcttctgcttggctgcttgctccaattcaagaatcctctcttctcggcttacttcatttactcttgcttatcaattacattgaattttaccatggcagctgaggaagatgtcaagcagaggcagatcattgaaaatcgtgccagaaatataagccacaatgttaggtgcactgagtgtggtagccaatcgattgaagattcacaggctgatgttgctattctccttaggaagctcattcgtgatgaaataaaagcaggaaagagtgataaagagatctacaagaaactagaggatgattatggggagacagtactatatgcccctaaatttgatcttcagactgctgggatttggctttcgcctgtcattgttggtggtatagcagctggaatctgggcttaccaaaggcataggcaaaggacaaatgttcacattatggctctgaacctggtccgaggggtaccactgactccaagggagaaggagaccatgctagacatccttacacctccaccggctccaaggaaatggtggtggccaggcaaatgatgtagaattcatgtgctggacctggtagatgctcacaaatggttaggatgcaaattacagtttggatgcatgatactttgatcgtgactttcagtttaaccaaaagcctgttcatttggctataattcatacaggcttctactagctcaatagtgttttgtctctatggattgtagctgcagcagctcaaacagttggctttaatccgaagcgaacaactagaagtc

SEQ ID NO: 131631 - DNA, 1078 bp, Zea Mays
agccgcgttgctgggaagtctggaacaaggaagcagccgtccccgtccagccttccgccccgcacgccgcaagccgtgctcctgccttcctacccgtcgcgcgcatcgccgattcaccggtgcccgtcgctcgcagacctctccctcgcccctcgcccagcttgtcggaggccgaaattgatttgctctgtccagctctgggctctgctgctttggcctccaagcgcgccatgtgtttctatcgacaataaaattcacaatgtgcttgcccctagcagcttgccggagcttgcaactgttctgctctaaaccagtgaaacgtgaagactgaacctgcttctgcttggctgcttgctccaattcaagaatcctctcttctcggcttacttcatttactcttgcttctgaggaagatgtcaagcagaggcagatcattgaaaatcgtgccagaaatataagccacaatgttaggtgcactgagtgtggtagccaatcgattgaagattcacaggctgatgttgctattctccttaggaagctcattcgtgatgaaataaaagcaggaaagagtgataaagagatctacaagaaactagaggatgattatggggagacagtactatatgcccctaaatttgatcttcagactgctgggatttggctttcgcctgtcattgttggtggtatagcagctggaatctgggcttaccaaaggcataggcaaaggacaaatgttcacattatggctctgaacctggtccgaggggtaccactgactccaagggagaaggagaccatgctagacatccttacacctccaccggctccaaggaaatggtggtggccaggcaaatgatgtagaattcatgtgctggacctggtagatgctcacaaatggttaggatgcaaattacagtttggatgcatgatactttgatcgtgactttcagtttaaccaaaagcctgttcatttggctataattcatacaggcttctactagctcaatagtgttttgtctctatggattgtagctgcagcagctcaaacagttggctttaatccgaagcgaacaactag

SEQ ID NO: 131632 - DNA, 472 bp, Zea Mays
acttgtgttggctggttatagcttgtgatttcacatttcatttgttagcggccaagatgtatttttgttagtttatgactaccactcaagaaagttgattgattctccattccaatctttgttagacctgcaagttgtttgctaacagtgatccttcagagaaagggggacatgggaacaaacagaacgagaatgactaaagaaacaatggttgcttgaggaggaatcgatcgaaaatgaaccacctccagagttccagttacttactcttaccgggatgggactggacaccaatggagaattcctatggctatgcaacaacagcttgtccatgaaattcgtgaagtatggacaacttcagttgagaatctactatatatgaaggaagaccttatcatccctcatggatgtgttcattctcttgtaatctatgaagttctgttaaagttagtcgaaccattttctgattcta

SEQ ID NO: 131633 - DNA, 1596 bp, Zea Mays
atgggccaaaaaacatacctcgggtatatctcaggcgagatttggacacggggaatcgaccggtttccatccctaattaagggtagcttctcggaagtggcggcggcggatgtggaggagggggcactggctggggaaagctcagacgacgagtggagcttcgggggcctgatgagtacgttcgcgtcgcggtcggagtcggtcctgggaggctaccgccgcgatctcgaggacctcggctcggggctctgcctcgagacggtcgcgctctgggccgccgccgcccgcgctgcctcagcgctacatgacacactggaggtcggcgcgtctgtcgtctctaacaggcttgagtccgtcggccaggtcgttgacgacctccgtgccaccaccgctgggctcctctcgcatgccaacaaggccctccggtccgctgaagctgacggtgttgatgtgcgtcctagcgcttccttgtcgaccaagaagtataccaggttcgaggcccaggtcttggcgttgcgtgcggaccctgccacgttcaccagggagcctgaagattctgagggctttggtaaatggagtgccttgttctcaattgacgagatgaaggaacagatagagacggtgctccatgaaagccctggattggagagctttgtggaggggcttgtgccgtcagtcaacccggtcatgcctgcaagtgttggtgcatcaactcaatactgtgctacctttttttgcttatcggaccaggtatctacagtgaagtctaccatccttgaggttggaaacatcgagctatttgaactgaatgaggtcctcgcctctcagtttgtctactactgcagtaagttgggttggatcattccaaagaatccagccttacctcttagtggcacaagcgacatcgtccgtcagaatctattgggatctgttttttcacttgcaaatgatcttcctgaaggaggtattatattcctatacgagtgggggcatgagatcaatgttccctcggatcaatcacaaacaagattgtctggatacacttcagttccatatacaagcttccctgcccaggcagagctaactgttgtaggttgcagcaaaggattggatgcaaaagggcgctggacacgtgctcgtgtggcccaacttacgtccaatctgtctctaagatacaccactgtcacgtttttagcatcatttgaatttggagaagaaaattccaatgtgtttgcagatttgaaagatgacaatggatctgatagtggcattaattttgattataatgatccagacatgccaaacaacatagatgttgatctagacgttccaacatatcctgatgagttatctggaatttgggtaatgattcacttccatttttcctatgctcagattattgttgcaactcccaaaagtactcatggcacacatgatggcatagatacacatgaaagcctcgatgatgacttgtgttggttacatcaggtgagtttttgtaatggttctataatccatttgcacctatggggctatagcccatttgcatctatcttgtactcttgtgtggctacaaacatcttggtggccatgtaa

SEQ ID NO: 131634 - DNA, 573 bp, Zea Mays
catctaatatacaacaaagtttaacttaaatatcatctaatatccaagaaagttaatctagtcatcatcacatcacataagatcatctcaattcacacgtagaaatatgcactagatgcacaaataaaaacccacaaccatgtatcatgttgaactttgacactagaaagtattatgagtttaactccttttttacaagcttcatgtggactgtcgttccattttccttctccatgtgagcttcatatgttgcttccacttagcactctgcaagtaccaagtaacagccatgtatcaacattttacaactagaaaatatgcattggatgcacagataaaaacccacagccatgcactgtatgcacaaatatacactgtatgcacaaagatcataaggttatgttccaagtatcctacaaactactttactattcaaggatgcagttatgtaaattggttgtctaatgattttgacacttatgtcaggagcttcaaagtttccaaagtcatgagtgaaaactaaaaaacaataatacaacatggacgaagaattgcatggcgatgatgaactct

SEQ ID NO: 131635 - DNA, 101 bp, Zea Mays
tgcgaaagacccatttggttccaatcacgctgtaatacccaacttttataaagaagtggagttaatgttcctatatgaatgtgcttgcatttgtgatcaca

SEQ ID NO: 131636 - DNA, 699 bp, Zea Mays
cgagatatgcctggtggacagcctgtgacattaacagatcaagacatattggagatgattttcttcccagttgtgaatgaggcatgtagggttatggatgaaaatgttgtgattcgggcttctgatcttgatattgcatctgtccttggaatgggttttcccaagtacaggggtggcctcgttttctgggctgacactgttggggcaccttatatacattcaaagctaagcaagtgggctgaaacttatggtcccttcttcagaccttcgtcatatctggaacaaagagctaaaagctgccttccactgagtgcaccaagctcatctcagcaagcttcgttgaggtcacacatgtgatgtgctatttcagcggttaccagggtgatggctcgatgcttgtgtactcgaaagttggttggcattggtacaggaaaatgccatatttttctcttgttctgataattgggcccgccatgacaatctgggagaataaatggctagcatccttttgcagttttgctggtataattttgatttttaatttgtatttaatctgctttaaattataagaccttttaatttttttttctagatacatcatttttattttatctcaaaaagtgaaagggctctaactaaattggttagatgatatgagtaccactctttagatggtctataagggacaaattctcattg

SEQ ID NO: 131637 - DNA, 785 bp, Zea Mays
cgctcccgagctgagtggtcgttccgtagaagctttcgtgtacccttcccatccccgccgttctctctctcttttcccactctcccacacttcctccattgttccctttttctctcgcggagtagcggtgatccagacaccgagtgtcctacgcgtcacggaccgtgcacatggcggcggggtcgatccgggtcaccatggaggtgggcgccgacggcgtcgcgctcataaccatcgccaacccgcccgtcaacgcgctccaccccatcatcatcgccgggctcaaggacaagtacgcggaggccatgcgccgtgacgacgtcaaggccatcgtgctcaccggtgctggaggcaagttctgtggaggatttgatatcaacgttttcacaaaggttcaccagactggggatgtatcacttatgccggacgtatctgttgagcttgtgtcaaatatgatggaagagggaaaaaaaccttctgttgcagccattcaaggtcttgcattgggtggtggcctagagttgactatgggttgtcatgctcggatatctactcctgaagctcaacttggattgccagagctaacccttggcatcatccctggatttggaggtactcagcgtttgccgaggcttgtaggtctacccaaagcgattgaaatgatgctgtatcctgtttacttttctgtgtgttgcctcaccagcacacacccacacgctttatatctgcattatgcacaaaagtccattacaaatgttctaattctaacaacactccccctcaag

SEQ ID NO: 131638 - DNA, 1031 bp, Zea Mays
cgctcccgagctgagtggtcgttccgtagaagctttcgtgtacccttcccatccccgccgttctctctctcttttcccactctcccacacttcctccattgttccctttttctctcgcggagtagcggtgatccagacaccgagtgtcctacgcgtcacggaccgtgcacatggcggcggggtcgatccgggtcaccatggaggtgggcgccgacggcgtcgcgctcataaccatcgccaacccgcccgtcaacgcgctccaccccatcatcatcgccgggctcaaggacaagtacgcggaggccatgcgccgtgacgacgtcaaggccatcgtgctcaccggcagagatggaactcaagtggtggaagcaagaaaacagggccgatacttcgacataacactagtaaactgaaagtaccctgacacgtttttaagttattcgacataacacacattttcacctttttttctcttgtttaattggtaactaatgtggtcgtgctgccaaatccgtacactatactggtatatgaaagagctgttctgtttctgattcttttcattgtcctggattctgaattgcctaggtgctggaggcaagttctgtggaggatttgatatcaacgttttcacaaaggttcaccagactggggatgtatcacttatgccggacgtatctgttgagcttgtgtcaaatatgatggaagagggaaaaaaaccttctgttgcagccattcaaggtcttgcattgggtggtggcctagagttgactatgggttgtcatgctcggatatctactcctgaagctcaacttggattgccagagctaacccttggcatcatccctggatttggaggtactcagcgtttgccgaggcttgtaggtctacccaaagcgattgaaatgatgctgtatcctgtttacttttctgtgtgttgcctcaccagcacacacccacacgctttatatctgcattatgcacaaaagtccattacaaatgttctaattctaacaacactccccctcaag

SEQ ID NO: 131639 - DNA, 108 bp, Zea Mays
gagaattaagatttttagcgataaaccaggggtcgatatactctattttccaaatcacgaaacggagaatccgaggtttacgattctgactaaatttcgtttagatag

SEQ ID NO: 131640 - DNA, 321 bp, Zea Mays
atggcgacatgggcgagcgcaggaaggaactcgcggggaagggacctcggcacgaaagccatggccgggcagagagggagcactggtggccatgggcaggggcacgcgacgatgggaacagacgcggttgggctaaatccgagctggagctcgcggcacaggagcaaggagcgggcctgggcgaaatccaagggcgaggtccgagcaggggccagaaccaggggcgcggcgagcaggctgaggctctgcgcaggggaggaagagaagcaggcgccgagcagggagctccggcgagctagagcagagggcgcgcgcaggtaa

SEQ ID NO: 131641 - DNA, 1472 bp, Zea Mays
gccagccgtctccttatccctgcgacgccgctcacctgggctcatcttccagccgccctctctgcccaacagcagagcacaacatcctctccactcggatccccaagccctcgcctccagctcttgccacggcatacatcccttgctcgtacctccacccggccacgtcctcgccggtggccagcgccgatgcatcgcccttcctagcgtcgaccttggcaccgcttccccgagcgccccagtcgagctcgcccctcccctcaaccatggacacgacgatctgcagcccttcttggtggccgagcccatattcctactcgcgccccctctttttccacctctacgtgtatcagctcgcccagccccaactcctctgtctttttcctgctcgcccatggcgccggctccctgctcggctcctctgctgaccgtgcgctgctccctgttgttctggttgccgtgcgcgcgaaactgctctggtcgactgtgtctgtaccccaggcccagatcgacatggcctcatgctcggcctactccagattcgtagcttgtcgctctgtatgctcgaccttgccttgtcgccgaaccccaacgccgtcgaccttcagctccgtgccttgtccctggctgcgcgcgtgtgcttcactatttggttatcatcgcgcaagctcctctgttgggctcgccagccgccattgtcctacccgcgccagcacgcgaccgtggtcgtgttcgtcgaattcgccaacgctctgttgccgattcgactatcgtcgttgttgtgtgcctcgctgcgtgctcgctgggtgtcatctgttgtatccagcacttgtgcttgccgctggctagcgttaacgctcgcgcctgctcgttgtcactgctcgttgttaccctagctattgaacccgtcctccctggctcgtgacttcgtcgtcgcctgagctcgcgctaacctgctcgaccccacctcaccagctcgctccaaattcgatcttgccatcgttccgaacatcatcaagaaaacccaagagtcgggtgaagacgaagctagcagcgtgatattcaccaagtgctcgacaaaagctccattctatactcgtcagctgttcgatagaggacttcaactaaaggtcgtcgtcgttcaggcaactaccagattgaattgagatgtggtgagccaattcactatttttattattgattttatgatcgggaaataagacgcttagtttgcgtatgaagtttaagttagaataccagtgatgcgaggtgtgcttcggtgtatttagttatcaagtatattcgaactagttctattttgcagagtgtagtatttcggtgacgcgtaggttaagtttagtattttaagcaagtatcgataagtctgtcgatgctaattgtgttcagtgagtgtaagttgaagtcaataatttgcgttaggagtcttataatagtaagcctaagttcattaa

SEQ ID NO: 131642 - DNA, 735 bp, Zea Mays
atggcgtcctccatagagacgaaccaaaaaaaaatctgtttctctggaaggatcactaattcatgccgcctggatgacaatgttgccagtattgattacaagttagggtataagcaaatacattatcctgaaaatgttgacatgaggttgtcagtcaatatttctcctgagacagcaggtgataatggttgtcatttgaatgttccttctttgaatatggcaaatggcaacctgtttactcaagatttgttgaatcaacacaactctggactaaatcagagacccaaaacttccaagtgtagtagatttagaagtcattctgctccaccattttacagagggagactgaaattctctagattaaatgtgccactgagcaaaccaagcacatatagtgataaagatatctgcatcaataacccagaaggcgccaaaatcgaacagaaagaaagtgagaggagacgaaatcaacgggaaaaaagggatcaagaacacgggaagacttgagatctgaggagagctaacctcgtgaataaaacaggcataaaaaatcgaatctcgcagcgcgaacacgaccgatctccctaaatctgcgaagaaagaaccaaatctctctcagctccgtgataggtcgaccgataacacgaatccgagccagccaagcaagacgccaaaataagtaaagggagctcaccttaaacaaatccatggcagatcacgtgcaccaaatctatg

SEQ ID NO: 131643 - DNA, 3529 bp, Zea Mays
gcgatgatggcggtgaccaacctgtggggctgccttcgtataaggacgtgcttctctcctccacaccgttggtctctcaccccgttgccggcgatggctgggtgacggtcgttagtcggcgtgctcgctggcgccgtccccgcccttcgaagcctccacccagacctatccctgtcgacgtgcgtgggaagtgcttcaactgtttctccccctcccatcgcgcggcggtgtgtcgtcgtccggtgaggtgcttctcctacgggctgccggggcaccgtgctcacgtgtgcccgcgccggcggacgacacctcccaagcctctgcgggccaaggtgtggaggcctgtctcccacgccttgccttccatgggagcctcggaatgcattgctgacggccacgagggtggcaacgtcgcatgttctggaggtggcaatggtgcgggctctggcggcggcgaacacaggcgcactcgacgggggcatagacggcgaagacccaattgtgcggctggtgctgatggccacggtgtccctcccggtgtgctaccccaacccccaccggaggctgtccgtgccatttctatgtccccttccccgcctcggcgcttcatcaaacgttctaggaggattggccaagctaaagatgatcttcggcgtgctcttattatctccattgtgggcatggggcgttctggctgcgccgcgaaagtctctgatgcactcacttcgagatttgatcttaaggatgatgtgctcgaccttcgccgggttgcaccgaacaccttcgtcgccttgcttcccaacgtggagatggctgatcggatgctcagtgggggtcagtcattctacgttcctcctcttcggatgcacatcaagaggtggtcccgtcaattcatggcttccgatggagggactctgcctcatcggctggatattgagcgtcgcggccttccgtttcatctttggggtttgcatacagctgagcaacttctcgtcgaacattgccttgttcatgagctgcaccttgattctattggcggttctgatatgtctgcgttcaaactgagtgtttggtgtcataatcctggtgatctgctttcgttattggatctccacgtgaaggagcctccggttcagatgggcgacgaaccatctccctcgcgcacagtggtttacccagtttcaatccttgtttcccgccctgggagttcgccagagtcttcatcagaccgtgcacctgttcacacttgtctggggtcgcacgtccatttaagctcagcggctagcagaccagttaatgacccagttctcccagctgatgcggttaatgctctggtggcgcctgcaaacccctcggtttcttccttaatggcagtggatgcctcgtttccgacgctggtaggaccagttgatgcgccagctctccctgatgcttcggttgtagagctggcggcgcctggctatacctcgtttcctgcggtggtggggccagctgctgcgccaactctccttgatgcttcaggtgcagagccggccgcgcctggccctattctcttctctgatgatgccgcggattatccccttgaagactgctcgactctattgaactgctccctcacggagtcccagagatcagcttctgcacctgttcacactcgcctggggccgcacgtccatttaagctcggcggctggcagaccagttaatgacccagttctccctgctgatgcggtcaatgttctggtggcgcctgcaaacttctcggtttctaccttaatgcaatggatgcctcgtttccgacgttgtcctagagatcatcctctgcagcgtcattggttcggcctgatttcattcctggtccctctcgcccttggtattgcaagccctttgatggtttattcaagaagggatcggagaccgcaacatcatcttgattccttggcagaagctcagtctatccctactagtggcaatgacaatgtctgtgatgctgaaccttccatgtcttctgaattgcattcccctggcaggcttagatcttccttcagtgacatggttatgaaagcagttgttcacattttacaagctcctcaggtcgtcagaccggggaacccagactcttcagctgcacctccttgccgtagtaggcgcattgctgggattggagttgaattccagtctaccttcagtgacggtaagatcaaatttaagaagataatgagagcactgcatgtgattgatgaaagcgatggcatcagtcaggaggccttggatagatatagcaggctttttgatcagccccttcctctgtctcatgtccaggcccttgctgccctttttggatggacaccccctggcttggatgtgtgttgaggggctgatcatgcctctatctttgttggacggggttttcttctatttgttattatgaatcattcaaaatttgtgtgttggaacgtgcgaggtttaaactctagagcttgtcaggactctgttcataatttgataaactcctttaatgctaatgtggtttgtatccaagaaaccaagatggctgagatctctatgcatactaccctatccgcacttgggagtaattttgtgcacaagttgtttcttccctcggttggaactagtggtgggattctcgtggcccggaggaatgaaattggtccagccagcgcaactcgggtggatcaccatagcgtgacaattcggttcagtccaagagatcatcttccttggtggttgacttgcgtgtatgggcctcaaggcgacagtaacagaattcagtttatgcaagagcttcgggatgtgagatctgcttgtcctggaccttggattctaatgggtgattttaacctcatctacagagatgaagacaagagctctggcaattttaataggcagcttatggagagattcagaaggttcattaatgatctgggtttaaaagaattggctctgcatggtcagaaattcacttggtctaatcgccaagatacgcccactctcgtcaaacttgacataatgttttgctcatcagattgggagcagctttttcccaatagtcttctgcaaagtgctagcacagacggttcggatcattgtcctatgcttcttgggctccaagttttgacgcctggccgcatcagattccattttgaatctcattggacaaaattgcctgattttattgcggcaatggaggctgcttggaattctgttccttcctccccttgtccttttgaaaccctctccaagaagtttagagccaccgtcaagcgtctccaaagctggtctcaaaaaagggtgggtcatatttcctctcagctagggatggcgcgggaaattatgcataagctgcaatctgctcaagataacagacccttgtctatgttagaaaattggttgttgaagcaactcgatggtcacattgtggccctttcaaccttgcagtgttctatggctcgaagcagctctaggatcacctgttggctgagggggatgctaacactgtcttcttccac

SEQ ID NO: 131644 - DNA, 2495 bp, Zea Mays
ctcggccgtcgtgcgcgacatgctctctccatcccgtcccgcccaccgctgctcccttgcctgagctgccgcccgccgccgtcgccgtgggaccgatcggtagtaatcggtccagagcgcggtgcagcgagcgggagcgagggaggcgtcgtcggccgtccttcgtgccccgcgttcgttcttggaattggtccgcgcgcgtcctcatcagctgcgggagtcagggtggcgcctcgtgaggcggcgcggcggtgcaagaccgccgagtgccgcgcgcccaggccttgcgcgccaagctcgaggcggcgggctgggtgatggtgcgcttcctccggcgcggacacagccttcacaagaccggatcgcacaacagcaaccagcagcagcagctgctgcgagagcgctacctcgacaggagcggcagcgacacgggcgagatgtatagcaatggcgccggcggcaccccgccccttgccaacagccaggcggcagcggccggggcggcgcggttgcgccagggccgcgacgggccgctctcagagctggacgtgatgaaggagaagttcgccaagctcctgctgggcgaggacatgtccggcaccggcaagggcgtgccgtccgcgctcgcgctgtccaacgccgtcaccaacctcgcggcgtccgtctttggcgagcaccgcaagctggagcccatggcgcccgacaccaaggagcgctggaagagggaggtgggatggctgctctccgtcaccgaccacatcgtcgagttcgtgcccacgcgccacacctcggagaacggaatcacgatggagatcatgtccacggcgcagcggcgcgacctcgccatgaacatccccgcgctgcggaagctcgacgccatgctcctcggctacatggacaacttcgcggaccagaccgagttctggtacgagaagggcggggacaacaagcgcgacgacgacaagtggtggatgccgacggtgaaggtgccgtcggaggggctgtcggacgtgacccgcaagtggctgcagtaccagaaggagtgcgtgaaccaggtgctcaaggcggccatggccatcaacgcccaggtgcttgtggagatggagatcccggaggtgtacattgagtcgctgccaaagaaagggaagacgagcctaggcgacgccatctaccgtagcatcaccgaggacacgttcgacccggtggagttcttggccgggatggacctttcgacggagcacaaggtgctggacctcaagaaccgcatcgaggcctccaccgtgatctggaagcgcaagatgcagaccaacaaggactccaagtcctcgtggagctccatcgtcagcttcgagaagcgcgagcagttcgaggagcgcgccgagaccatcctccacctcctcaagctccagttcccggggacgccgcagtcgcagctcgacatctccaagatccagtacaacagggacgtcgggtacgccctcctggagagctactcgcgcgtgctggagagcctggcgtacagcgtcatgtcccgcatcgaggacgtgctgagcgcggacgcggcggcacagaacctgacggcgaccgaggcggcgcggcgggtgctggagtcggcggacctgctcgcgccgcggaagctggacgccaaggaggagctggagaagctgaacgaggccccggcgtcgatgacgctcttcgacttcatgggctggcacttcgaccaggacgagctgatgaagcgcagggaggacggcacgctggacgccgacggcgaggccatgctcctcaagaaggcgcccagcgtggcgcccaagaagttctcctacgtcgacagcctctcctccggcggcatgaggagcccctctgcgcgccactgataataatatatgatcgtcgtcgcgccactgaactaacagcagctcagtcatcgtctacgatccaacagcaccatggatcgtcgatcgtccactcacgagaaggagagacgtcaatgggagaggagacgacggctcctcccatccgatccgacccaatcgatccttgcttacgtcgtgtacatagctgaggcgcatgaagcacgtgcgcacccattagtgatccatgttctctcctctcttactggtttctttcttgtccttgcctctacgttctagaagattctagatgaggggaagaagagggccaggtgatctcatccacgcactacgcactcaagagttgccgctgtgcgtagctactgcttaatatttctagtaagtagtttggacatggctctctcaagtctcaagagcggttctggggtatatgtatcgaactcgcaagtcaggaaaaaacaacatgtatattctttgtttcgtttcaagataatcattttttcctagactcaggttttctagtttcgtggataatacatatgtcctcacataccacgccaacaacaatattttcacctgtacttctcacgatcattgcagagaatgaaacgccacgacacc

SEQ ID NO: 131645 - DNA, 270 bp, Zea Mays
atggccccggcaagggtgggcaagctcgacaccagcatcacgagcgagctcagccccagcggcggcgcaggtggccatggcggtggcgtgggcagccctgacggcagcgctagcggccccaacggttacacaggcagccccaatgagggaagccacatggcgcgggcggagcctagtgtgagctcggccatggtgcatttgaactgcattgaaggaagaagcagcagcagagagaggatggcagatgaacgccacctaacagatgtctaa

SEQ ID NO: 131646 - DNA, 1720 bp, Zea Mays
gatttaatcggtcaaaactgatagtattaacttagataaatctaatatgactaaattacgtgaacgtaagacggaaggagtaggaaaaaaaaacgttggtggctttttgtgccgcatcgtacaaacacagaagtaggacaagcagttggggagccgtcgtccgggactccgggctcgcctaaaaagccaccaattgatgagagttgaccaccgttcgtttccactccgcccgccttctcagaatccgatggcccaccttccctcctctccggcggccgctgtacccaccggccaccgcgtctcgccctcgcctcattcttgccgttccctcccgcagctgaagaccgtactgttgtcgataggagccgccgcgggtccccctaggcggtcatggaggggaatggaatcggtggccgcggctcccacgggctcggataacgccgcagcgaccggaacaattgcccatgcaaatgaagttcctgtcttgtctttctctgaggttgccgaaaggctcgatacattccatgcgtctggagctaggaatcaaaattacatggccatgtactctagcatttttggtggaattacaacaaacccttctgcaatggtgataccaatcgatgatcacatggttcatagaggtcatggggtttttgatactgcagctattatggatggtcacctctatgagttagaacaacaccttgaccgcttcctgaagtctgcatcgatggccaaaataccattacctttcaatcgctcaacaattagaagcatacttattcagactgtgagtgcatcaaattgcacccaaggatcactcagatactggttgtctgctggacctggagacttccagttatcttcatctggctgtacaaacccagccctctatgctgttgttattgaaagcccatccttacaagtaccgtcctgctgcagagtggtcacatcatctataccgataaagtctcctcaatttgcagtcatgaaaagcgtgaattacttgcccaatgcactcaccaaggtggaaggagaagagaatggtgcatttactggcatttggctagacgatgagggcttcgttgcagagggttcgaacatgaatgttggcttcgtgacaaagaacaaggagcttctcatgcctcgttttgacaagatcctgagtgggtgcacagcaagacgggttctgaccctcgctgagcatctagtagctcatggaaagctcagcagggtaatatcaaggaatgtgagtgttgaggaagggaagatggccgatgagatgatgctcatcggtagtggcattcttgtcaaacctgttgttcagtgggatgataagataattggttctggacaagaaggcccgatagctcaagcgctttatgaccttattctcgaggacatgagatctggtccgccgtctgttcgtatccccatcccttactaaaactgtttggagttgtgcaaatgattacaagggtgaacactgatttgttggttgtcagagtttggtcaaaacgagaggttggacgaactcatagaagagaacaagtcggcaacagccgaaattgtcaaagagattgatatcttaatttgatgtacaataggacttaagggcctacaaacatttgtgaaaatatttgtaatatataactcgggaatatgttgcaatgatgtttaccgtttgttggttttgcatgcactgactatatgcccctcc

SEQ ID NO: 131647 - DNA, 1098 bp, Zea Mays
gatttaatcggtcaaaactgatagtattaacttagataaatctaatatgactaaattacgtgaacgtaagacggaaggagtaggaaaaaaaaacgttggtggctttttgtgccgcatcgtacaaacacagaagtaggacaagcagttggggagccgtcgtccgggactccgggctcgcctaaaaagccaccaattgatgagagttgaccaccgttcgtttccactccgcccgccttctcagaatccgatggcccaccttccctcctctccggcggccgctgtacccaccggccaccgcgtctcgccctcgcctcattcttgccgttccctcccgcagctgaagaccgtactgttgtcgataggagccgccgcgggtccccctaggcggtcatggaggggaatggaatcggtggccgcggctcccacgggctcggataacgccgcagcgaccggaacaattgcccatgcaaatgaagttcctgtcttgtctttctctgaggtgtacctttttgtcttttctacctatggcggcacatgtttagtttacatcgttgataacatttataagacagtggtttgatgctctttctcttctgagagatggcatcattgctcctaattatgctctcttgattaattaattgaatgatcggtacacaattgtacatcaaaaccatgttactttcatgtgtagtttttagaactgttgttatggatagtaatggaaaaaaactaactctgcatgactgcagcaaaacactgtaaatgtatgaatgaattcctttgaaacaactcttatctgttgttatgtcatgtacgggcgcaagtataggcgccgtcgtgacatcaaacgcgcagctgagcgcgctgctcacgctacacaggatggcgccaccattagtggctgagatttcaaaattcaaacagcagattagtttccatttcccccaaatcaatagtttctttgctatgcctaaattataggagcagattagtttcccttttcctcaaatcaatagtttcctttctattagtttccctttttacccaaatcaatagtttcccttctatgcctaaaatataggagccattagtggg

SEQ ID NO: 131648 - DNA, 723 bp, Zea Mays
ccacaaatatgtcacgtctgcaaattttaccggagatgaataaagcatatgcatattacagtttatggttgtggcaacgaaccaaacactaaacgaaattcataaagaactagccccaatacaaaaaccatgaccaagttcaccatgtgtgtcctgcaacagaactcatggtagtaagagcatcttctcgtcgccagtcggcgctgctccttctcgttgccgtgctggtgctcttcgcgtccaccgccatggtgcagcagcagagaattgctcgtccgccatgttctccgccagggcgattgttccagcggtgcactaacctccccgtgcgcggcgccagcctgtactggacgaaccacgcggcgaacgcgttccgggcgccgcaggccaccagcggctgggtcgcggggggcgtcaacaccgagctcgccagcacaatggccggcaggagcctgttcatcgcctcgcactcccagggcggcaacagcgcggtgcccgtcctgatgacctacctggagagcacggcgacaacaccctcagggtcgccgtgcccactgggccggccgcggagtactcgggcggcgcgtacaccatctacgcgacggtggcgctgccggggaacagcacggtgcagaacactgtgtggcatccgggccgctctgtggcggggaaatcgcgacgcgcagctcggggcacggccgcgcagatcctgcggaaaatctc

SEQ ID NO: 131649 - DNA, 1544 bp, Zea Mays
gccgcgccgcgccgcgccggtagttccacctgaaaaggagacatgaagcagtccgtcgttctttaccccagcgccggcaccggccacgtcgtgccgatggcggagctcgccaaggtcttcatcaaccacggcttcgacgtcaccatggtggttgtccctgagttctccagccaattcaagcgggtcgccgcggccaatccgtccatctctttccacgtcctcccgccggtctccccgccgcctgccgacgtcgctggctccggcaagcacccgttactctccatgctgaagacgctgcgacggtacaacgaggagctcgagaggttcctctgctccgtgacctcgcggcagcacctgcactcgctggtcatcgacatgttctgcgtcgacgcgatcggcgtcgccgcgaggctgggcgtccccgcgtacacgtttgccccgtccagcgcttcagccctggccgttttgacccaggtccccacgctcctggcgagtagccagaggggtttgaaggagctcggggacacgcccctcgagttcctcggcgttccccccgtgccggcatcgcacctgaacgcagagctgctggagcggccggaggaagagctgtgcagtaccgtggcgagcgtcttcaggcgcggcatggacaccaggggagttctggtgaacactttccaggcactggaaacccgggcgttgcaggcgctcggtgatccccggtgtgtcccgggcaaggcggcgctgcctccgatctactgcgttgggcctttagttggcaacagcgcacgggatcctcctgcaagagctggtgagaggcatgatgagtgcctcagatggctggacgcccagccggagcgcagcgttgtgttcctctgctttgggagcatgggtgcgttctcgcaggagcagcttaaggagattgccactgggctggacaagtccgggcaccggttcctgtgggtcgtgcgcaggccggcaagtagtatcttcgaccccaagaggttcttggggcgccaacctaagttggacctcgacgctgtcctcccagagggattcttggagcggacaaggggccgaggtctcgtggtcaggtcgtgggcgccccaaggagaggttctccagcaccctgcgacgagttcatttgtgacccactgcgggtggaactcggtgctggagggcgtcatggctggggtcccgatgttgtgttggccgttgtacgcggagcagaggatgaacaaggtgttcatgaccggggatatgggtgtcgcggtggagatggaggggtaccaaacagggtttgtaaaggctgaggccatagaggcgaagatcaggctggtgatggagtctgaggaggggagggagctcagggtccgagtggcggctcgcacgaaagaagccacggcagcgatggaggccggtggctcgtcgcgtgtggcttttgcccaattcttggcggatgtgaggagcactcgacacaacgtttgcaagttatgagattttcgcatcttttctgactttgtaaggcaatatccatcagcttacct

SEQ ID NO: 131650 - DNA, 1044 bp, Zea Mays
ggagggggtagttacaaggaccaatatgttctaaatattagacttgccagtgtcttttttttggttgatgccataggcctcatggtgcaagacatggagctcttagtatacagcccgctttttctttgactctaacttctgggtggtttatttgtaaatgtaatccagtaactagtcacaagagcagaaggttcttctaatttttctatgtttcctttctgcggtttagtaccgactgcacctatatgttgtgatgaaatatattcttggttgcagagtggtcccttgaagactacagttactggtgttgagatgttcaaaaagatactggaccatggagaggctggtgacaacgttggtcttcttcttcgtggtctaaagcgtggtgatgtcgagcgtggccaggtggtgtgcaaacctggtagtctgaagacatacaaaaagtttgaggcagaaatatacgtcctgacaaaggatgaaggtggccggcacactgcctttgtcacaaattacacaccccaattctacttcaggactgctgatgtcactggaaaggttgagttgcttggtgagacgaagatggttttgcccggtgacaatgtaaccgcgaatttcgagttgatatcgcctgttcctcttgaaactgggcaaagatttgcgatgagggaaggagggaggacagttggtgccggggttgtctccaaagttattagctgatgagtttccactttcttgcccgtagcaatttagtaaagaaatgaatgctgacatgtttcttggaatgcatgggcaaaaaggcagagctggctggtctggccgccattcattctggacagtaccttgtgctttcttgttgaggtggctcatcataaagcatattttgtagccacttttccgagttgatattagtgggttcttaccaaatttaccgcgaaaattgctggtcatgttgggccgatgcgtcgttcttcgataggagatgaagtgctgttatcagtgtcagtgacatcttgaagcggcaagaaacgaagatattgaaatgta

SEQ ID NO: 131651 - DNA, 1219 bp, Zea Mays
catcgcatcatatcatcacaacaaaatccatccattcatcggatcatcatcacaacaaactccatctatccatacccatatacacacacagcttgcttcactttctgatcgagctatggcggttccaggtcgagttttcacactactcatgatgctcacagctgcgggcaccatggccgcaagtgacgccgccgtcgtccgcgccaccacgtcgccgtctccggcaccgaccgggtggctaaaggcgcacgccacgttctatggaggcgctgatgcgtcggacaccatgggcggcgcgtgcgggtacggcaacctcttcacgcagggctacggcacgcggacggcggcgctgagcacggtgctcttcaacgacggcgcctcgtgcgggcagtgctacaagatcgcctgcgaccgcaagagagccgaccccatgttctgcagacccggcgtcacggtgaccgtcacggccaccaacttctgcccgcccaacctggcgctgcccgatggcggctggtgcaatcagcagcgcccgcacttcgacatggcgcagccggcctgggagaagatcggcgtctatggcggtggcatcattccggtcatgtaccagagggttccttgcgtgaagcgaggtggagtcaggttcaccatcaacgggcacgactacttcaacctcgtgcttgtgaccaacgtcgcggctgctggctccatcagatccatggacgtcaaggcctccaactccaccggctagacccggatggcgcgaaactggggcgcgaactggcactctctcgcctacctcacagggcaagcgctctcgttcagggtcattgacacggacggacaaactattgagttcgcaaatgtggtgccacagggatggaagtttgggcaaacatttgcatccgggttgcagttcaagtgatgatggtcagagctccatcatcgtccagggttctttctggtgactcgtcactagtcacaggagtacacagtttggagaagttgcgtgtcaagatgcaggaataatggagttgcttgtgtatatagacactgcctattcatcagagccatatatatggcttctacctctcattctttttatttatgctgtgtaacatatacagcagccatgtctaaattcgatttgtatggtgtgcatgtatgaatatgtcatcaatttatatcttcaacaattctgccgtaaggctgtaacgctctt

SEQ ID NO: 131652 - DNA, 169 bp, Zea Mays
actgaagcacgcgtgtcaggataaggtgtcaggcgatccccgcattaaatgcacatgcgatacggtcggctggtaaggcaatttggccaaggtcgcttcacgacaaagtctgccccagataggcttcatgcgagccgagggtgcgctcatcgcctgaaggggccctcgg

SEQ ID NO: 131653 - DNA, 77 bp, Zea Mays
cacctctatgatggtcaccacctatttgggaccacaggtgaagagcaggtagtccaggaggaggtctacaacgagga

SEQ ID NO: 131654 - DNA, 92 bp, Zea Mays
actgtgagcacacagatagtgacagagcaggcctccgaaatcgtcgtccgcagatctacacttgcacaggtgtgcaggcgattaggtttttg

SEQ ID NO: 131655 - DNA, 157 bp, Zea Mays
tctgtttgaatgcttcaaacctttgtggtggaacctttgtatgtttgaacctctgttgtggaagaactagtgtgctggaattatgtatgacttgtgatgagaatgttgtgtatgatgacttttctgtgtattatgattctgtgagctatcatgagag

SEQ ID NO: 131656 - DNA, 241 bp, Zea Mays
tcgccttggcagtagattcctcccgccgcggcctcggtgtgctccgcttcgtggcgctcctccttctgcggcgctggtcgtctccgggtaccgcctggacgcgcaccaccgctatagcgctgccacggaaactgcaacctgtcgtggtcggccttctcgacgtctatgtcgcagacgagcaagccactgtggattctgaggttcaacaagtagaagtagctgagtaggagctcattgaagg

SEQ ID NO: 131657 - DNA, 1453 bp, Zea Mays
tgcttctctgcctggcgccctgtctctctctctccctcgcggcttcccttcccccgagttcccctgccatggcgcgctgctccctggcgcttcttcctgcgccgcgcccctggcccttctgccctgagctcgatccatgggcgcggtttcatgctcgccggcgttcggaccgcggcttgctcctccagcacggcctcctccctaacgccgttccacttcctccctgtgcttgagctccgtcctccccagccatggtgctctgcgcgccgagctcgacctctgttcctcctgcgcggcgctcctcctctccgagctcgcccctgcgcgcttgcttcctgcgcgtgctcgccggtcggagctctctgtctctggcacgctcgcccatgccgcacgcagccgagctcgccctgcgcgtccatctcctattgctccagctcccacgcacgctccgctctgttgccacgcgcgcccctgcccctgcttccatgactggccgcgagctccagctcggccgatcgcgctgctcccctacgcttgccgcggtgcctctctccctgcttgcgcgtgtagatgtgccctctgctcggtcctgcccaagctcccagcttcctgcgcgcgtgaagctctctgctcgccgtcgtttttcccctgcgcgctcagttcctgctcgccagcgcgccctctcggatcgctcagccttaatcgccatcacgtccgaggttttgatatgtcttcctgctcgccgtcaaacttgggttccctgctcagcctttagagctagcgcgtcgccgtggtgttaccgtctggccgtgattcactggtggtccacgtctccgcatgttcaaatcgtcaaccccatgcaccacctgcttgctaaatgggaaaccaacagttctctccctgctcctgtcgttcactatcaacttcagcatgttggtcatgctcgccgagtctccaagctggccatcaagttctgctttcgctcccgtgccgcacacactcatctttgcttgctggccgtgcacctcactccgctgttctgagtctgccagttgctattgcttatccgcgtcatgacatcactcgccgtagttcagctcgctagttcgtcgttgttcatctccgtgtcgggtctacaacaatattgtagatccctcctaggtacttgtcgtcgttcggtccctacgtgatgcctccgaattgtgatcgcgtcgacaaaataatcccaagaagatgtggagaagcaagcccctggtcgatgccccctagtgctcggcgaaaggcatgaacaagaatcgtcaatgttgacttggaattctagttgaatcgggaaccgttctctagttcactatttttattaattgattgagtcgatggattgaatagatatattgatcacgacgattatcttgattgaggcataaacatgtcatagttatattagatggttgcc

SEQ ID NO: 131658 - DNA, 835 bp, Zea Mays
gtcttctcccctccctccagttcattcccatttcccaacccaaaccagcggctggcacggacgccggcgagccgcgcggcccggaggaccactgcctcctgcatatagccggcttccgcggccatgtcatccgtacacttctttcctgcctcctcccagaccccggtccccgcctgccttctcaaaacctctccaaagtcacccctcccgtgcccccgcacccttgccaccacctctctccagagtgttggcggcaattgcaatgcgtggcaccgcccgcacctacggctgcagcggagggtccgcacccctgcagcaccgtccgacgcgccgcctgtgggccccgatggcgggagcgggggcggcggcgcggggggagggagtggaggggaggatgaggaggaggagggggagaagaagaagggactgttgcccgagtggatgaacttgacaacagaggacgccaagacggtgctggccgcggtagctatctcgctcgctttccgaaccttcgtcgccgagccgcgcttcatcccctcgctctccatgttccccaccttcgacgtcggtgaccgcatcgtcgccgagaaggttacttactactttaggaagccatgtgttaatgatataataattttcaaaagccctccagtgctgcaggaggttgggtatactgataatgatgttttcattaaaagagtagttgccagggagggagatgttgttgaggttcatgaaggaaaactcgttgtgaatggtgagggtagaaatgaagaattcattcttgagccaccttcttatgacatgaatcctgtgcaagtaccagaaaactctg

SEQ ID NO: 131659 - DNA, 1429 bp, Zea Mays
gtcttctcccctccctccagttcattcccatttcccaacccaaaccagcggctggcacggacgccggcgagccgcgcggcccggaggaccactgcctcctgcatatagccggcttccgcggccatgtcatccgtacacttctttcctgcctcctcccagaccccggtccccgcctgccttctcaaaacctctccaaagtcacccctcccgtgcccccgcacccttgccaccacctctctccagagtgttggcggcaattgcaatgcgtggcaccgcccgcacctacggctgcagcggagggtccgcacccctgcagcaccgtccgacgcgccgcctgtgggccccgatggcgggagcgggggcggcggcgcggggggagggagtggaggggaggatgaggaggaggagggggagaagaagaagggactgttgcccgagtggatgaacttgacaacagaggacgccaagacggtgctggccgcggtagctatctcgctcgctttccgaaccttcgtcgccgagccgcgcttcatcccctcgctctccatgttccccaccttcgacgtcggtgaccgcatcgtcgccgagaaggttacttactactttaggaagccatgtgttaatgatataataattttcaaaagccctccagtgctgcaggaggttgggtatactgataatgatgttttcattaaaagagtagttgccagggagggagatgttgttgaggttcatgaaggaaaactcgttgtgaatggtgagggtagaaatgaagaattcattcttgagccaccttcttatgacatgaatcctgtgcaagtaccagaaaactctgtttttgtgatgggagataaccgaaacaacagctacgattcacatgtgtggggccctcttccagcaaaaaacatattggggagatcaatttttcggtattggcctcctggtcgaatagggggtactaccaagggttgcttcagccctgaattaagccctggagcaaagccagaatcacttactgatgtcaaatcgacaaagtaggagattgagaagttagttttggtggtgcctgatgtgcaggggaagcttcggttattcttcgtggtagaatgtcacagaggaatcctgtgttgtgtggcaggtagttctattagaacccagagagcggaagacaatttgattctcattgagtcattgggattgggattggattggccagaaggcacagaaaccattttgtctcagggtttcttgtccttttgccttgctgtatacgtacgtattagggaaacttgataccatgatggctgacctagttaagctgcaaaaaagtatggttccactgttgaaatctagagtctggaacatgatgaaatccgcgtacagcatgacgcgcaagtacatcctgtaaatggagaacgtgtctattcaa

SEQ ID NO: 131660 - DNA, 966 bp, Zea Mays
gtcgtcctgataaacaagtgtttgattcgagacatatctgtccttcggaaataaaacacttgcttcgaactaaaatcttatctgtagatgtaaattattggtaatgacccaaaaaatcttattcatcgtaaacacaaaccctcttgcgtacatactaaaattttcaacccatttttttacttcgtatatcaaatctagcttgatctgtttatacatttttttactccgtgtaaggcaccttcatgtattctttttataccagctatatatgatgctgcagcgatgttagatgtgaaactttaattgctgtgcacggaaaattaaaattttccatagcgtgcgtttgcatacagcctcttatttacaatgaatgaataatattagtacgtaaagttttccattgcttggtggatgtatacactattgcaacatttttagactgcattgcacatcgtcataccgattaccttacatatatacatcagcattttattaaatgttgtacgcaaatgacaatgcatacatttaattgtgatcttgcaggttgctcgaccacttcataatctatgtggtttgttcagatgggaagagcttctgtgcagtgggctgttatcccagagcattaacttcgacagtacaatcatacaagtatacatcaaattccatgttcaagcctcccttccaaccagaacagctgcatctgaaagctctgacaaggcgacaaccagacatccttaaaaaatagaccatttgtcattcacttaaaaaagagagatcacaacattagggtaacataaaaacaactacatttagtctctatagtacttgttttaggttaaaaagattagcattacagcctccttccttaaacacctttaaatgatgtaagtactcccatgtcatatatgtcattcctatagtttcgaccagtgctgtattttttatatataacaatgtagtctagaa

SEQ ID NO: 131661 - DNA, 1333 bp, Zea Mays
accctgcaggcgtcatccgtatcttccttctcagctctggccatgccgcctctcctcttctcccttcgaccctcgccctgttcaggcttcccgctacgccgactcctattccgctgctccgcttcctccgcctccaccttctcgtcgctcgcctcttaccacgcctccttcgcccgccggatggccctcgccggcatccatccgcaccaccgcatcgcggtcggggtctccggtggaccggactcgatggcgctgtgcgtgctcgccacggcctggaagaaggcagcggggaggaaggccggtgatgaggaggatcccgtcgcctcggcattcgtggacgggctcctcggagttgtcgtcgaccacggtctgcgccccgagagcgccgacgaggcgcggctagtgcgtgaccgcgtccgtggcatgggtgttgagtgtgagattgctaactgtgagtggccgtatggccctccaaagcaagggaaggtgcaagaggctgcccgcgaagtgaggtaccaaaaactattggacatttgtataaagcaacagataggaatcttgcttattgcacaccattctgatgaccaggcagagctctttgttctcagactatctcgccaaagtggggttttagggcttgctggtacagcttttgtgtctcagttgtttgcatctaatgtaaaatatgatggggagagatttcgacgttatggcatacttcttgtgcggcctatgcttgagttttcaaaagatgacatgtataagatatgtcaaggtagtaatcaaccctgggtggaagatccaacgaatactagtatgaagtatgctagaaaccgaattcgggcgtctttaagaaaattatccaccgaaggtcaagctgtacttaaaactgccatgcttgctttaattttatagtccttttatgttgtccaaagcccctgctgattccatctatggtgtgggctgatatcttgatggatttcatagaagggtttccaaaggtcggtgacaaatcagtggtgctcacgatggtagatcggttctccaagtacaaccacttcactgctttgggtcacccttagcagcatcggtggcaaaaactttctttgatgagattgtcaaactccatggcctcccatgctctattgtgagtgattgtgacaccgtatttacaagcttgttctggactgaattgtttagcatggttggagtcaaactgcagatgagctccgcattccacccacaatctgatggccaattgaaagtggtcaaccggattatcaccatgtaccttcgctatcttgctggtgatcggccaaaatcatgactgaaa

SEQ ID NO: 131662 - DNA, 1218 bp, Zea Mays
aaaggaaaaccacacaccggccaaaccacgactgcaggaggcgggtagtagcaagagaaaggaaacgctctcccagccccaaagaaaaaggcagcacaccaactcaccaagaaagtgtggaactgctcctgcctgcagcctcctgctcatcgaccctttcgccccacaagctcgattcctcgctcggccatggctgcacccgcggaggagacgcttgccgccgaggatacggcgtcaccaccgccgccggcgaggtctgcggggttctggttccttggcgaggataagtctgtccacaaggctctcggcgggggtaaaactgctgatgtacttttgtggaaagacaagaagacctctgctgcggtagttggtggtgcaactgtcctatgggttctgttcgaaattgtagaataccatctcctgaccctggtttctcatgtgctgatcgctgcactgaccatcttgttcctgtggtccaatgcgactgtctttatcaaaaagagtcctcctgatgttcctgaagtgcagatatctgaagaccttgctgtaaacattgcgctagcattgcgtgctgacatcaacaaggcacttgccctgcttcgggagattgctctgggccataacctgatgaagttcctaggcgtggtcgtcgccctttggattctttcagagatcggggagctatgtgatctcctgagattgatgtacattgtggtcttgatcctccacacagtgccgatactgtaccacaagtatcaggaccaggtggacaatttcgctgcaaaggcgcacagggagctctgcaagcaatacgcggtcctggatgccaaagttctgagcaagattccaagagctccaccaaaagataagaaacagaactagaacgtggaggatgacaagcgccttgttttcggcttgggcgacgagagtttgtagccaatggtctgatgtggttcgtgggctttgtgtaggtgcacagtttcacgtatatgttctggtcgtgtaatctatatgtttatataaacctgtaggggtgttgatgaccatcgaaagtgtcgtaaatattcagtagtatatgtagcttagggcttaagcggttgtgtttataaggtcattgtcgttgtcgatgggaagtattatcatgttattttcaggactcaggagtataaaatgaaataaaatgtgaattcatctgaagctgaaacccaaactaagaga

SEQ ID NO: 131663 - DNA, 2504 bp, Zea Mays
acacccacccacctccgccgctcacaagccctagatgtcccccctctcctgcccccgccgcgccgccgccgcccgcgccacgggccgatcccaccagatctcgcgcgaatcggaggccccgctcctccccgtggcccgattctccgcccgcgcgaccaggaacggcgctgatttgagccggttttggaggtgaggtgggggtgcgatttcggtggtcctgggccttgcggggccgggtggatggatgcggtggagctgccgttaccagccaaggtggagttcgggaagatcctggcgccggcagctgctgtggagggggtggatggggccgtcgtcggtggtggccccggaggtgggagcggggaggtgctcaggagctgcgccgacgcggatcagcgtcacggtggtgatgtgaagcagcacaaccagaatgcagaaggctttccgtcttatagaagtaaaaggacgcctttggaagtctctatacagaaatctcttggttttggtttgaagtccgaaaatggtaaacgggattatgttgcgaatgatatggttcaatccttgcataagcaagatagtaagatggtcacaaaaaagaccataaagttgttggatgctccaccttattcaaaaaggctaaagcttgagccagtacaaactggtagagatgctgagattaagggacatgaattcatatcacagaagaatgtgcctgatttggcaccatgtgcaacatctgaaaaatctcggttgctcaagcagaagcgcatttctgatgcaaagagaattgataagaagaatattaggtccggtgtcagatcaaaatacgattgtttctcatcaaaagctggtttagcacatttttgttctggtttctcaggaaacagcgtacttggagcgcatggccttaaatctgatgttcgtgacatcacgaatcacattgagaacctctcattgagtgaacttcttgatggcacctacaagtattccagcttaggaagagataaaggaaagaaggtattgcgcacgaaagaggaactcctagtctctgttagaaaagctttttctatgctttctgacatggactattgccacggaaaggactctaatctcattctgggtccgaaacctcctcctgcatgcacctctagctgtgatatcaaggagcaatgttgtgacaagccatcccccttggttaaggactcgtcacaaatcaatgtctgtgatactgcactttgtcatccaaaagatatcttaagccgattaacacttcctcatcaacaagatctggactctcttttaacacctggaagtgagagcacagctgcagttaagccagttcgtggagctagtttaccaccatttccttggtcacactcacaggctgggggctgtcgacaaagtgttgactgtggtaaacatgggtcaagtagaagttactcccagtggcaatgggtgcgggttggatccaacctcacttctctagattatgaagatacgtctgtccatagaattgatcatctccttcaagagatggatgcagcaaaattatgtagaatggattcatgtgatgggcaatataatttgtgtggcacggaatcaacatctggatcacttgcacaaaacattcaatccagaaaaaatgggggtgagcatggttctcagcaactgcaaaccctggatcgtgttgactctttagatggcttccagaagcatgacagtgaacattctcttttaaaaacttctcaagtatcgccaaagatacagcatgccgctgaaatcttatgtgatatgagaagaagcattgaatcgttgagtggccagggatacagcaatggggtgattaagtggccaaaatcaccatccgaaaaggtgatgaaagcacggaagccctcatcccagtttggtataactgagagctcatcaggttctcgtaacaacgatgcaacttggaacggtagcagtcactctaccaagaaattttgtgacaggaagaatgattctgcatgcttgaattaccctggtaaggaaactataaggtggcctgtgcctgtggaaggtggcgcttctcctgtcaggtcgtccgagcgcggtcctatgctcgatatgaggcagccccatggaaatggtggaagacatcctgttcaggtgccatcacaggtggcacggcttgaaaaggagtatgagaaccagcagaagttgaggaaagcaacactgacctcgtctctagggcctccgggagattggagtagggagaggaacaggagggtgtgaagtctgtacattattcatgtcaaaaatcataggctacggtatatcgtctgggggggaacagcggaaccaggcaactgtttcataagaggtctcagaacatttgggagatgtgataatttaggtggcgggtgatgtatctattgggccatttgttgttggggaaaccgttgtaactagtgtaaatttcgttttttattaccatcatatatcacaggtctcgtctcactata

SEQ ID NO: 131664 - DNA, 780 bp, Zea Mays
tttcctccgtcacacccacccacctccgccgctcacaagccctagatgtcccccctctcctgcccccgccgcgccgccgccgcccgcgccacgggccgatcccaccagatctcgcgcgaatcggaggccccgctcctccccgtggcccgattctccgcccgcgcgaccaggaacggcgctgatttgagccggttttggaggtgaggtgggggtgcgatttcggtggtcctgggccttgcggggccgggtggatggatgcggtggagctgccgttaccagccaaggtggagttcgggaagatcctggcgccggcagctgctgtggagggggtggatggggccgtcgtcggtggtggccccggaggtgggagcggggaggtgctcaggagctgcgccgacgcggatcagcgtcacggtggtggtattgcccctcttcttcctttcccttgtcgtatgtttggctgggggccgtgttgttgtcgtcacggtggaagggttgggtgtgatttgaatttttggtgggggagttaatttcactcctcgtctgcctgcttgtattatgtaactccgctgcatctgctgctgttattaatgggggtgctatagttatttagcaggtggcaagtaatttccatttctgtggtggaggtggagagggaggactgcgcttccattttgtgtctggattgttttgttgctaattggtcatgtttgcttggaggaagatgagtttgtggctgccgttcagagatgtatgttaatgaattatatggtacaggaa

SEQ ID NO: 131665 - DNA, 224 bp, Zea Mays
ataggtcgcacacgtgctggagtagatgagagtcctcacattgtgtgcagccatggcttctagcactgctagagtgtttgcagtgatgttgcgtcgcgagggcggaggaggcgggggcagaggcacgggcatcgcaacggctctactatctggttcagtattcaaagataccagttagctatatattaccttgaactcagtacactaaaatcatgtttacaaag

SEQ ID NO: 131666 - DNA, 444 bp, Zea Mays
atgcaagcggagaaagaagcccagtcggagcagctccaaaccgagaggcacccgcaccaggtgtcaatccgagaagggcgagagaatgcgagtgtcttcctagccctgaacccgccgaagcgacacaacaccaccaccaactccgtagcatatgccgactgctgccacactacgggccttggttgtccaatatctcagacctgtactcctcatcgccaagataagctaagtgtggcaggcgccaccatgtcctccttgacggcacacatggagaatgccaggagagtgaacgactcgcaccatacccgcatcgacgagcgtcggtcggctcacggctacgaccgtgagcggggcagcagcttggggaggaagaacagggcgaaggtcgggaagaaaaacgggacgtccgacgatggtgaaaacgatggtgcgcgcatgatgtga

SEQ ID NO: 131667 - DNA, 76 bp, Zea Mays
gcaccagtatttgggttcgctacatcaaacacatatttgatttcaaatttgaaattgaaaagggagatagaaatag

SEQ ID NO: 131668 - DNA, 310 bp, Zea Mays
gtcggcttcgttacggccgacggggtttagggcgggcccggctaaaacgcgcgcgccggccactcgcccaggctttattcatcgcgcggtcgttctccatcgccggccactcatcccgcgccgccgccgatcgccgtcgagcgcccgagcgccgcccgagcctgcgccgccgccgccgtgcgcccgagcgccgcccgagcctgcgccgccgccgccgtgcgccgccccgcccgagcgccgccagcgcctacgccgccgccgccgaccccgccgcgcccgtcccgtcctccgccgcggcttgccgacgccg

SEQ ID NO: 131669 - DNA, 90 bp, Zea Mays
gttttcgctaaaagaaacatgagtgggtttcaacctacccgaggagcaagtaaaattcttgcctggattgaagccaacgttcggctgtaa

SEQ ID NO: 131670 - DNA, 1898 bp, Zea Mays
ttttctcaccctttgacatctcagaaagtcaagtggggctgcctgcccgactctgcctgcgcggctgcgtctctataaaactccaaggcccaagaaaagaaaaagaaaccagaaagaaaagaaaaaacccacagcatagaccagtagccctcacccctttttaggacaggatccaatgcctttgcccaccacacactctctctctctccttttactcttctcatagtcttctcactcttcccaaacaatcaataaactagcaaaagtcagcgcctcccccttatctcctccgccactttcctccatttccaagaactcaaccactccacgtcgtcgtcgtttgctgccgctgcgcaatggaggaggagcgctgcttcaacaactgggatctggacgccgtcgtccgcctgggctgccgccgccgcctctccccgccacggcagcccgacccgtttgcttcgcttctccctccgaccctgccgtcgccgtcgccgtcgccgccgcagaaggagaagcccgtggtgccagcgctggctaaaggaccagagccagagccatacgccgggtggcgctttcctaacctcggtgctggcggcgggcaagacggcgacgagctcatgagggccatgttagcagtccagccttccctgcctcagcctctgccaacgacaacgccaacgccaacgccaacgcttcccccggcagcaggagagcatcgacagtcgactgttacagccgtggacgtgccgctaccccaggtgcgccccgctccggccgccagagcgcagccgagcgggcggcaggtgcccggtgccgtgccaagatccaagagaaggaagaaccaggtgaagaaggtggtctgccacgttccggcggacggctcgtcgtcggacatgtgggcgtggcgcaagtacggccagaagcccatcaagggctccccctacccaaggggatactaccggtgcagcagctccaaggggtgtgcggcgcggaagcaggtcgagcgcagccgcgcggaccccaacaccttcatcctcacctacaccggcgagcacaaccacgcggcgccgacccaccgcaactcgctcgccggcaccacccgaaacaagttcccctcctcggcggcgcctccgccgcctccgccgtccgtggtggtgggcggcgccggtgccggcgacgcgcagcatcagcagccgagcccgagcccggcgtccacgtcgaccgcggggctctcgcccacgacgccgctgcgcacgccgtcgatggaggaggaggagatggacgacgacgacgacgagctgctggtggaggacatggagatggtcggcgaggacgagctcttgttcctcaacatcgacgccgacgccgaagctgacgccggggcaccactggagcccatgccctcgctcttcgacgtcgtcgacgagcccttcctaaactccccttggctgacggccaccagcagcgccggcgagccagccacaggggcagccggcgccaggagctgacttctccaacagatagagacaatgatgtgccgtccgtccgtctttgtagatgaaacaaaatcaagggaagcgaagagagtagaagaaatcatctgatctgccattgtaatgcatccatcagtagcatcgacatcatgatactagtattagtcctagcatcggtagtcagtcctgaccagtacagagcttgatccatcaaccctcaaagcagttcttccttcctcaccgctcagaacaacatctttgcattttgttctttttctgctctttttttaggtatggttgtgactttgtatctcttttgttaggtgcctgtttttttgcatttgtgtatagaaagtggtagatgatgaaccaacaaaaggagtgaaaaaacagttaaagaagatt

SEQ ID NO: 131671 - DNA, 723 bp, Zea Mays
atggctccttctccagttttgccagccgtggttctggtcacaatcggctgggcgctggccatggcagcggatggcgtcgtcgcagccaacgcaccgtcgccgaccggatggctgagggcgcacgcgacgttctacggcggagctgatgcctccgggaccatgggtggtgcatgcggctacgggaatctgtactcccaggggtacggctcgcgcacggcggctcttagcacagtgctcttccaggatggtgcttcctgcggacagtgctacaagatcgcgtgcgaccgcaagacggccccgacgttgtgcaagtccggcgtcacggtgaccgtcaccgccaccaacttctgcccgcccaactcggcgctgcccgacggcggctggtgcaatcagcagcgcccgcacgcatcatccccgtcatctaccagaggtggagtcaggttcatgatcaatggccacaactacttcaacctcgtgcttgtcaccaacgttggaggggctggctccatcaaatccatggctgtcaagagctccgattccacggactggatgcccatggcacgcaattggggcgcaaactggcactctatgtcatatctctccgggaaaaggctctcgttcaggatcaccatcacagatgaccaaacactcgtatttaataatgtggtgccggctggttggacctttggcttgacgttcacaagcaatttgcagtttaagtga

SEQ ID NO: 131672 - DNA, 652 bp, Zea Mays
aacgtcgtgggtcgtgctcgtgcagctctaggctttttttgaggaagcggtaagcgcggagggaggacgggagagagagataggcgtgccttcgtcgtccgtgccggtgcgtggcgtggtggccgtgccgaccgtccgtccaccccctctcctcttcccggcgccggcgacagcgggagggactccctgggaggaatggccgtggtgagggctccgctcggcgcggtggcggtggccgctctcgtcgtcgccatcttcatgccggccgccgcagcggcgcaggcaccggcgcccgcgcccaccagcgacggcacatcaatcgacctggggatcgcgtacatccttatgctggtggccctggtgctcacctacctgatccacccgctggacgcgtcctccccctacaagctcttttaatctctgctccttttcgtttggtcatgcggttatgggtgctataggaattttaggtgcgcgagatgtttaggtgaggttgggaggtttagaatgatgatgattgcaatcatttgatcttggtatgtatccaaggctccaagccgttggtgttctgattggtttgtaattgtatcggattccattatctttgtgctcagtccctgatttgctcctgctgaaggattctgtttcgtct

SEQ ID NO: 131673 - DNA, 750 bp, Zea Mays
aacgtcgtgggtcgtgctcgtgcagctctaggctttttttgaggaagcggtaagcgcggagggaggacgggagagagagataggcgtgccttcgtcgtccgtgccggtgcgtggcgtggtggccgtgccgaccgtccgtccaccccctctcctcttcccggcgccggcgacagcgggagggactccctgggaggaatggccgtggtgagggctccgctcggcgcggtggcggtggccgctctcgtcgtcgccatcttcatgccggccgccgcagcggcgcaggcaccggcgcccgcgcccaccagcgacgggttggacagttttaaattaccacacaccttgttgaacagtgtatactgtatagcggtttccctctcaagcagccatttcaaaacttgaataaggataaggcacatcaatcgacctggggatcgcgtacatccttatgctggtggccctggtgctcacctacctgatccacccgctggacgcgtcctccccctacaagctcttttaatctctgctccttttcgtttggtcatgcggttatgggtgctataggaattttaggtgcgcgagatgtttaggtgaggttgggaggtttagaatgatgatgattgcaatcatttgatcttggtatgtatccaaggctccaagccgttggtgttctgattggtttgtaattgtatcggattccattatctttgtgctcagtccctgatttgctcctgctgaaggattctgtttcgt

SEQ ID NO: 131674 - DNA, 1644 bp, Zea Mays
atggccgagaagccgcccaagcccaagcctcccctgccgtcgaagccgaggcccgcggcgggaataccaacgtcgacgccgggtcccggcagcaggttggccgcgccgcctttgaagaagcccacgctggcgccgccgccgcaggtgctcccgctgaagccgccgccggcgcaccagtaccggcagcagcagcagcagccgggcggcgcgcggaagccgcgggggtaccggcagcagcagcagcaggcgcaccggcgcgggggcgggtgctcgtgccgccgcgcgtgctgcctggccacgggcctggccctgctggcgctctgcctggcgctcgccgccgcatgcctcgcctacctctactaccgtccgcgggcgccgtcgttccacctgcggccgctggcccccgtgcggctccgcctcggcggcaactcctcgtccgcggtgccggccatggacgccaccgtcggcgcccgcctggtgtcgtggaaccccaacgagcgggtcgcgttccggtacggcgacggcgagggccgcgtcgcgctggccggcgacggcgacggagacggagacgtggcgctcgggtgggcccccgtgcggggcttcgcccacgcgccgcgcagcgtcgccgccgtcgcgttcgtggccaccgccaggggcgtggtgctggacgacgccgtcgcggcgcgcgtgcgcgacaggtaccggcgaaggcagcagcggttcagggtggtcgtggacgcccacgtcggcgtccgcgtcggggcgctacgcacggggatggtgccgctcaggctgctctgcgacgacggcgtgatggccgcggggtcgcctgacgggaccgccgcggggcccatgagcaagtgccaggtgctcctgtttagagtacgatggtttagcctcaactgaaggagcactggataaggctgctgctagctgcttacagaccgtcgagctgataccgcaggcgccagcagagctgaagacggcgtaaattatctgcctgcctgcctgggtttgcgggcaagatgggggtgatggattagtacataccaagtttgtaactgtatattacgctccagctcccgattatttttgattgtgtggtggtgtatacatagcaggaactaaaaatgaacggtggggcgtgtgagttgattgattcaaacacatatagtacggttgtttcctccattctgggcctacaaactttgggggctgggtcgcccctcatgcgaggcagaggcacgctccttcaggctgctgggccttgggctggtgtagactgtgatgttgggagacagtcgactcaggtgctgacgtacgtaggagcagagttggtgacacaacacatcccttctgtcgagatttcaacaatgctggacaagcttcggagtgctagattttcgaaacccgagcgtcagtattgcaaaaaaaaaatccctcctatcttaaaagaggcgcagctctcctacatcttcagattccggagacgatccttgtgaaatatttttccggacaagttctctatcaggtttacagcaagatgtttgctggggctaacatgcatttagtttgtattagattatctatcttccctgagctggcagaagactggagctctatgcattcagccatcagagattc

SEQ ID NO: 131675 - DNA, 2159 bp, Zea Mays
agcccctccattgcctcattataaccaccaccgtctcttccttgtgtcttctcctcctttccctcccggccacttctctcgtttcgccctccccctcgagcaccccgccggctagggttacggccaccgccttccacgcctcccccacttcccgtaggcggaggctggtcggcgtgcacgcgaccgcggcggcggagatggacccggacttctcgcccgggggcggggggcccagctttgaattcgccttcaacgaggtcaacttctccgaccgggaattgcgtatcgaggtcgtcgccggggatgactacgctccggggtccagcggcgccggtgccggaggaggtggcctcgccgactgggcgcgccaccgcaagcgccgccgtgaggagctcctcaaggagaaagaatctacaactcacatgtcagaccaaacaaattgcaatgaagttgaagcagaagagtgtgatgcgtatgaagaaaatcaagaggaacctgtagcaatggtagaagaatctccacccgatgttggccaagatggtgatgatgggcaaggtattgattcgtcttggactgtggttggtacaccagttttacgagtcaagacaatttatatcagttcagcgattcttgctgcgaagagtcctttctttttcaagcttttctctaacggcatgaaagaatcggatcagagacatgcaacccttagaattactgactcagaggaaactgccctcatggagcttttaagctttatgtatagtggaaagttggcaactactgagcccactcttctgctggatatcttgatggctgccgacaaatttgaggttgtttcatgcatgaggtactgcagccagttgctcacaagcttgccgatgaccacagaatctgcacttctctacctagatctcccttgctcaatttcaatggcagcagcagttcaacctctgacagatgcagctaaggatttccttgctgtaaaatacaaggatttgactaagttccaagatgaagtgatgaacattcctcttgctggaattgaagccatcttgtcaagtaatgacctccaggtggcatctgaagataccatctatgacttcttgctcagatgggcccgtgcacaatacccgaaatcagaagagagacgtgagatccttagttctcggctgctccctcttgtgcgattcagtcacatgacatgtaggaagctgcggaaggtcctaacatgcacagatatagaccacgagcaggcaaccaagtgtgtcaccgaggctcttctgtacaaagctgatgcaccacaccggcaacgagctcttgcagcggacacaacaacctgtcggaaattcgctgagcgggcttacaagtacagaccactcaaggtcgttgagtttgatcggccctatccacagtgcatagcatacttggatctcaagcgcgaggagtgctctcgactctttcctgcaggccggatatactcgcaagcgttccacctcgcagggcagggcttcttcctctcagctcactgtaacatggagcagcaaagcaccttctactgctttggcctgttcctggggatgcaagagaagggctcaacgagcgtgaccgtggactatgagtttgctgcaaggacgagaccatccggcgagtttgtgagcaagtataagggtaactacacatttaccggtgggaaggcagttgggtacaggaatctctttggaatcccgtggcaggcgttcatggccgatgacagcctcttcttcatcgacgggatgctgcatctgagagctgagcttacgataaagcaacctacgtagatgtgctgccgtcgggttaagtgtgtccagtcatgggtgatgtggaaaatgctgtgtgctgcagatatcctttttgttttttttccttttgttcacgcaccttaatccttacattaatagacagtttggtgatgacaaaatataaaggaaaaaaaagggctggaaagctgccttttgttgtttcactaagatgaaggttgtatgatctctgtctcttcgtagtggaagttgttacaccagatgaaaaagaaaagatatcggatgggaatcctcactagcttgagttctctgcaagtttccagattggccggtatctcactgctaatgagctatgttctggtt

SEQ ID NO: 131676 - DNA, 497 bp, Zea Mays
agcccctccattgcctcattataaccaccaccgtctcttccttgtgtcttctcctcctttccctcccggccacttctctcgtttcgccctccccctcgagcaccccgccggctagggttacggccaccgccttccacgcctcccccacttcccgtaggcggaggctggtcggcgtgcacgcgaccgcggcggcggagatggacccggacttctcgcccgggggcggggggcccagctttgaattcgccttcaacgaggtcaacttctccgaccgggaattgcgtatcgaggtcgtcgccggggatgactacgctccggggtccagcggcgccggtgccggaggaggtggcctcgccgactgggcgcgccaccgcaagcgccgccgtgaggagctcctcaaggagaaaggaaatcacttgtggaagaaaggtgggaggagggggaaagcatcaggagattctggcgggagactcataggaaaagcatgggagaaatag

SEQ ID NO: 131677 - DNA, 480 bp, Zea Mays
atggccttgtgcccacatgtcatagagataaaggggtttcttcttccctggacaactggacgtgagcagtattgctgctgcgtgcttcggcttgctgcaggtttgggggcttcgtgcacggcgtgctcgggaagagggggaactaaggagccgctcggcctactgcgccaaggggaggagatccggcgagctcagccatggtgggaagaggagcttgggctgggcgtcgtgggaagggaggaacagggagcgtcagcctgttgtcttgccgcacggaggtgggagctcggctggagcttgagggaggcggccatggaagagaggaggtgccatgggtggctgcatcaggtgggggaggaagaaggccggctgtatcaggcaataacgtggaggggaagggagagggcaggggctgccatttgtagagcagaagctctagatatgtcagccagcttcaacaggtggcaggtgctacggtga

SEQ ID NO: 131678 - DNA, 2220 bp, Zea Mays
ccctctccctccatccctccctcactgtctaaaacatttttttctttgcttgaagcaagcaccttcccctttctctgcctccctctcccctccatatatacgccattgtgtcgctccgctagtctcgcgcgacgcccatgggggaggaggggggcctgatctaatgtaggggcaggaggaagcccttccactgttccatctctttcccggagtaggtggtgggcacgacgaaggcccctcgcccccaccagattcgtgcaactcggcgcctcatccgatcggcaccggccgcccaacgcgctacagacgcgctgccgcgtcgggactctggaggacacggcggcggcttggtggattgtgggagggagggccttctcttggatttctgttgtcgaggacagggtcttgtattagctagctattcactggatgttggcgatggggacagaagagtgggagctctatccttgttcctacagcggctcacaggtgatagagtacaggccggtctctgaagacgaagacggcgaggacgaccagaacggggccgacgtggcagtgtcgctggacgccgttctcccagacgatctcctggagaaggttctttccttgttgcccgttgcgagcgtcataaggtccgggtccgtttgcagaaggtggcatgagattgtgcatgcgcagaggcacgcgtggagcaagacggtgcccgagaagccatggtacttcatgttcacctgcagccaggatgcggtttcagggttcgcctacgacccgagcctccgcaagtggtatgggttcgatttcccttgcatcgagaggagcaactgggccacgtcctcgtcggctgggctggtgtgcctgatggacagcgagaacaggcgcagcgtcctggtgtgcaaccccatcactaaggactggaagaggcttcctgatgctcctgctgttgggggcaggacagctgattacagtggcctcgccttctccgtggacagaagcactcatcgctacaccgtggccgttgcaaggagcagccaggttccatccgagtattaccagtgggagttcagcatccacttgtacgactcggtgtctggcacctgggcgactcccttcacgggggtgttgcttgggtggagaggcggcgacgagtgcgtcatctgcgacggagtcctctactacctggtgtactccacgggggttgtgatgaacgatagcgagcatcgccattgccttgtgatgtacgacctcgatgcaaggcatagtagtagcagtagcagccacacttctctgctgagcatggctatcccggcgccgtgcgcccttacgtgcggccggctgatgaacctgagcgagaggctcgtgctggttggcggcatcggcaagcaagataggcctggggtcatcaagggaatcggcatctgggagctccgtcgcaaggagtggcacgaggtcgcccggatgccccacaggtacttccaagggttcggcgagttcgacgacgttttcgcaagctgcggggcgcgtgatcttatctacatccagagctatgggtcgccggcgctcctcaccttcgagatgaaccacaggtcgtggaggtggtccgcgaagagccctgtttccaagaggttcccgctgcagctgttcactgggttctctttcgagcccaggctggacattgctctctagtttcttgcctcgtgtctacctcccaccagaatcttcgcgttgcattttgtatggttttgtggagcggccaaagcccaggaggtggtgctgctgctgccgttgaagccatttgagcacagaaaatgccccttctttttatactgtagctctattcttttctttgttgggtctattgggcagcagggtatatgcattggaatgatcagttaaacttcgccgatcatttttgttgacctggacactggagggaccgagggagagacgatgatgtgggagcaacttgcctaagaactattcctgttccattgctatgaaggagagtagtccaccattgctacggctttctttgagctattttttgaagagcagagcctgttactctgcttgtgatctcatattaatctcccttcatctgtctgcagatggaaatcaaatctttctaacactgaacaacagacgtgttttagccttattgtatgcaaagacaagtagtagtatatccgttaagaagtacatgctgcacagcggtgctag

SEQ ID NO: 131679 - DNA, 2139 bp, Zea Mays
ccctctccctccatccctccctcactgtctaaaacatttttttctttgcttgaagcaagcaccttcccctttctctgcctccctctcccctccatatatacgccattgtgtcgctccgctagtctcgcgcgacgcccatgggggaggaggggggcctgatctaatgtaggggcaggaggaagcccttccactgttccatctctttcccggagtaggtggtgggcacgacgaaggcccctcgcccccaccagattcgtgcaactcggcgcctcatccgatcggcaccggccgcccaacgcgctacagacgcgctgccgcgtcgggactctggaggacacggcggcggcttggtggattgtgggagggagggccttctcttggatttctgttgtcgaggacagggtcttgtattagctagctattcactggatgttggcgatggggacagaagagtgggagctctatccttgttcctacagcggctcacaggtgatagagtacaggccggtctctgaagacgaagacggcgaggacgaccagaacggggccgacgtggcagtgtcgctggacgccgttctcccagacgatctcctggagaagaggcacgcgtggagcaagacggtgcccgagaagccatggtacttcatgttcacctgcagccaggatgcggtttcagggttcgcctacgacccgagcctccgcaagtggtatgggttcgatttcccttgcatcgagaggagcaactgggccacgtcctcgtcggctgggctggtgtgcctgatggacagcgagaacaggcgcagcgtcctggtgtgcaaccccatcactaaggactggaagaggcttcctgatgctcctgctgttgggggcaggacagctgattacagtggcctcgccttctccgtggacagaagcactcatcgctacaccgtggccgttgcaaggagcagccaggttccatccgagtattaccagtgggagttcagcatccacttgtacgactcggtgtctggcacctgggcgactcccttcacgggggtgttgcttgggtggagaggcggcgacgagtgcgtcatctgcgacggagtcctctactacctggtgtactccacgggggttgtgatgaacgatagcgagcatcgccattgccttgtgatgtacgacctcgatgcaaggcatagtagtagcagtagcagccacacttctctgctgagcatggctatcccggcgccgtgcgcccttacgtgcggccggctgatgaacctgagcgagaggctcgtgctggttggcggcatcggcaagcaagataggcctggggtcatcaagggaatcggcatctgggagctccgtcgcaaggagtggcacgaggtcgcccggatgccccacaggtacttccaagggttcggcgagttcgacgacgttttcgcaagctgcggggcgcgtgatcttatctacatccagagctatgggtcgccggcgctcctcaccttcgagatgaaccacaggtcgtggaggtggtccgcgaagagccctgtttccaagaggttcccgctgcagctgttcactgggttctctttcgagcccaggctggacattgctctctagtttcttgcctcgtgtctacctcccaccagaatcttcgcgttgcattttgtatggttttgtggagcggccaaagcccaggaggtggtgctgctgctgccgttgaagccatttgagcacagaaaatgccccttctttttatactgtagctctattcttttctttgttgggtctattgggcagcagggtatatgcattggaatgatcagttaaacttcgccgatcatttttgttgacctggacactggagggaccgagggagagacgatgatgtgggagcaacttgcctaagaactattcctgttccattgctatgaaggagagtagtccaccattgctacggctttctttgagctattttttgaagagcagagcctgttactctgcttgtgatctcatattaatctcccttcatctgtctgcagatggaaatcaaatctttctaacactgaacaacagacgtgttttagccttattgtatgcaaagacaagtagtagtatatccgttaagaagtacatgctgcacagcggtgctag

SEQ ID NO: 131680 - DNA, 825 bp, Zea Mays
atggagtgtcttttagattgtggtcgtcgttcattggcctacgtgccgccctctgtttacgtgcatctgttcgatctatggcttctcggcgctctcccagagtataatgtaaagctatttttgcagattggaactgcagagtggtcgggttctcagatgtcatccctgtttgtccatgctgaatggatgcctcatttgttggattgggctgacatgttactaaggatgtatgtaagatggggagagaagcagcgttataagacacgagtagttgagaaatcacctggtgaagaggccggtataaaatcagcaactgttgaactagaggggagatatgcttatggctatctctctggcgagaaagggacacacaggattgttcgtcaatcaccatttaatgctaaagggcttcggcagacaagctttgctggtgttgaggttatgcctcttctaccagaggaatccatggctgtggacatacctgaagaggacctggagataagcttcacaagagctagaggtaaaggaggccagaacgtgaacaaggtggaaacggctgttcacatggttcatattccaactggaattgcagttcgttgctcaggtataatttcacaccagtttgcatttgcattgtggagtaacttgttggttgctgaggatgatgcttttaaccgtaaccgcagggaatgcgctaggcggcttatcagcttccataccctggctctggaaagcaagcagaaggcggtgtacaggaagtactccaagcccaagcttggctccgtcgcgcttcaatcccctgacaagaagctattgtcaggttga

SEQ ID NO: 131681 - DNA, 4493 bp, Zea Mays
tccgcataaataccgcgcgtctgctccgcgccgcgaaacaacacgcaagaaaccagaagcgctcgcgagaagtaagggagagagaggggggacgacgacagccttgggacccgcggactgcatcgctcgccggtagctgacgtcactcggccccgtggaattttcaagctttggtggtggctcgtctgtctgatccgcgctctgctgctttttcttcgcccgccgcactgtatcacaactataacagtacctacgtgttcacaggtctaggcatttgtcctaccagtacagtacattggactagtaataactagtatgtatccagcaaaccgccacatggatccatactactcgcactatagaaaccatgttccttacccatactatcctcctgccagatgggaaatcccatccggtcatccacaggcaatggactcatcttattattatcggccaccaaactgtggaacttggccatatcatgatatctcacatccttctgagttccattgttgctgcaaccgggcatatcttcctgattactacagtttcagacccccattccctcaagagcttccaccccctcatttatactatcacgtgccatctccacatcatccaaatgcatgtccttcttactttgtcccatcacatccttacccttttgatcagacaccatatggttatgaaaagttcaagagccactgctgtggatgtccaactcatgtgtgccctggggctgagaagaacaatgtgaaaatcgaggaacaaaggcctgatgtcaagcttgagagcggtgagcacaagaatgctgatagtgacagtataattcaacacccaaacaagaagtatccattcatatggctgccatcaggcaatatgaaaggcaaggagaatggagagcattatgaattgtcacctcaggttttaaatgaatgggctcctgtgagtgggaagtggttaggggatgtgaagcaacaagggcaggataatgagaaggggaaacaattccagtggccaatagtttggatgccagcaggatatgatgcaccaaaccaaaaggctaaagatatgaatgacacagaagagaccccaaaatccccaaagatttctgaagtgtctcctcaatcacccaagatcattcctctgtcttggtttgggaatggtcatcatcatgatcagaaatcggctgccagaaatggttctggagaccacaacaacggatcagcagtgaagaaccaacctgtggttactgaccatcaagacagcatgatactggaaggaaaccctaaaatcactccagctgtgcccaagagcatacacgttgggaagaaacctccaagggaaaactgcaagaccattccagttgtgccagagaaagagattaatgaaaagaaggccagtacttacagaaccattccggtcataaaagaaagtgatgagaagaagattggcatgagggaaaagagggagtcaaaggaggccaacagtgctgaaatggttgaagagaacaggaaaacaaaacacaatgactcatcagtagttaagcattcaaaattgcccccagtatgcttacgtgtggatcccttgccaagaaagaaacctggaaatggttcttctaggtctcctagtccaccaaggaaggatactgacaacacgaagaaggacgtggatgaggcccagagccagatcctggagcctaaacagtctagtacaagtaaggatatcactgtgtctgaagtgaaagaaaaatcgccttatgaaatgaagaaggaagttgggtttagaaatgaaacagtggaagctgcttctgttgaacatctgcaggaggaagaagctcccacaagtaaagatggccaaaaggtccaagctgctagcactacagttggtgatcaagaaaatgcagccctgaatagcatagaggaagatcatgtgcaagaaaatgctggtgcaggaagcttgaatggatgtgacaaaagaaaaaatgaagatgggacagtgattgaaagtgaaactgcgaaagatgatgccagaacatatggagttaatttgtcagaatcagatgctgcagttcgtattcagtctgcctacagagggtatgatgttcgaaaatggcaacctttggataaactctggaagatcaagcatgtgcatgaacagatgcaagttgtgaggaagcagattcaatgccttttagattcttgcagtaagccaacacaaaaagagcaagtggccataggtgaaactattatgaatttactcctgaagcttgacgcaatccagggcttgcatccaagtgtaagggaagctaggaagtctgttgctcgagaactgatttgcttgcaggagaagcttgatactttatgcaaagcagcatctggagacttgaatcacacagatagtaatgatgatgaatctgaggggaccaagaacattatccaaactgaagctcctactgtaataactgaagcttctgatagacagaagagaactattgaactgggtaaggtacaagaaccatgttcagtggactccatggagccatgcaacacagttccatctggagtttcctgggaggtgaggccagatgtagacgctagcgaggagaagaatgaaaaacaagagtcatgtagcaccacagtggacgaagcgcacgaacaagggaaaactgagggacagattgaaattcaggtagcatcatcgatggatatgataagtgatgaagcttttacagctgacaaccaggagcatggaattggagaatcaaatgttacttcagtggaacaagtgactgaagaagagaaaccagcatctgaggatgaagtaaaagagccaccattggtgaactccacggcactattgtatgatactacttcatcaggggattccagtggactgaaacaatacacagcttcgaccgatcagaatctctatgctgaatcaaatacagggtcgtctcctgcatccactgaggacattgacataagtactctggctgtggaaagtgaagtggcggctgagaatgatggcccaattaacagtcaggtgcatgaaactgtagctctagaaaatgtggaaatgaaagatgatgtttcttctgctgaaaatgagcataacagatcgagcagccctgttattcatttagaggacccactagtgtctttgaaggatgttgagcagcatggtccaactcctactaaggactttgttgtacctaacacagaagaccaacaagaagccagagatatcagcttgcaggtacaagctgtggattccatgaaagattgtggcgaagtaccagatggaacaatagaggcttcgacgaatgatgatgaattagaactgggtacttctgcagatgtagaaaagaatgatcaacctaccttgctggaaccaagatcggagtctgtctctgtcccagaactgtccgtcttggatgaatctgacgataaaatgcaatgtggtgtttctggcaaggatgaggaagcacatgtggaggagaaaactgtaactattgctgttgacaaggtaacaggaggttctgcaaatttcgaggatcctctttgtgaggcatcgaggaaggaacctgacattgagaagagtcacccaagcctcggagaagaggaagacgatacaataggtggaacagtcttccctggttcaggtagctgtgaattatcatgtccacaggatggtggcatcgcagtctacgaggggcctgagatggtgtcaccagagagccaaactgatgctcggaaagaaaacatccattcagatgtcgctgagacagatgaatgcaccaagactcagaaggccgctctagcaggcacagagggagaaaattctgctgaagattctggtgtgccggtgtctgagatggacaaatgcaacgagatgccgaaggatgctccgacacttacagcagcaggtgcaaatcctgctgaagacgaagcttccctgaaagacctctctgtgcagacagagaacaaggcttcttctgcctccccagctcctgatgatccgaaggccagcgacgagaagacgctggcagaagagaaccagaagctgaaagagcttctgcaaaagcttctggcgtccggcaacgatcagatgggggtcatcacggacctaagtgagaaggtcaaggtgctggagcggaggctggcacgcaagaagagaccaaaggtgagggtgcacaagccatccaggcatgcttcctgtgtccactgaaaggataagtctgtaaggttttgaggttttatgttgtatggatccccatgttgcttcctgtgtccagctattgtgcactgtgtaggtatagccatgctgtggcactgtgcttcgtcttggacaacacaaggtgtggcatgttctgtattttatgtctgtataatgcatccaactacatctagtgttctgtgagcaattgattgggacaaatcgatatgacatatgcgtctgtgttgtgctatatataattcgaaaaacacata

SEQ ID NO: 131682 - DNA, 481 bp, Zea Mays
gctgtagcaaaaccatagctttttcttgttgttgcccaagattatgttgtagtgttgctaaggaatgggaggcgcaaggatgaggctacaaaggagccacatgtttttaggcgatgacattgatgcatttgtatcttggttatgggatcatctgtcctaaaatttgcacctttatgttcatcctaaagctgcctcttctaaggatgatgttaaaagcactcgcagtgttgccagaagattgcatgttcatagtgtaccaagtagcatgcaagttaatcatgaacctgaagctgaaacccagaagacagtggtgattcataaaaagagattgggatatcaaaaagtgaggggaacaattgatcgaggtcaatcagaagtagttcctgttagaaacgttgtagccaatgtttctcatgtggatgaaaaggattttcacaaatgacatgtagatgaaagggcttttcataaatcacattctata

SEQ ID NO: 131683 - DNA, 303 bp, Zea Mays
atgcagacatccctcgtcgcagcgcaactgcggcctacactcagcgtgcccgacctgctctgccacgctaacttgttgtccttctccatggagggcaagctactaccgtggatcgagtgcctcgagtcgctgggcctgccgatgcgaccctatcctccctcccacgccatccctcccgctgcgcccttcttgtcttcccgagctcaggcaacctccagttgtagcggcggtgatggggtgaaggagctctgggatgtcctggactcttgcaagaagaagctcccgctccagcaccttcagtaa

SEQ ID NO: 131684 - DNA, 91 bp, Zea Mays
cgggagcggtccgcatcaacaatgcgatttaacaaatctaaacaaaataataatcgcggaccggaggaagcaaacttctccttgtggtagc

SEQ ID NO: 131685 - DNA, 705 bp, Zea Mays
gtttcaacaaaccatcggccaattccgaagaagaagaagcaacaggaatcgtagcagccaaggcaaccgtgagcatgggctccctgggtcctagcgtggtgaccctgcaggaacagcagcagcagcccaagccccgcaaaccggcggcggcgggcggcggctgccacgagctggagcagcagagcagcaactgcggcgggtcgtcgttccggatgccgctgcactacccgcggtacaagaaggcggactacgaggccatgccggagtggcgcgtcgactgcctgctccgcgagtacggcctccccgtcgccggggaccttcgcgggaagcgggagttcgccatgggcgccttcctctggcccggtcagtactgatgaactgtacgtttgatggagtcccagatcgaagcagcatatgcataaggagtcgagattctccccgccggattcaccattttacctacactagacataggatccagtgattcggtatgcatcagctcgttctcgatcgttccatgaaactactataattgtcgtcgctctcctcctcacctcgcgtgcatcgttgtggaatcagtaattcatcagcatctgtacaataccatgtggctgggcagagtatgtattgtcagtacgagttagttatttcatcaaaaatggaataaacataaatattccagcttctatgtctgggattcatata

SEQ ID NO: 131686 - DNA, 1505 bp, Zea Mays
agggaagaaaaacacaccccggatggtcgggcacgtaagccccgtctcgtcctccagatatcggccgccaccttcacctccaccgccccggcgcacgtgcgcgtctccatcgtcgccgcctctcctccttcggacacgactgaccttccactggcgccgacgaagaagacacataggaagaagctcaccgccaaacctcatccagatccagtcgctaccctccgaaagccgcatacggaacgtctcgtctcttcctttggatccggcagccggtgctcctcctccggatccggtggtcaactccatcacccccagctccacctcccttagtccccctccatccgccctcacccaccgcttctatatcgccacctctctcgttgtagaagacactgaggatctgggaagtgaagccgttccgccgtgaagcagcgccaccccttgccatccgcccgaccgctgggaagcagggcccacgtctccaagcttcctacaggaagagcctgcgcccctcccaaaggacaaagatattaggatggatgaagtcacacaagctgttgaaaatctgaagaaagaatggagccaagctgtttcacagcttgaggagagcattgctgcaattgaatcatgtggaaaaacagggaaaggaacagaggaagcaacttctcttccaaggttgaatggttctgcacaggatgctctgcagttgctcaagtccctgcagttccggcttgatcttctagctcagcagctacctacttttgatgaagtgcagtctgggcaagcaaccttagggtcgtgggatgaacaatacaagaagttgcgtgctagcctgaggaatgctaacttacaagcgaaagagaacattagaaaagctgctcaggaggagagggagcttcttctagggggtggagaagagtcaacaatccgtaggcgtaatctccagacaaaggttgggatgacatctgctgctgaaagtatcaccgagagcctccgacggtctcgccagatgatggttcaggaagtggaaaggagtgcaagtaccttggcaacatttgatgaatcaacaagtgttctccggaaggctgaaggtgaatatcaaggacaccgctctttgctaatgcgtacccgtggtttgctctccacgatgcaacagcaagatgttcttgataggatcatcctgaccatcggctttatcattttctccttggcggttctttatgttgtctcaagacgtattggtctattgacgctgcaaaggaaactggccgatgccatcagatccggttcattatcagccgatgacatcgtagcgaatgcccaacgtggacctgccccagcaaatgttcctgctcccatctacgatgaactgtgattcgtttgtcctctgtattgttaaggttagttttgcatgtggctattgggattttgtccagtgtgtggtggtcatgtaccgatctgcgattcattaaaataatttcaaatgaaaaatagttaactacaaa

SEQ ID NO: 131687 - DNA, 1706 bp, Zea Mays
gcttgaccccggttcggggcggttttcacagggaagaaaaacacaccccggatggtcgggcacgtaagccccgtctcgtcctccagatatcggccgccaccttcacctccaccgccccggcgcacgtgcgcgtctccatcgtcgccgcctctcctccttcggacacgactgaccttccactggcgccgacgaagaagacacataggaagaagctcaccgccaaacctcatccagatccagtcgctaccctccgaaagccgcatacggaacgtctcgtctcttcctttggatccggcagccggtgctcctcctccggatccggtggtcaactccatcacccccagctccacctcccttagtccccctccatccgccctcacccaccgcttctatatcgccacctctctcgttgtagaagacactgaggatctggccatcatcatccgtcgcccctcactcgatttcccatctgccgctccctcctggtctctgagccgctgatcgggtctccgacgcagggaagtgaagccgttccgccgtgaagcagcgccaccccttgccatccgcccgaccgctgggaagcagggcccacgtctccaagcttcctacaggaagagcctgcgcccctcccaaaggacaaagatattaggatggatgaagtcacacaagctgttgaaaatctgaagaaagaatggagccaagctgtttcacagcttgaggagagcattgctgcaattgaatcatgtggaaaaacagggaaaggaacagaggaagcaacttctcttccaaggttgaatggttctgcacaggatgctctgcagttgctcaagtccctgcagttccggcttgatcttctagctcagcagctacctacttttgatgaagtgcagtctgggcaagcaaccttagggtcgtgggatgaacaatacaagaagtatgacagtgttggattttttttaatttttttcttcttcttttagcctgctttttttttgcaaaaaaaattgattgtgtttgcaggttgcgtgctagcctgaggaatgctaacttacaagcgaaagagaacattagaaaagctgctcaggaggagagggagcttcttctagggggtggagaagagtcaacaatccgtaggcgtaatctccagacaaaggttgggatgacatctgctgctgaaagtatcaccgagagcctccgacggtctcgccagatgatggttcaggaagtggaaaggagtgcaagtaccttggcaacatttgatgaatcaacaagtgttctccggaaggctgaaggtgaatatcaaggacaccgctctttgctaatgcgtacccgtggtttgctctccacgatgcaacagcaagatgttcttgataggatcatcctgaccatcggctttatcattttctccttggcggttctttatgttgtctcaagacgtattggtctattgacgctgcaaaggaaactggccgatgccatcagatccggttcattatcagccgatgacatcgtagcgaatgcccaacgtggacctgccccagcaaatgttcctgctcccatctacgatgaactgtgattcgtttgtcctctgtattgttaaggttagttttgcatgtggctattgggattttgtccagtgtgtggtggtcatgtaccgatctgcgattcattaaaataatttcaaatgaaaaatagttaactacaaa

SEQ ID NO: 131688 - DNA, 1089 bp, Zea Mays
atttcagtttcagtgaagctagccatcagtacgcgaacacgctcatcagggtcaggccacagccaccatggtgaagctggcgacggcgcgcgagtgccgcgcatacagcctcggcgccggcgcggggtccggcacggcgttgcgcaaccggtgggagtacatcaacgccggggtgtacatcttcgcggcggtcctcctggtcggcgggttcctcgcgcagctcctgccgtggggcgggcccagcagcccggggctcgtggtcgccgcgatcgggctcgccggcttgctggccgtcaacacgcacgacctcctcgcgcacgccgctggcgtcgattaccgcctcgggatggtggtcgggcttgacgcgcagatggggctcgtcgagctcggcgtccccgccgtgcagatcgtcggcaccgtgctcatgctcgtcgctgtcgtcttctttgtgattcagatggagagaggctaccggcacagcctagccatgcacggcctgaacctgctcatagccgggccggcactgtggtgcctggggtctgtgcaaaacatctgccagttctacgagcgtgcgagcgggcacgtccagctcctgcagaagagcgtgcagatcccgctgctgctggggagcaccctcttcctcatcgccggcatcgtcaaccggcacgaccgccgcagccgccactccggcttcgtgctactggggaggagctgggcgtggttctgcctgttcgggagcctcctcttccttgccggcggcctgctgaacctgctcaaggtgttcaagacgcagcagatgggcggccggggcctggagaagctgcgcggcggcacgcaggagcggctggccttggagcgggagggcaaggtgccgctcatcctggagcacggacacggcggccggaggggccctgcgataccgccgccgccgcccgggtcttacaaggacgcgctcgtcagtagcgccagctaggaacagaaatggccttgtagatgctcagcattttacgttgaactgcatcctctgtttttaatcatcaatcacgttcacgcctgcttgaataagcttttactagccgtttgctacac

SEQ ID NO: 131689 - DNA, 735 bp, Zea Mays
agagaatagctgcacagcacagctgtgcggttaccaggtcagcaatgtccatacagaaaggctagcgaccagttaaccagtggcggtagcaccagctactaccaaaccctagagttaaaatctggttccagagcatctggtggttcgttttgcataacagaccaaccaaatagacacccaacccgctcctgcaaccttaaacaagagactaagtacgttcaacctagaccgaacaggtatttttcatttggcgggggtcaaaaaaatacaagagaatcaatgtactcctagaaccctaagcaggagaggctaagacgacagccccaagctcgtctaccaatttcagctgagattcaaaatagccctagaagtggacagcttctttcctgaacagcagcttgccacctcttttcctctctctgccatcatgggggggatgacaccctcacatggccagaggaagaagagccaaaaacaccccctctgtattccactcaccaccttgaagaaacaaaatacacaaccataccatcaaaatgccataccatgcccccacaatgtcttcgtccacagctggtggaacaaacagcagtgggagctgcagaattgtggcagcccaaagaagagagccatggtgctgctcgtgctcgtgtttccactaacccaccaccatcctttttcttgaccaggctcctggcgaaaaacaagcagatgaccacgaatcccaggcctacg

SEQ ID NO: 131690 - DNA, 1240 bp, Zea Mays
ggcctctgtgccatccaggggtcggcatcagcctctctccctcgctctctctgactcgtcgcggcataaacaaacaaaccaaacaaagcaaagcaaaggcaaaaccccacctccaccacacctcgtcgtttgcttttcctcggtgcgggcggtgcggcacaagcccccagaccggttgcctccattactgagctgtgcgtgcgtggtggctgtctgccttgtggcggcgccggtcatggtgatggtggagatggacggtggcgtgggaggaggaggaggaggagggcagacgccggcgccacggcggtggcgcctggcggacgagcggtgtgacctgcgcgccatggagacggactacgtgcggcggtttcaccggcacgagccccgcgaacaccagtgctcctccgccgtcgccaagcacatcaaggcgcccgtccacctcgtctggtctctagtgaggcggtttgatcaaccacagcttttcaagccctttgtgagccggtgtgaaatgaagggcaacattgagattggcagtgtcagggaggttaatgtaaagtctgggctgccagccacaagaagcacggagaggctggaactgttagatgacaatgagcacatactcagcgtcagatttgttggaggtgatcacaggctgcagaactactcgtccatcctcaccgtccaccccgaggtcatcgacggccgaccggggacgctcgtgatcgagtccttcgtggtggacgtccccgacggcaacaccaaggacgagacctgctacttcgtggaggccctgctcaagtgcaacctcaagtcgctcgcggaggtgtccgagcgacaggtcgtcaaggatcaaacggagccccttgaccggtgatgggggagatacatacatacatgtcgaacgatatgttcggatcactgcattgcattgcttacgatgtgcagagctaatcttcaacggagcccctaggttcctggagaaaagagctttgagggactgctactgctactgctatgccgcgtcgttcaaagttaagtttcctccttgcgattgtgtttgctgtccttttctccggcgttgtacgtcgcacaaggagaaggacaggcagaatatgatgtgctattgtagtattgaaaaatgaaaggaaaaaaagaactgtgaggctctgaacatcttcattcccatggtcaatgtgtggacttgagggtttctctgtaattagattcgctctagattgcc

SEQ ID NO: 131691 - DNA, 694 bp, Zea Mays
gccagttgatgcatggcaacaagtggccatggtcacatgcattgcacttggatatacataatggatggatgccacttgtggcttgtccgaatccaaacccaaggttggttggaaggacgccagcggcatgcatatgcgctggctagtctaatacatctgctgcttattgtgcccgcagaactactcgtccatcctcaccgtccaccccgaggtcatcgacggccgaccggggacgctcgtgatcgagtccttcgtggtggacgtccccgacggcaacaccaaggacgagacctgctacttcgtggaggccctgctcaagtgcaacctcaagtcgctcgcggaggtgtccgagcgacaggtcgtcaaggatcaaacggagccccttgaccggtgatgggggagatacatacatacatgtcgaacgatatgttcggatcactgcattgcattgcttacgatgtgcagagctaatcttcaacggagcccctaggttcctggagaaaagagctttgagggactgctactgctactgctatgccgcgtcgttcaaagttaagtttcctccttgcgattgtgtttgctgtccttttctccggcgttgtacgtcgcacaaggagaaggacaggcagaatatgatgtgctattgtagtattgaaaaatgaaaggaaaaaaagaactgtgaggctctgaacat

SEQ ID NO: 131692 - DNA, 1910 bp, Zea Mays
aggcaggcggtagcggaatctggcaccggccatcacgtcccctcccgccgcttcctcctccctgccctacctttccccagatccgaatccattaaaccagcggatcttgcatcggggcgcgtccacggcatccgggcaagcgagtggtggagccagcagccatgagatggtatgcatcggtagcctcctgagggcgctggtgctgcgtgcggcgtcgtctgcgggcaggcgccgggggcccaggattctgtgtggccgcgcgacggatgtgcgcgtgacgccacggcacggacacggctggcgcgggttccgggcggtcacgggaaggatgatgctggactcctctgagtctgcctcttccgccgccgccgccgccgcggaggcgggagctggggcggtggcaggccaggcgcagccgcagcgccgcgcggtgggggccgtgccccaggcgcacgatggtggctacgccagcggcggatgggagagagaagatggtaaactgagttgtggatactcaagttttagagggaagagagctacaatggaggatttctatgatgtaaaactaactgaaattgatggacaagctattagcctgttcggtgtttttgacggtcatggtggatcacgtgctgctgagtatttgagggagcacttgtttgagaaccttctcaagcaccctgatttcttgacggatacaaagcttgctataagcgaaacatatcagaaaaccgatacagatttcttggaatcggaagcaagtgctttcagagatgatggttcaacagcttcaactgcaattttggtgggtgaccgtctgtatgttgcaaatgttggtgattctcgtgctgttatttcaaaagctggcaaaggtattgcatactggaagtaggtatcttaagtagtgtatttgtgtttcatttccatgtcacatttgtcagttgatgtatggtctctggtctgttgaatctaaatcacaaagcaaaatcttggcatcgctctgtttctcataccaatatataatccataaacctttgttgtagttaatacagaaccatccatgacagtttggttcgtagggtttctcattgaatctgtgtaattttgattctgtgccaccctgtgacaaaatgcctgacagttcatctgtttgtttttttatagctatggcactttcagaagatcacaaacctaacaggattgatgagcgaaagagaatagaaaatgctggtggtattgtcatttgggctggtacttggagggtaggtggtgtattggcgatgtctcgtgcatttggcaatcgtttactgaagccatatgtggtggcggaacctgaaattcaggaagaacagttcagtgatgagctggaatgcctggttctcgctagtgacgggctttgggatgttgtggaaaatgaggaagccgtttcccttggcaaatcagaggacacgccagagtctgcagctcggaaattgacagagatcgcttattctcgtggcagcgctgacaatatcacgtgtatcgtggttcaatttcaccatgacaaaaccggatgagccatgtggcggccaatttcagttgtaccctgcttcaggctattattatcctgcaagccgggtggtggggcttctctcagatttatcgctcttgtagcaacttccaagaactcgtccattgattcttttgttgtcttgtaggaaacatttgttccaacaggtgtaatagatattttcaatgggttaatttctaataaaactatgtttacaattactgtttagtggaaattggttatcctcttgcctttgatactagatgataagatgatttgcaaccagtatgcaatgggccgttaccgtgtatccctattctcgaacggagcaatcgactcagccctgtttgtctggatctag

SEQ ID NO: 131693 - DNA, 1671 bp, Zea Mays
gttccttgaaaaccggtgcctttttctagcggcgaggaggcaggcggtagcggaatctggcaccggccatcacgtcccctcccgccgcttcctcctccctgccctacctttccccagatccgaatccattaaaccagcggatcttgcatcggggcgcgtccacggcatccgggcaagcgagtggtggagccagcagccatgagatggtatgcatcggtagcctcctgagggcgctggtgctgcgtgcggcgtcgtctgcgggcaggcgccgggggcccaggattctgtgtggccgcgcgacggatgtgcgcgtgacgccacggcacggacacggctggcgcgggttccgggcggtcacgggaaggatgatgctggactcctctgagtctgcctcttccgccgccgccgccgccgcggaggcgggagctggggcggtggcaggccaggcgcagccgcagcgccgcgcggtgggggccgtgccccaggcgcacgatggtggctacgccagcggcggatgggagagagaagatggtaaactgagttgtggatactcaagttttagagggaagagagctacaatggaggatttctatgatgtaaaactaactgaaattgatggacaagctattagcctgttcggtgtttttgacggtcatggtggatcacgtgctgctgagtatttgagggagcacttgtttgagaaccttctcaagcaccctgatttcttgacggatacaaagcttgctataagcgaaacatatcagaaaaccgatacagatttcttggaatcggaagcaagtgctttcagagatgatggttcaacagcttcaactgcaattttggtgggtgaccgtctgtatgttgcaaatgttggtgattctcgtgctgttatttcaaaagctggcaaaggtattgcatactggaactatggcactttcagaagatcacaaacctaacaggattgatgagcgaaagagaatagaaaatgctggtggtattgtcatttgggctggtacttggagggtaggtggtgtattggcgatgtctcgtgcatttggcaatcgtttactgaagccatatgtggtggcggaacctgaaattcaggaagaacagttcagtgatgagctggaatgcctggttctcgctagtgacgggctttgggatgttgtggaaaatgaggaagccgtttcccttggcaaatcagaggacacgccagagtctgcagctcggaaattgacagagatcgcttattctcgtggcagcgctgacaatatcacgtgtatcgtggttcaatttcaccatgacaaaaccggatgagccatgtggcggccaatttcagttgtaccctgcttcaggctattattatcctgcaagccgggtggtggggcttctctcagatttatcgctcttgtagcaacttccaagaactcgtccattgattcttttgttgtcttgtaggaaacatttgttccaacaggtgtaatagatattttcaatgggttaatttctaataaaactatgtttacaattactgtttagtggaaattggttatcctcttgcctttgatactagatgataagatgatttgcaaccagtatgcaatgggccgttaccgtgtatccctattctcgaacggagcaatcgactcagccctgtttgtctggatctag

SEQ ID NO: 131694 - DNA, 1662 bp, Zea Mays
gataatagttccttgaaaaccggtgcctttttctagcggcgaggaggcaggcggtagcggaatctggcaccggccatcacgtcccctcccgccgcttcctcctccctgccctacctttccccagatccgaatccattaaaccagcggatcttgcatcggggcgcgtccacggcatccgggcaagcgagtggtggagccagcagccatgagatggtatgcatcggtagcctcctgagggcgctggtgctgcgtgcggcgtcgtctgcgggcaggcgccgggggcccaggattctgtgtggccgcgcgacggatgtgcgcgtgacgccacggcacggacacggctggcgcgggttccgggcggtcacgggaaggatgatgctggactcctctgagtctgcctcttccgccgccgccgccgccgcggaggcgggagctggggcggtggcaggccaggcgcagccgcagcgccgcgcggtgggggccgtgccccaggcgcacgatggtggctacgccagcggcggatgggagagagaagatggtaaactgagttgtggatactcaagttttagagggaagagagctacaatggaggatttctatgatgtaaaactaactgaaattgatggacaagctattagcctgttcggtgtttttgacggtcatggtggatcacgtgctgctgagtatttgagggagcacttgtttgagaaccttctcaagcaccctgatttcttgacggatacaaagcttgctataagcgaaacatatcagaaaaccgatacagatttcttggaatcggaagcaagtgctttcagagatgatggttcaacagcttcaactgcaattttggtgggtgaccgtctgtatgttgcaaatgttggtgattctcgtgctgttatttcaaaagctggcaaagctatggcactttcagaagatcacaaacctaacaggattgatgagcgaaagagaatagaaaatgctggtggtattgtcatttgggctggtacttggagggtaggtggtgtattggcgatgtctcgtgcatttggcaatcgtttactgaagccatatgtggtggcggaacctgaaattcaggaagaacagttcagtgatgagctggaatgcctggttctcgctagtgacgggctttgggatgttgtggaaaatgaggaagccgtttcccttggcaaatcagaggacacgccagagtctgcagctcggaaattgacagagatcgcttattctcgtggcagcgctgacaatatcacgtgtatcgtggttcaatttcaccatgacaaaaccggatgagccatgtggcggccaatttcagttgtaccctgcttcaggctattattatcctgcaagccgggtggtggggcttctctcagatttatcgctcttgtagcaacttccaagaactcgtccattgattcttttgttgtcttgtaggaaacatttgttccaacaggtgtaatagatattttcaatgggttaatttctaataaaactatgtttacaattactgtttagtggaaattggttatcctcttgcctttgatactagatgataagatgatttgcaaccagtatgcaatgggccgttaccgtgtatccctattctcgaacggagcaatcgactcagccctgtttgtctggatctag

SEQ ID NO: 131695 - DNA, 689 bp, Zea Mays
tttttttcaagtcatcatttttttctttgaatgataaacatatcatcttcccaggtacttggagggtaggtggtgtattggcgatgtctcgtgcatttggcaatcgtttactgaagccatatgtggtggcggaacctgaaattcaggaagaacagttcagtgatgagctggaatgcctggttctcgctagtgacgggctttgggatgttgtggaaaatgaggaagccgtttcccttggcaaatcagaggacacgccagagtctgcagctcggaaattgacagagatcgcttattctcgtggcagcgctgacaatatcacgtgtatcgtggttcaatttcaccatgacaaaaccggatgagccatgtggcggccaatttcagttgtaccctgcttcaggctattattatcctgcaagccgggtggtggggcttctctcagatttatcgctcttgtagcaacttccaagaactcgtccattgattcttttgttgtcttgtaggaaacatttgttccaacaggtgtaatagatattttcaatgggttaatttctaataaaactatgtttacaattactgtttagtggaaattggttatcctcttgcctttgatactagatgataagatgatttgcaaccagtatgcaatgggccgttaccgtgtatccctattctcgaacggagcaatcgac

SEQ ID NO: 131696 - DNA, 1633 bp, Zea Mays
gataatagttccttgaaaaccggtgcctttttctagcggcgaggaggcaggcggtagcggaatctggcaccggccatcacgtcccctcccgccgcttcctcctccctgccctacctttccccagatccgaatccattaaaccagcggatcttgcatcggggcgcgtccacggcatccgggcaagcgagtggtggagccagcagccatgagatggtatgcatcggtagcctcctgagggcgctggtgctgcgtgcggcgtcgtctgcgggcaggcgccgggggcccaggattctgtgtggccgcgcgacggatgtgcgcgtgacgccacggcacggacacggctggcgcgggttccgggcggtcacgggaaggatgatgctggactcctctgagtctgcctcttccgccgccgccgccgccgcggaggcgggagctggggcggtggcaggccaggcgcagccgcagcgccgcgcggtgggggccgtgccccaggcgcacgatggtggctacgccagcggcggatgggagagatggtaaactgagttgtggatactcaagttttagagggaagagagctacaatggaggatttctatgatgtaaaactaactgaaattgatggacaagctattagcctgttcggtgtttttgacggtcatggtggatcacgtgctgctgagtatttgagggagcacttgtttgagaaccttctcaagcaccctgatttcttgacggatacaaagcttgctataagcgaaacatatcagaaaaccgatacagatttcttggaatcggaagcaagtgctttcagagatgatggttcaacagcttcaactgcaattttggtgggtgaccgtctgtatgttgcaaatgttggtgattctcgtgctgttatttcaaaagctggcaaagctatggcactttcagaagatcacaaacctaacaggattgatgagcgaaagagaatagaaaatgctggtggtattgtcatttgggctggtacttggagggtaggtggtgtattggcgatgtctcgtgcatttggcaatcgtttactgaagccatatgtggtggcggaacctgaaattcaggaagaacagttcagtgatgagctggaatgcctggttctcgctagtgacgggctttgggatgttgtggaaaatgaggaagccgtttcccttggcaaatcagaggacacgccagagtctgcagctcggaaattgacagagatcgcttattctcgtggcagcgctgacaatatcacgtgtatcgtggttcaatttcaccatgacaaaaccggatgagccatgtggcggccaatttcagttgtaccctgcttcaggctattattatcctgcaagccgggtggtggggcttctctcagatttatcgctcttgtagcaacttccaagaactcgtccattgattcttttgttgtcttgtaggaaacatttgttccaacaggtgtaatagatattttcaatgggttaatttctaataaaactatgtttacaattactgtttagtggaaattggttatcctcttgcctttgatactagatgataagatgatttgcaaccagtatgcaatgggccgttaccgtgtatccctattctcgaacggagcaatcgac

SEQ ID NO: 131697 - DNA, 366 bp, Zea Mays
atggcgctgggatccttccttccggcggccgtgctcttcatgagcgctctgctcgagctctgccgaacctgctatttccctgcgtgcggccgcggcaaatggacctgctcctcctatctttcccaccaaaacagcaagcccccaccgcgtccagccccgtcgacgctcaccgggtgtttgctgtttttggcccagacccgctcgcgacgtcgtcgaccctcgtgtcgacgatatgccaagtccctaaactcgtgtattatcgcagccaccgtcaaagtcgcgctccgcgccttgcagttcgacgaaatgccgagccatgtggaccatgcggctaaatcccgactcgttcaggttgaatccatgtga

SEQ ID NO: 131698 - DNA, 678 bp, Zea Mays
atggcgcccagctcgcccagctccgatgatgcccaactcccagctttccccctcagttcgctcttccctggccacgcgagctcagagccctccctgctcccgatctccatagccgcgcccctcaagctcggcagagagctttcttcctccctcgtccgcggctctctcctggcgcctggggccgcgcgagcagccctccgctcggctctgctcctccctgctcgcgtcaaccagctcggaccgagcgttctgacgttcgcttgccgtagtgcttcttccccagcgcgtcctctgccgcccgccaaggtggtggcgcccatctccctggccctggctcggatcccgctcggcgccttgactcctgctcccctcgctgcatcgtccctgcccatttccctcctcggcaaactcccctgcgagctccagctcggtttcttctcccttgccgctcggttcttgcgtctttcccctgtgcgctcgacctccggctccggcgtcgagctctgctttggtgtattgggaggttcgagtggcgctgatgggttctctgatggcacacctggtggtggtaccttgctgctaggaggtagcgacagctttggcaacagtaacgttggtgctcgccaggcgctcaacaaaacacctgaaaccaaagttcgtcgtcatcgttctcgctga

SEQ ID NO: 131699 - DNA, 82 bp, Zea Mays
gctgcatcttcctcatgaccctgctccactatgtccctcccaggagttcggcagctcggtcgcttgctcctctccgccgctc

SEQ ID NO: 131700 - DNA, 201 bp, Zea Mays
atgggaggtgggagctcggctgcaagggcgctagggtgggacgaccgagcagaggagcgcagcagggaagaagcgcgtgagaaactccacggcaagacgcggcggtcatgggtgacggctggagaggaggaaatgaagttgggcacaccagaggctacgaccagcgaccaaagaagcgagctccagggcgcaattggatag

SEQ ID NO: 131701 - DNA, 104 bp, Zea Mays
gtttattcgagtatttgtgttggtccgcactcctatctcctatctacagctactgctatcaattcctattcccagtttgtttcctctatcccttcctaaagtgg

SEQ ID NO: 131702 - DNA, 114 bp, Zea Mays
tgctttattttctttctttggtttaggcgttccattgcctcaatcttcaccattggtacaagatcccctcaagaactgctgtttttagaacgttcaatctgagtagaggctgag

SEQ ID NO: 131703 - DNA, 562 bp, Zea Mays
atggtgaatgtgaaggatgtggatagaatgcgtagagagatgcaggctattgaagatgacattgccaacgccgagaaggggaaagcagcactggaggataaggtctgggaagttgaagctaagctggttaccaagcttgaggagcttgagaggcatgctgatcagtgcaaccaggccctcaaaaagttgaaacctactgttgcttttcagtacatgatagattcaaaaggatcttctcctgctgagatgctagggatggacttccacgaactgatcgagatcccacacgacaaccgacggcggtaccacgacgacgtatctgtcattgtaatatcctttgagggcaggatctggaggtcatgcgtgtaaataggtcggccatactagattagagaaagaaacgtatatatctggagggcaggatctggaggtcattgtacagagtatgtttgtatcctttccacatcactggcagtaagaaattatatcggggtgacataaaaagattataacgcttgttatgacataataagttactagatagtaaaagagaatttgcaca

SEQ ID NO: 131704 - DNA, 1820 bp, Zea Mays
cagtctagggctctagcatccccaatcccatcggtcagcctcatccatccgcagggcgccggcggcgggagtcttgccggccacatcgtcgccgatttcaccgatccgagctccggcctcttagccatggaatctccacgaactctggaagccctcaccaacgacctcgtggtggagatattcctccggatcggctcccctgccgacctcgttcgcgcctccgccgcctgcgtcgccttctgccgtctcatcgccaacccctccttcttgcgccggtaccgctccgtccacccgccgctacttctcggcctcctcgacccttatggcgatatcgaacccaccgagacaccccatccctccgctgctctcgctggcgccgtcgctcgcgccgctgacctccgcttcggcgagtattttcctagcagcaagttatccggctattgtgtctctgacgtccgagacggtcatgtcctcctcaccatcacgccctaccttgaggacgacgaggatgagaagttggtgccagacctcgcggtgtgcgaccccctggcccgtgtatgcctgcgactgccccccataccagacgaccttctcgcctccgtccaggttcagcagcaagatctcgtacattatagttgcgatacattccttgtcccttcaggagatgaagaagatgtcacttcttttagagtgatcgtcatgatgagatctacacagatgctagtcgcttttatcttctcttcaaccactggtgattggagtgctggttcacctttcagcctgggttctctgagaataccatacgacaacattccgagttatgcttatggctgcttctactggaaagtcgagtctgagaacaggttgctcacgctcaacatgagcagtatggagttctcagtcgttgacctcccacctgggcccgataggagtttcgtcatcatggtggaggcaggcgaaagcaggcttgggatgtttagtctaattaaccatggtaccactctctgttatgccattaggcaaattgggagcgagaagtccaatcagttggagatggacagtgtgatccctttacctgagggttatatttactttcgcattcacggttcatatgaaggacacattctcatatttggatacgcgtttagtgaagacgcatgcttcgcacttgagatcaagactatgaagattgagagagtctgtcggaagtggcgtggtttctgtccttattttgtgttcctgccatccatgtcacaaaggaggatataatgtggactgaattcacatccaggtttggggcttcttccaatccattctgctggtgtggagttgagctaggtgatggcacaggccctcatgtagatgtagcacatctgcaacactgtcccatgttatcctcctagtctgtcgtattgtctagcttacattagtagctactgaaactttagttatatctatatttttaagttctcccgactgtaatttaagatgtgacaaaggcgtctttagtgtatcaagagccaacttttataagccggctctgtgtgctgcgaaatcacgtgtttgctagtcttgtgtagaattatcatgccagcatcatcagacatggtacggtcagcatgtttctcacttgagactcagagagaggtgtccaaaagctattggacaaggaggaatagttaagcttggcttaacattcatctccgtgatccttccacctggactcttttctgtgcttctctcttgaaaacctcatctgaggttgggttaatggatcaggtggaggtcctccgcgtgctcagcctgacaattggtcaata

SEQ ID NO: 131705 - DNA, 1433 bp, Zea Mays
aatttagcggccgcgaattcgcccttcgcggcggaatcgatggaggcggcagccaaggggaggtaccacgcgctcttcaactttggggactcgctagccgacgctggcaacctcatccagaacggcaccccggagatcctggccaccgcgcgcctgccctacggccagacctacttcggaaagcccaccggccgctgctccgatggacgtctcgtcatcgaccacctcgcgcaagagttcggcctgccgctgctgccgccgtccaaggccaagaacgccagcttcgcgcacggcgccaacttcgccatcaccggcgccaccgcgctcgacacgccctacttcgaggccaaggggctcggtgccgtcatctggaactccggagcgctcatgacccaaatccagtggttccgtgatctcaagcctttcttctgcaacaccacggaggcatgcaagaaattctttgcgaaggcgctgtttgtggtgggtgagtttggaggcaacgactacaatgctcccctctttgcgggcatgggcatccctgaggcctacaaattcatgcccgatgtcatacagggcatctctgacggtattgaggcactgattgctgagggggctgttgagatgattgtgcctggtgtcatgcccacgggctgcttcccagtttacttgaacatgcttgatgagcccaaagaaggatacggcccccacagtggttgtgtccgccggtacaacacattctcctgggtgcacaatgcacatcttaaggccatgcttgagaagctccgggctaagcaccccaatgtgaggatcatatatggcgattactacactccagtcgtccagttcatgcttcagcctgagaagtttggttttgccagacaactgcccagggcatgttgtggggcgccatcgactcctgagagagcagcttacaacttcaatgtcacggccaaatgcggtgagcctggtgcaactgcctgtgctgatccgacaacccattggagctgggacggcattcacctgacggaggctgcctaccgccatatcgccaaaggctggctatacgggcctttcgcggaccaaccgatcatccaatcctcatgatcatgccgttcctgcggtagagtttatcaaagtagcattgagagtgagagaaaaaaaatggagcggggaaagtaggtcttccatacagttccaatgcttgcatacttgtacatctccatttgattgtattcatttgccatgggggtacaaaggtgggatagtaggtcgcacaaaggcctgatttcttgatttgtcaggttggggggtataaatatgaaagttgttacgcacagataatcatgtatattgtgtcccggaaatgtgttacagattctgctcgagcagcttctgattctctgattaaaggtgtgccttttttcgcgattctt

SEQ ID NO: 131706 - DNA, 2792 bp, Zea Mays
atggcttccgaccctcccggcgacggcgccggcggggaagagccgacgccgggccctgcccccgccgtggaggtgcttgctgctcccgccgttccgctcaggccgcgctgggccacggagatcaaggtctacacccgtaagcacccccgcaaaacccctaaacctcctccagaaccagctcccgcccccgcctccgtccctgcccctgcccttgctcctgccccggccccgaatcccctttccgaaaccttatcctcgattcgtcgctccatccgccgcgcggacacggttggcgctgcggcgcggcccgatccggcagcgccggcctcggttcccgcccgggggccacctggggaacgcggtgccgcctcgggggacccctcatctgaggtgaaccgtgtcggcggcggtatttctaacggccacggcgacgaccgggcggcggccgcggctgagaagtctgagaaagcacggaaacgcagggtgaggagtgagttgcggcgccgactggcgggggagctcgaccaggtccgcgtgctctccaagcggctgaaggaggctgccgaggccctggcgcagcaggaggcttctgagcctgcgcctttgcccatggtggtgctgccaacacagcagcaggtggtggatgctgggtatgtgcaactgcagttctcagctggtgatatggcggtgcccatgtctgctcagattgcagctgctgttactcctgcccgttccatgctgcagcgcagaccactaaccgtgtcggttgttcataatgaagcctttgagaaggtgaagcggacgccaaaggccaatcaattgtaccaaaattcggagttcttgcttgccaaggataggatccctccctcagattcacatgtgcgcaagaaatctaagcaccacaagaagaagcataggtccctagaatctcgtggcgcagactttgatgctgagcggcggctgtactctcatgcgttcaagaagtcctcgtcacttctaagccgtttaatgaagcacaagtttgggtgggtgtttaataagcctgttgatccagttgcacttggtttgcatgattattttactattatcaagcacccaatggatcttggcacgataaggggacggcttagccgcggacagtacaggaacccgaaggagtttgctgaggatgtccggctcactttccataatgcgatgacatataatcccaagggtcaggatgtgcattttatggcagagcagttgtcaggaatcttcgaggcacagtggcctgagattgaggctgaggttaactaccttgcatcgtgtcctccattgccgaagaagtttccacctccaccaattgacctgcacttcctagagaggtcagattcgatgagacaccacatggcattggacaccaattcaagaccgatcagtcatactcccacttacacccggactccatcaatgaagaaaccaagggcaaaggatccaaataagagggacatgacaatagacgagaagcgtaagcttagtgagaacctgcagaatttgccacctgagaagcttgatgctgttgtgcaagtcattaagaacaagaacctatcagttatgcagcatgatgatgagattgaggttgaaattgatagtatggatgctgagacactttgggagcttgaccggtttgtggccaactacaagaagaacctgagtaagcaaaagaggaaggccgagcgagcgatgcttgccagacaagatgcagagttgcgtgcgcagcgccttatacaacaaccgcaaccaaccccagtcccccaagaacctgttggtgaaaaatctctaaagcaagttgcaaaagattcactggcaggtgagcaactaccaacatctgcatcagagaaaaacgacgagaatagacagaacgtgagtggttcaagcaattcaagcagctccagcagtgactcaggatcatcgtctagtgactcagacagtgatagctcctcttcagatggatctgatgctgccaattcatcttgagatataggttcacaagttctgtcgagtagacaataactgtctatttgacatgacattggcaccataagactgtacatgcttaccttgtctggcttaggaaaccccctgtattttaagtagctttgtatgtggattcaccagctggaggcagtaacttaggtttcatggtgtacccgcctaataagactaggcttgttgctgacaccgtgtctttgtacaccgcactgttgctaggagctctcggttggctcagtagcctgtacattagcggcagcttgcacattgattctgtttagctgtgttgattgcagtatgtaggaaggcgattgccgtaagcattgtttcttccatctgttaactgactgatgaaagcattgacaaagccccgttggtgttcagtttgccaccatctttctgtggactacctgtaaccgctgtgggttcatcgccatgtgccaagtctttttgatgttgtaaattaaagtttgttgatgcatctgatgtttagcatcacgactattgacggtccgttcttatgttctgatttgaggaatgtttgcttggaagatggcttgttgacttaactgtctgtgtagcagcagttcggacctttgggtaggtagcaggtagccttccctccgctggtgactggtgtggtgagatggtttgtatgttgctggctgtgattgtaatatgctgttgtgccttgtcctttgaggtctgcaaaggaaaagtgaattctataggaaattttctatgtggtcttttggaacaaa

SEQ ID NO: 131707 - DNA, 2754 bp, Zea Mays
atggcttccgaccctcccggcgacggcgccggcggggaagagccgacgccgggccctgcccccgccgtggaggtgcttgctgctcccgccgttccgctcaggccgcgctgggccacggagatcaaggtctacacccgtaagcacccccgcaaaacccctaaacctcctccagaaccagctcccgcccccgcctccgtccctgcccctgcccttgctcctgccccggccccgaatcccctttccgaaaccttatcctcgattcgtcgctccatccgccgcgcggacacggttggcgctgcggcgcggcccgatccggcagcgccggcctcggttcccgcccgggggccacctggggaacgcggtgccgcctcgggggacccctcatctgaggtgaaccgtgtcggcggcggtatttctaacggccacggcgacgaccgggcggcggccgcggctgagaagtctgagaaagcacggaaacgcagggtgaggagtgagttgcggcgccgactggcgggggagctcgaccaggtccgcgtgctctccaagcggctgaaggaggctgccgaggccctggcgcagcaggaggcttctgagcctgcgcctttgcccatggtggtgctgccaacacagcagcaggtggtggatgctgggtatgtgcaactgcagttctcagctggtgatatggcggtgcccatgtctgctcagattgcagctgctgttactcctgcccgttccatgctgcagcgcagaccactaaccgtgtcggttgttcataatgaagcctttgagaaggtgaagcggacgccaaaggccaatcaattgtaccaaaattcggagttcttgcttgccaaggataggatccctccctcagattcacatgtgcgcaagaaatctaagcaccacaagaagaagcataggtccctagaatctcgtggcgcagactttgatgctgagcggcggctgtactctcatgcgttcaagaagtcctcgtcacttctaagccgtttaatgaagcacaagtttgggtgggtgtttaataagcctgttgatccagttgcacttggtttgcatgattattttactattatcaagcacccaatggatcttggcacgataaggggacggcttagccgcggacagtacaggaacccgaaggagtttgctgaggatgtccggctcactttccataatgcgatgacatataatcccaagggtcaggatgtgcattttatggcagagcagttgtcaggaatcttcgaggcacagtggcctgagattgaggctgaggttaactaccttgcatcgtgtcctccattgccgaagaagtttccacctccaccaattgacctgcacttcctagagaggtcagattcgatgagacaccacatggcattggacaccaattcaagaccgatcagtcatactcccacttacacccggactccatcaatgaagaaaccaagggcaaaggatccaaataagagggacatgacaatagacgagaagcgtaagcttagtgagaacctgcagaatttgccacctgagaagcttgatgctgttgtgcaagtcattaagaacaagaacctatcagttatgcagcatgatgatgagattgaggttgaaattgatagtatggatgctgagacactttgggagcttgaccggtttgtggccaactacaagaagaacctgagtaagcaaaagaggaaggccgagcgagcgatgcttgccagacaagatgcagagttgcgtgcgcagcgccttatacaacaaccgcaaccaaccccagtcccccaagaacctgttggtgaaaaatctctaaagcaagttgcaaaaggtgagcaactaccaacatctgcatcagagaaaaacgacgagaatagacagaacgtgagtggttcaagcaattcaagcagctccagcagtgactcaggatcatcgtctagtgactcagacagtgatagctcctcttcagatggatctgatgctgccaattcatcttgagatataggttcacaagttctgtcgagtagacaataactgtctatttgacatgacattggcaccataagactgtacatgcttaccttgtctggcttaggaaaccccctgtattttaagtagctttgtatgtggattcaccagctggaggcagtaacttaggtttcatggtgtacccgcctaataagactaggcttgttgctgacaccgtgtctttgtacaccgcactgttgctaggagctctcggttggctcagtagcctgtacattagcggcagcttgcacattgattctgtttagctgtgttgattgcagtatgtaggaaggcgattgccgtaagcattgtttcttccatctgttaactgactgatgaaagcattgacaaagccccgttggtgttcagtttgccaccatctttctgtggactacctgtaaccgctgtgggttcatcgccatgtgccaagtctttttgatgttgtaaattaaagtttgttgatgcatctgatgtttagcatcacgactattgacggtccgttcttatgttctgatttgaggaatgtttgcttggaagatggcttgttgacttaactgtctgtgtagcagcagttcggacctttgggtaggtagcaggtagccttccctccgctggtgactggtgtggtgagatggtttgtatgttgctggctgtgattgtaatatgctgttgtgccttgtcctttgaggtctgcaaaggaaaagtgaattctataggaaa

SEQ ID NO: 131708 - DNA, 1557 bp, Zea Mays
gcaggacgctgtcttcctttctccatcggatccatggtctcttttctcagccctctcagtctcacacaccacaccagagcagcgcagccgagcatgcactcatcacatcagctcctcgtctcctagctttcctattcctgccttgataattggccaattgttcgatctccttctttactaccccctttgctttcgttgctgctactactactgttccatctcctaggtttcgttgttgtccctgcaggccgccactgagtgatttgttagcagataagatttagatctcccagataaaaaaaagaggttgagaggagagctagcactaggcactagcaagcctgctgtgaggtgaatatggatccagtcgcagcatccatacacggtcatcatcttcctccaccgttcaacacccgggacttccatcaccatctccagcaacagcagcagcagctcaagaccgaggacgaccacggcagcggcgcgccaggactgttcggcagccgcggcaccaagggcgaccacgagaataatgaccagaacagtggaaacagcaacggaagtggcggaggaggaggcgacgagctggcgctggttccaccatccggcgccgggccagagggtggagagcccaccctacgccgcccgaaaggccggccggcggggtccaagaacaagccgaagccgcccatcatcatcacgagggacagcgccaacacgctccggacgcacgtcatggaggtggccagcggctgcgacatctccgagagcatcacggccttcgcgcgccgcaggcagcgcggggtctgcgtcctcagcggcgccggcaccgtgaccaacgtcaccctgcggcagccggcctcccagggcgcggtcgtcgccctccacggccgcttcgagatcctgtccctctccggctcctttctcccgccgcccgcgccgcccgaagccacggggctcaccgtctaccttgccggcggccaggggcaggtggtgggcggcagcgtcgtcggcgcgctgacagcagccgggccggtggtgataatggcggcatctttcgccaacgcggtgtacgagcggttgccgttggaggaggatgacatgctcgctgcgcaagcacaggccgacagtgcaggaattctcgcgggtgcgcagctcgccggcgctgtggatccaagcctcttccagggactgccaccgaacctgatgtgcaacgtgcagatgccgccagaagcagcctacggatggagcccgggcgccgccggtggccgtccggcgccgttctaataactgataagagcgcgcacgcggcttagatatggttaagtgatttagctttcttcttcgatcttttgcttgaatttttatcgtggagaatttccgtgggaattgcatatgatttcgcatgttaattagtaagctatcttaatactgtttcagaatatgtagctcgatttctgccatttcgtttcgctattccttgtgtcgtcgtaactcttgttcatgttgttgacttgaagccgggttttgttccttatcaaaatcatctcctttttc

SEQ ID NO: 131709 - DNA, 363 bp, Zea Mays
ctaaatatatgtttaatgtgcaagtggtggtggaaacttgaaaaggataaggggatttggcaagaaattgtgaataataaatacatccatggtaatagtatccttaatattggccccagggtgggtgaatctcaggtgtggagtgatatgcttaaagttagagagtattacatgcagggaagacacattattacgcagtctggtgataagtctagattttgggaagattcttggcttcttgaaactcctcttgctatatctaaaccatacttgtttgatatttgtaatgacaaaaagattcttgtgattgatgtcattgagaaaaatgcccaacttgatttcagaagatggatcagtgatgat

SEQ ID NO: 131710 - DNA, 1141 bp, Zea Mays
gtgtgccacagcccacagccttgaacatgtggtgctcgcaggccggtcgcttcgcctcaaccaatcaccggcagcctcccgcgccacccggcgcaaagataaagttaggctcggcaccgggggctcatccgcaagcctgtggacgcgagtgagtgaacaccagccgtattgtcccgactcctgacccctaccgatcctcgcctgctgcagccatggcgacctccgcggcgctctccaccgccgccaatcccacccagctctaccggtcccgcgcttcgctgggcaagccggtgaaggggcttggcctgagcatgggccgcgagcgcgcccagcggagcattgtgtgccaggcggcgagcagcatctccgccgaccgcgtccccgacatggagaagcggaagctgatgaacctcctcctcctcggcgccatctcgttgcccaccgtcggcatggtcgtcccctacggcgccttcttcgtccctgccggctccgggaacgccggcggcgggacctacgcgaaggacaagctgggcaacgacatcacggtggaggcgtggctcaacacgcacggtcccaacgaccgcacgctcgcgcaggggctcaagggtgaccccacgtacctggtggtggagcaggacaagacgctggccacctacgggatcaacgccgtgtgcactcacctcggctgcgtcgtgccgtggaacggcgctgagaacaagttcatctgcccctgccacggatcccagtacaacaaccagggcaaggtggtccgtggaccggcgcctctgtcgctggccctggttcacgccgacgtcgacgacggcaaggtcctcttcgtcccgtgggtggagaccgacttcaggaccggcgaggacccatggtggaaggcatgaggatgatccggaaccagcggtgctcagtgctcacacatgagacctatgtatgcctccgttccttgtgatgaggaaataggcttgcgttcgttctccgtgggcgttgttcctacaaattcacttgctctttgtctctctctatatatacacactgtataaaacaagaacacctgtttatcatctcttcttatataaccttttgaacactgtgaaatctgcgagaatggaaagactttcaatactaccag

SEQ ID NO: 131711 - DNA, 539 bp, Zea Mays
ccacgacagatcacctctctctcctcgcctcctcgcgtccaccttcagagcaccgtccgcacaccttagagccatccatcctagatggcggttctcagcagtctcggcggctgcggctgcggctgcgacaaggagaacgcgccgccgccgtcgtctgccgcgcgtggcatcgtcgtcaagcgccaggcgatgaagagatcgggcgggggcagcaaggcggtgccgcgtcggcggacgcccctccgcgacatcacccggctcttcgtcaccgcccagtgcccgcctccgtcggccgttctgctggtgctctctgacgcggcgctgccggaggccgtgcgcccgggcgctggcacttctgacaggatcgccgtgaggcaggcaagccactctctcaggatggggttcagatagcgcgccgcccggatcgggaggcgatggcgaaatggcccaccgttctttgattttttttcacgtatcctgtcggatgcgcagcggattcagttgtttggcgaggcgtggattgttgtcatacacatacg

SEQ ID NO: 131712 - DNA, 319 bp, Zea Mays
gagattttttaatatgttcagcaaatagattcggatccaaatatttcaatcgcttatcatatattatttactgtgcccttgacgtgactgtggcatcgactgagataagctttgtaaagttgaaattgttgaagaactatttaaggtcaatgatgtcttaagaccgtctcaatggattgactactttatgtattgagagaaattattagacgaggttgatagtaaaactattatcaatgacttcgcatcaagaaatgttagaatttttttgaggtaatatgtacaaagatttgaagttgttttgatacattatagactt

SEQ ID NO: 131713 - DNA, 599 bp, Zea Mays
atgagcgtcatgtccgcggtggatgggtcgccggggactccgccgccaccgggccaccgtgggtgctgcgcctccggcgcgacgctggagctggtgggcgcgttcacggcggtgtgcctggtgctgtacggcgtgatcctgtacatgaactacctctacgtgcggtggagcggccgcgacggcgtgcaccggacggactccggcgcaggcgggctgcccgcacggaagcgggccggcggcgggatcgacaaggcggcgctggctgccatgccggtggtcaggttcaaggcggacgctcactgcggcggcgactctcctgtggagtgcgcggtgtgcctgagcgccatgcaggacggggacgcggtgcgcgcgctgcccggatgccggcacgcgttccacgtcacctgcgtcgacgcctggctctgcgcacgcgccacctgccccgtctgccgcgcgcgccccgcgctcccgccgccgcagcaggcgcccaaggccggcgccatggtggcggggtcctccggccggcacccggacctggagagccaagtgtagcagcaccccacccctcgcgcgccagggcgaactgcgaaggtaggtag

SEQ ID NO: 131714 - DNA, 523 bp, Zea Mays
ctcaagttctagctaaaggagtatggattccttgtgctactgctgatgtaaccctcttctctgtcccaagatcgagttgctccagagcctggcacaccatcaccagtgtggtgaccaagtccacccgaatgctcatctcaccttggccagggttgcatgcccaggcgacacttgttatgtggtctctagtggtcagtgaagctcacgcattgacgcaaatcagcttttgaactctaccattgtcaggtgatcggaacagggttgtgccgccgcagatgggcgccacagacagcttcaccgccgaccgggtgactcacgctttctccggccgattcctcgcgagcaccgaagtttaggtgatcaggagtattcttggtgtccctgtggctagaagatgcttctagttttgaaggatgattagttaggtgtgtttgtgagccttggaagggttctgccttcctggttttgtaattaagttatgcatttcaagttctatcaggacttgtaataattctttctatgt

SEQ ID NO: 131715 - DNA, 631 bp, Zea Mays
ctcaagttctagctaaaggagtatggattccttgtgctactgctgatgtaaccctcttctctgtcccaagatcgagttgctccagagcctggcacaccatcaccagtgtggtgaccaagtccacccgaatgctcatctcaccttggccagggttgcatgcccaggcgacacttgttatgtggtctctagtggtcagtgaagctcacgcattgacgcaaatcagcttttgaactctaccattgtcaggtgatcggaacagggttgtgccgccgcagatgggcgccacagacagcttcaccgccgaccgggtgactcacgctttctccggccgattcctcgcgagcaccgaagtttagaagttgtgttggaaggaggagtctactccagtgtatgctaatcaagtggaggagccatctaactgggtatttgataaagggatctagaacctcttcactgcaataaggcaagcccggtgaatttgcccattccttgtatttttaaaatacttttatacactttaagtctagtgaaatgtgcactaagtttataggagtttcttggaaactatttgatgcatagactaccttgatatccattccttttataaatacttctttagaagtatcaaata

SEQ ID NO: 131716 - DNA, 251 bp, Zea Mays
tcgcaggcttcgcaagggggccacacgccgatacctcctccttcacccgctctgtcgtcccccacagccggccaagccaccatgctgccaccggccgcgtgccttgttgcccgccgcctcctcggcatcgcctccgcatcagcgtcggaagccgccggccgccgggtagcttcctctccgatcgcttctgcagtcaacttcgccgccgcgtccaggggctctgtctccagcaccaggcccttctccatggc

SEQ ID NO: 131717 - DNA, 112 bp, Zea Mays
ctcttcaaccaaacactaccttacattttcattattcaacttgcctagcctaagttaccccatggaaatggattttccaggggcagtagaactgataggaacggggtgcctg

SEQ ID NO: 131718 - DNA, 1179 bp, Zea Mays
caatcacagctctcgtcacgacagataaggccatgtgcatccttcgccactcaccagcgctctccagtccacttcacttcatccctgatcggcgatcgcgtcgagcgagcagcgctataacgcacgatgaacttggcgtccgtcgttccctgcgcgcaggcattcctcgcgttaatgactcccgccgctggctcccaccgtcgggtccacacgcatgcggcggcctccaagagcggattggcctgccgcgtcgcgcgcagcgggggcacccggtggctgccggtctcctgtgcagccgggggcggtgcagttggtgacacttttgttactgaggacactacaaatgtgatgtttcctcgggaagtaacagttccaggctatacacacccattggttgcagttggcacaggttacagagaaaagttttttgtcaaagtatatgctgccgcgttctatgtagattactcacttcgccttgatactgagcaatggaaagcaaagactggtattgagagctttgacagttcctctgttttcgactccatttttaaggcaccggttgtgaaatcattgagtataattcttgttagagccgttgatggcaagacctttgtgaatgctctaaatgatgtcattgcccgccaaataaaaaacccaaacgccgaggaagaatcttccctgtcaaccttgcagaatacctttcttgggcgcaatctcaaacagggaacaagcatatacttaacttggcttgaacccaaaagaatgctgatctccatttcggaagatgaagatccacgtcaagttgatgcagagatcaaatctgctactgttaattatgctctatatgatggcttctttggtaaatccacagtgtgcccttctttaagatcatctacagcccagttgctggacgcgcttctgcttgcgaagtgacaaaccagtcgtggttccatatcaatggttacgagtggttattcccttctcccttgttttcccgagggaacacaggacgggctaggtgtccataatcataagtcccataaaggaaattaatttaattattatagagttcatatgtaacatttttgtcgtccctgatgaaatatggtgaatttgtcacgcccctatgctgatattatgattggcagattgctttaggtagtgtttggttgaggagcc

SEQ ID NO: 131719 - DNA, 896 bp, Zea Mays
ggagtactcttgggggagataggcgttcgcttcatgcttatccaacagattggtgacacttttgttactgaggacactacaaatgtgatgtttcctcgggaagtaacagttccaggctatacacacccattggttgcagttggcacaggttacagagaaaagttttttgtcaaagtatatgctgccgcgttctatgtagattactcacttcgccttgatactgagcaatggaaagcaaagactggtattgagagctttgacagttcctctgttttcgactccatttttaaggcaccggttgtgaaatcattgagtataattcttgttagagccgttgatggcaagacctttgtgaatgctctaaatgatgtcattgcccgccaaataaaaaacccaaacgccgaggaagaatcttccctgtcaaccttgcagaatacctttcttgggcgcaatctcaaacagggaacaagcatatacttaacttggcttgaacccaaaagaatgctgatctccatttcggaagatgaagatccacgtcaagttgatgcagagatcaaatctgctactgttaattatgctctatatgatggcttctttggtaaatccacagtgtgcccttctttaagatcatctacagcccagttgctggacgcgcttctgcttgcgaagtgacaaaccagtcgtggttccatatcaatggttacgagtggttattcccttctcccttgttttcccgagggaacacaggacgggctaggtgtccataatcataagtcccataaaggaaattaatttaattattatagagttcatatgtaacatttttgtcgtccctgatgaaatatggtgaatttgtcacgcccctatgctgatattatgattggcagattgcttta

SEQ ID NO: 131720 - DNA, 510 bp, Zea Mays
atgtctgcggacgagcctgacaccagctgctaccggtggagccgcgacttcgtcgtcgcgcacgctatcttcgccagcggcttagtcacggctccggtggccgtcctcctcctcgtcaaccgcccacactcaggccgtgccatcttcttcgccgcgttcgcggcattgtgcaccgccgtcagcctcgtcctctgcctccacttctacgccgagctcaggagtccgccctggccgcgctggctctccgcgtcgtcgacgagcggcccgcggcaggatgaggaggcatcaagatcatatgtcgccggggaaggaacgacgacgctggccatgtcgacgcacgccctccgccacccggagcagctcgcgattcaccgcgcggaggtgcatgccgccgtcctcgcagcggggcgcttcttcccgagctacgactccgtgggcgataatggcgtggcggccgaggactgcgcggaccagtcccagattgctggctcatattctccaaagcagtag

SEQ ID NO: 131721 - DNA, 482 bp, Zea Mays
ggcctcggcaggccaggagattctccagtgtctccttgatgccgtggcgctcctggccgcctctcccgacgccatccccacgaacgccttctccgacaccgtctccgctccgccgtcttctccgacgtcgtcaacttcccctcgacaagagtgcaaagtggaaacaacacatgaagtcgacatggagaaggaaaatgcaactacagtccacatgaaacttgtgaaaaaagaattaaatcccaaagttcctaatgaagagacttgtattacagttttatgttatattgtctatctatttgtgtgaatggagatgaccttgatgaatggattagcttcgctaatgctttagtttgctgctgctgcttcagtttgctactgatgatgcttctactgcaatttactactttattttgctcgacaaactattgtgatgatggataaagtgtgatgtgatgatggatgaaccagtttattatgctcca

SEQ ID NO: 131722 - DNA, 213 bp, Zea Mays
aagtctgaaacaacagaagaggagggatttgaagggaacagcaacaaacattggcagggcagctgcagaggaggcgcggcaaggggaacacttgctgcaaacacaagcaaagctgcctgcctgcctgcctggaggggaaaaacgaagggtggctgagttgagaagagggaggccagcaaatggcgcgcacacccacctgcaccttgagcacat

SEQ ID NO: 131723 - DNA, 258 bp, Zea Mays
atggcccttgccaccgccggcgtccttaggctggcccttgccgccgccatggccgttctgagggacgccgggcttggagccccacagctgggccggcttgccggccttgttgagcttcctgatgatggtgtccggatccagcaggccggacaccgtcaccttcccctgttccgcgtcgatgctgctctggtagacacctacagtggcaaggtcaacctccatcacgtttccgcatgcagagcaaaccaaacggtctga

SEQ ID NO: 131724 - DNA, 360 bp, Zea Mays
atggatgaacagcttgattcgtgcgatcggcttatgcactgggtacaccgaagaggagtggaaaatgcgattacactgaaggcgtcggtgtccgggattataaccggcatcctgctggcgattgcccgtattgctggtgaaaccgcgccgctgctgtttaccgcgctctccaaccaggactggagcacggacatgatgcaaccgatcgccaacctgccggtgacgatctttaagtttgcgatgagcccgtttgcggaatggcagcaattggcctgcgccggggtattgatcattaccctgtgcgaactgctgctaaactttctggcgccccttgttgttgccaagaatcaactcggctga

SEQ ID NO: 131725 - DNA, 1424 bp, Zea Mays
cgagttgcggatgtgaggtagcatggccatggacctgctagcaatgccagtgctcctgtccgccgactcagcagccgccgtcttggtgctcctttccgtggccacagttgttgccctgaagcacttgctctcgtcatggcgacgatctcctcggcggcggcttcccccgagcccgacgcccctcccggtgatcggtcacctccacctgctgcggccaccggtgcaccgcactttccacgagctcgcaacacggctaggggcgcccctcatgcacatccgcctcggctccacgcactgcgtcgtggtgggctcggccgacgtggctagggagctcatccacgaccacgatgccaccatctcgggacggccagtttcggtgctgtcccggctcttctcctacggctcggccggcttcgccttcacgccgtacagcccgcactggcgcttcctcaggcggctgtgcgtgtccgaggtgctgggcccgcgcaccgtcgagcagctgcggcatgtccggcgcggcagcctggtgtctctgctgcgatccgtgctggcgtcgtcggcgcggggtgacaataaggtggacctcacccgcgagctcatccgcttctccaccacctccatcatccggatggtggcgagcgacgtgggcgtcaccgacgaggcgcaggagctggtgaaaggggtggcggagctgctcggcgcgttcaacctggaggactacgtccccctgtgccgcggctgggacctccagggcctccgtaggaaggccaacggtgtccaccggcggttcgacgccgtgttggagcagatgatcaggcacaaggaggaggctagggacagggagcgtagccgcggcggcgccgcgcaggaggacaagaaagggtggccggctacgtgcaagcagcgcaacaaggacctgttggacatcctgctggacatggcggagaacgagacggcggaggtgaagctcaccagggaaaacatgaaagccttcatcgttgacgtggtgactgctgggtcagactcgtccgcggccacggtggagtggatgctggctgagctgatgaaccacccggaggcccttcgcaaggtgcgggccgagatcgacgcggtggtcggagcggacaggatcgtcggcgaggaagacctgccgaggctgccgtacctgcaggcgacgttcaaggagacgctgcggctgcacccgggggcgcccatcgcgcaccgggagtcgacgggcgagatggtggtccgcgggtttacggttccgccgcgcacggcggtgttcttcaacctctgggccatcggccgcgacccgtcctgctgggaggagccgctggcgttcaggccagagcgcttcatgcccggcggcgcctcggagggactcccgccccgcggccagcagttccagttcatacccttcggca

SEQ ID NO: 131726 - DNA, 551 bp, Zea Mays
aggtctacggtgcggtgaccatgaacaacacgctctgcctggccgtgttcttgggcctcgtctacgtgcggggtttgacgtgggatttcagctcagaggtcctcatcatcttcagtgtctgcaccataatgggcctcttcaccagcttccggacagatttccccctctggacgtgtgtcgtggcctacctgctgtatccgctgtccctcgtcgtcgtctacgtccttgacttcaagttcggctggtcatagacctgcatgatcgtctgaggccggcttagcttcaacacattacatatacgttgatatatataccatgcgaaatagtacggctttgttacgtatactagtaaagtatactccggttgtgtatgggcttttttgaagaaaaaaaacttaagtatttttctcagatcaaagttttttttttgaaacgaacatgccagtagagctgctgtcgattatattgacaaagaggaaggtaccttcagaagagaactataacaaaattacagcaaaaactactgtaacactaccaacaaaagcaacacc

SEQ ID NO: 131727 - DNA, 627 bp, Zea Mays
acatgcagatccttgacttgttgtttttatgtttcagtctctgggctcgccggaactaaagaggttgcgcaaagccaggttttgatcggaatgggcctgcttgcaggttcaacagtcatgctcttgacccttctctggggatcttgtgttgttgttggcaaatgtgatatgtcagaaaactcaactgcaactgattctcaagatacaaaaggcttcagtctttttggatctggtgtttctactgatgtgcagaccagctatgctgcaagaatcatggcaatatctgtgcttccctttatcattgttcagataccccaaatttttaggctccattctggccatcgtttgacagtcctgcttggacttattgctgcagctctacttgtgctcgcttattgcctgtatcaggtctttcagccatgggtccagagaaggaggttagaatatgcaggactaaagcacgtcatgtctggacttctacgacatgctcagacacacatttttggtcgtcttcttcgcgaagatggaaccccgaatatacctgtgatcgagaagtacgccttggcacccacctcatctattagctgttttcacaaacgtgaatctttcaaaaccgacatctccccc

SEQ ID NO: 131728 - DNA, 1193 bp, Zea Mays
gcctgcctgcttgcaattgcaattgcaaccaataaccatatacacacagctagctagcttcacatatcgcaagcacccagatcggcaggaccagcggcagcggcaacggtgccggcaagaagcaggccgcgcgctccactctccgaccccggccgaaacaaaggtgatggcgcagctgccgccgagggcgccggggggcgccgcgccgcaggaccactggtcggcggcgggggagttcctggggttcgccgcggccagacgcggcgcgcaccgccgctcggcgagcgactcggccgcgttcctcgaggccctgcccatggaagacgtcatcggcggcgacggcttcgaccgcctcgacgacgaccagctcatgtccatgttctccgacgtcgacgcgccggccgtctccgccggggacgcggcgcagctcatggacgtggcggacgccgacgcggacgcggacgacgacgggtcggccgcctcgtcgcgcgccgccgcggacggcgtcgccgctgaccccaaaagggtcaagaggatattagcaaacaggcagtcagcgcaaaggtcacgagtcaggaagctacagtacatctccgagctcgaacggagtgtcaccggtctccagatggaggtgtcagcgctgtcccctcgcgtggccttcctcgaccaccagcgatcgctgctcaccgtcggcaacagccacctcaagcaacgaatcgcggcgctcgcccaagacaagatcttcaaggatgctcatcaagaggcgctgaagaaggagatcgagcggctacgccatgtgtaccagcagcagcagcagcagcagcagatcaaggtggccaccaccggcggcgccgacatcgccgcggccgcctccatgcaggccaggcaagagctgctcgcgtgcgagggcgctgccattcgatagcagatcgagggcggaggcgttcaattggcagtgccacaacaaccagcaccgaactttgtgccgggttcctccttttctcagacaagttgttcgtcgtgcgtgcaaatacacgcgcctgttattagcctattgattttatttctgtgcagtcttaattaattcgtatatgtgatgtattcctcctcttcgtccctagcaaaaaagaaaaagaaacggcagtcgtgctgggatggggactttgttgtgaatgaatgaatgtatttggtta

SEQ ID NO: 131729 - DNA, 3293 bp, Zea Mays
tttataaacgaacaaaaacatcggcatgaggtgacaattctgctccaagatattgttgatattgtagtccaggacatgattgtggatcctcaaagtatactgaatgtggttaactcttcaaagagattgatctctgatgatgatggagcattcagctattatgaaccagagctgtttgcatcagtcagctcaagaacaagcatccgatatccatattttgatcagcaaaaagaacaggttaaacgcttctatcttttgcttagtacaaaagaaaaggctgcggaaataccatcaaatttagaggctcggcgacgcatttcatttttcgccacatctctgtttatgcatatgcctgctgctcccaaagttcgcagtatgttgtcatttagtgtaataactccatatttcatggaagaagtgaagttttcagatgaagagcttcattcaaatcaagatgaagcatccaccctttcgtacatgcaaaagatatatccagatcaatggaaaaactttctggaacgcgttgatacaaaggtaactaatgatgaaattagatattgggcttcctaccgtggccaaacactgagccgaactgtacggggaatgatgtactacagaaaagcattgaagctacaggctctcttagacatgacaaatgatcaagatttatatgaagcacttctagcaattgagcaaggaaaaaataaaagaaatatccaccaagcattagcagctgaactagaagcacttgcagatatgaaattttcatatgtcatttcatgtcagaagtttggggaacaaaaaatcaaaggtgatccccatgctcaagacatcatagatctgatgatgaggtgccctgctctgagggttgcttatattgaagagaaggaagtcatagtaaataactgttctcatatggttgaagggaaggaagtcatagtaaataactgtccccataaggtttattcatctgtgttaataaaagcagagaataatttggaccaggagatttaccgtataaagctgcctggtccacctatcattggagaagggaagcctgaaaatcagaaccatgcgattatcttcactcgtggagatgctctacaaacaattgatatgaatcaagacaactatctggaagaagcttacaaaatgaggaatgtccttcaagagtttgtaaggcatcctagggacaaagctccaactatccttgggttaagagagcatatcttcactggaagtgtttcatctcttgctggcttcatgtcatatcaagagacaagctttgttacaattggacaaagatttcttgctgaaccccttagggtacggtttcactatggtcatccagacatttttgatcggatatttcatttaacaaggggcggcataagtaaagcgtctaaaactataaacttaagtgaggatgtgtttgctgggtataattccatattgcgtcgtgggaatataatttacagtgaatacattcaagttggcaaagggcgtgatgttggtcttaaccagatatccaaatttgaagctaaagtggcaaatggcaatagtgagcaaacaatcagtcgtgatattcaccggctaggtcggcgatttgatttcttcaggatgctctcatgttattttacaacagtgggattttactttaatagcctaatatcagttgttggtgtttatgttttcctctatggccagttgtacttggttctcagtggcctgcagagggctctgctacttgaagctcagactcagaatataaagtccttagaaacagcccttgcatctcagtcttttctccagctgggactgcttacaggattgcctatggtgatggagctaggtttggaaaagggtttccgtgcagctctgagtgattttatcctcatgcaattgcagttagcatcagttttcttcacattctcacttggaacaaaagcacactactacggccgtactattctccatgggggtgctaaataccggcctacagggcgtaaatttgttgttttccatgcaagctttactgagaattatcagttgtattccagaagtcattttgtcaaaggatttgagttgatcttccttttgatagtctaccacatctttaggagatcttatgttagcaatgtcgtgcatgtgatgatcacatactcaacatggtttatggcagtggcttggctgtttactccttttctttttaacccagctggttttgcttggcaaaaaattgttgacgactgggctgactggaataggtggatgaagaatcaaggaggcataggagtgcaaccagagaaaagctgggagtcatggtggaatagtgagaatgcacatctacgttactcagtattgagttctagaattcttgaagtgttgctctcactacgcttcttcatatatcaatatggacttgtttatcacctgaatatctctcaagacaacaagaatttccttgtctacctgctttcatgggtcgtaattattgccattattggttttgttaagcttgtcaattgtgctagccgtcgtttgagcacaaagcaccaactcgtcttcaggctcataaaacttttgacattcctctcagtggttacttccttggtccttctctattgtctctgtcgattatctatcatggatttgatcatctgttgtctcgcattcataccaactggctggggtctcctccttattgttcaagttttgagacccaaaatagagtactacgcagtatgggagcctattcaggtcatagctcacgcttacgactatggaatgggatctctgcttttcttcccgatcgctgtgcttgcatggatgcctgttatctcggccattcaaacccgggttcttttcaacagagcattttcccggcaactacagatccagccttttattgcaggcaaaactaaacggagatagcataaccgatggttttacatcgcatattggggatttgtgaatatgatctattggttggtcatcagagcaataagtttctgtactctggtagcataaatgtcgtgtgcagtgtgatccattattctttggcctaagcctgttccacatctaacatagtaataccttggtttcggtttttattgccgtgtaactttacatatcatttctgtaaaaaagaaacagctctagcattgctcttagatgagttgagactgatgaatctcatgatacctacacagttacaaaggtactaccttattttcatgtgaaatacgacacttattgtactactgtattattatgctttaacgtgcagtacc

SEQ ID NO: 131730 - DNA, 306 bp, Zea Mays
atgggtgtacctacccatccgtccctatggtgggaagaagcccatgcaaagatttcaaaaaatgatagaagtcgatttaatggggtgatgtcatatgagctatatggagtgctctctggggctgaatcacaaaagaacaagaacggggcatctgatcactcaacatggagaaactatgatgacctcaatgaattcttctggtctgctgattgctttaagcttggttggcccatgcgtcttaacaatgatttctttttcacatcaagtgcaactaaggactctcaggtttcctttgacaaactgtag

SEQ ID NO: 131731 - DNA, 1059 bp, Zea Mays
atggagctggagatcgtcgaggtgggcccgtccagccgcccgctgcaatacgtctctcgcccgccacttccacctccaccgccgccgccgccaccgccaccattgcagcagcagcagcaaggggaagcaggggacgccaatgcggcgccgcccctggtgcagcatttcgacagcgagaagctcccgcagacgctcgtctccgagatccgccccttcctgcgcgccgccaacgacatcgaggccgagaatccgcgcgtcgcgtacctgtgtcggttccatgcattcgaaaaggctcatacaatggataaactttcagcagggaggggtgttcggcaatttaaaacagcacttctacggagacttgagcaggatgagagcagcactaaatcaaaaatgacacaaagaggtgatgcccgagagatgaagtcattctatgagaagaaaaagaaagccaatgcacatgaacacttgcctgtcctggcagaagtgctgaaggctcttctcagcggaactggcttggaggttggccttgttgctagtgaagattttgcagacttatttcgatataatatacttccactccatcctaggtcaagtcaaaaaccaattatgcttctcccagagatcaaagttgcagtcgctgctgtgtttagtgttcgcagtcttccatcagtcaacatgaaggatgaaaaaaatcatacagatattcttcggtggctgcaaagttggtttggattccagaaaggaaatgtcgccaaccaaagggagcatctaattctattgcttgcaaatatgcatgctagattgaatcccaagtcatcctccgctcaaatgcttgatgacagagcagtagatgaattgttggcaaagacatttgagaactatttgacctggtgcaaatttttggggagaagaagcaacatatggttgccctctgtgaagcaagaaattcagcagcataaacttctatacatagctctttatcttcttatatggggagaagcatcaaacttacggttaatgccagaatgcttatgctatatttttcatcatgaatag

SEQ ID NO: 131732 - DNA, 839 bp, Zea Mays
tacagacataggcgtagaaagcccaaacccgcatctacgttctactcccactcgcggtcgcggtagccggcggcggcggcggaggaaagcaggcaggccatggcgtcgtcgtcgtcgtcgaccccggcggccgtccgcgagatgcagaaggatctcgaggtccaggccaacgccctcagcaagatccagaaagacatcgccaagaaccaccaggtccgcaagcagtacaccatccaggtcggcgagaacgagctcgtcctcaaggagctggagctgctcagcgatggggccaacgtgtacaagctcatcggaccggtgctggtcaagcaggacctcgctgaggccaaggccaacgtcaagaagcgcatcgagtacatctccgcagagctgaagcggatggatcgggcgctcaaagacttggaggaaaagcaaaacagcaagaaggaatcgatattcaagttgcagcagaggatgcaggctgtacaagctaaggcttagacaactgtttgttggttgcaactagtccaaggccatgcttcatttcatcccaattccctccaggtttttttttgtggggaggaatcaggtgtctgatgttctcgtctccacaacgaaaaagaaagaaaaacggttcctagtgaaatactaggctattctgtatgccctagtataaaagtgtgcctctagtagaactgtagaagatgtagttatcagtatctcttttgtattattggcccatgtttacttctcaatcgaatatttatgcgagggatgtttgtcaacgccttaggcttcatcttgaatttatgactttcattgcttgagtgggcccatgccaa

SEQ ID NO: 131733 - DNA, 796 bp, Zea Mays
tacagacataggcgtagaaagcccaaacccgcatctacgttctactcccactcgcggtcgcggtagccggcggcggcggcggaggaaagcaggcaggccatggcgtcgtcgtcgtcgtcgaccccggcggccgtccgcgagatgcagaaggatctcgaggtccaggccaacgccctcagcaagatccagaaagacatcgccaagaaccaccaggtccgcaagcagtacaccatccaggagctggagctgctcagcgatggggccaacgtgtacaagctcatcggaccggtgctggtcaagcaggacctcgctgaggccaaggccaacgtcaagaagcgcatcgagtacatctccgcagagctgaagcggatggatcgggcgctcaaagacttggaggaaaagcaaaacagcaagaaggaatcgatattcaagttgcagcagaggatgcaggctgtacaagctaaggcttagacaactgtttgttggttgcaactagtccaaggccatgcttcatttcatcccaattccctccaggtttttttttgtggggaggaatcaggtgtctgatgttctcgtctccacaacgaaaaagaaagaaaaacggttcctagtgaaatactaggctattctgtatgccctagtataaaagtgtgcctctagtagaactgtagaagatgtagttatcagtatctcttttgtattattggcccatgtttacttctcaatcgaatatttatgcgagggatgtttgtcaacgccttaggcttcatcttgaatttatgactttcattgcttg

SEQ ID NO: 131734 - DNA, 797 bp, Zea Mays
tacagacataggcgtagaaagcccaaacccgcatctacgttctactcccactcgcggtcgcggtagccggcggcggcggcggaggaaagcaggcaggccatggcgtcgtcgtcgtcgtcgaccccggcggccgtccgcgagatgcagaaggatctcgaggtccaggccaacgccctcagcaagatccagaaagacatcgccaagaaccaccaggtccgcaagcagtacaccatccaggtcggcgagaacgagctcgtcctcaaggagctggagctgctcagcgatggggccaacgtgtacaagctcatcggaccggtgctggtcaagcaggacctcgctgaggccaaggccaacgtcaagaagcgcatcgagtacatctccgcagagctgtcaaagcggatggatcgggcgctcaaagacttggaggaaaagcaaaacagcaagaaggaatcgatattcaagttgcagcagaggatgcaggctgtacaagctaaggcttagacaactgtttgttggttgcaactagtccaaggccatgcttcatttcatcccaattccctccaggtttttttttgtggggaggaatcaggtgtctgatgttctcgtctccacaacgaaaaagaaagaaaaacggttcctagtgaaatactaggctattctgtatgccctagtataaaagtgtgcctctagtagaactgtagaagatgtagttatcagtatctcttttgtattattggcccatgtttacttctcaatcgaatatttatgcgagggatgtttgtcaacgccttaggctt

SEQ ID NO: 131735 - DNA, 366 bp, Zea Mays
atgtgggagataaggggaggccaggaagcagggacggacagccctgccttcaccggcgagctccaagtcggcgcgccatgggaggagcagaggtgcggccgaccggcggcatgggagatgggcagagagggactcgacaccagggagggcacacgtgggaacagggagcagggcgcggctaccatgggcaagctggaggccgagcgtgaccagggaaggagcaggggaggagcgcgcgccatgggaggaagtaggagggagtgccacgagagaagcagggcgcggcagccaggagataaagctgacggcaagaaaggaaatatcccaggcggtggagaggatagaggaagggcggcatggggatag

SEQ ID NO: 131736 - DNA, 3422 bp, Zea Mays
gccacacacgatcaccatcacccccgggctcccgacccagtacaaatagacacgcacactcccaactccccacccatctccgccgcgcacaccgcccaatcagccaatctcctcctcctcctccgctctcagacgagcagcggttgccatcactctccacttcccacgcccgctgcgggctcgcaggcggcagagaattgtctgtgccgccgggtgggaatttgattcggtcggattcgctgcgccgcgatgccggagcggcaccagtccatcgacgcgcagctgcggctgctggcccccgggaaggtctccgaggacgacaagctcgtcgagtacgacgccctcctcgtcgaccgcttcctcgacatcctccaggacctgcacggcccccacctgcgcgaattcgtgcaggagtgctacgagctctcggcggagtacgagaacgaccgggatgaggctcggcttggcgagctcgggagcaagctcaccagcctgccgccgggggactccattgtcgtcgccagttccttctcgcacatgctcaacctcgctaacctcgccgaggaagtgcagatcgcgcaccgtcgccggatcaagctaaagcggggagacttcgccgacgaggcctccgcgccgacggagtcggacatcgaggagacgctcaagcgcctcgtctcgcagctcggcaagtcgcgggaggaggtcttcgacgcgctcaagaaccagaccgtcgacctcgttttcaccgcccaccctacacagtccgtgaggaggtctcttctccagaagcatggaaggatccgtaactgcctgaggcagctttatgccaaggacatcactgctgacgacaagcaggagcttgatgaggcacttcagagggagattcaagctgctttcagaactgatgaaatccgcagaacccctcccactcctcaagatgaaatgcgtgctggaatgagttacttccatgaaactatatggaagggtgtaccaaaattcttgcgccgtattgacaccgctctgaaaaatattgggatcaatgaacgtctcccttacaatgctcctctcattcagttctcttcctggatgggtggtgatcgtgatggaaatccaagagtaacaccagaggttacacgggatgtatgcttgttggcgagaatgatggctgctaacttgtacttctctcagattgaagatttaatgtttgagctgtctatgtggcgctgcagtgatgaacttcggatccgtgcagatgaactacatcgctcttcaagaaaagctgcaaagcactatatagaattctggaagcaagttccgccaaatgaaccatatcgtgtcatacttggtgatgtcagggataaattgtactacacacgtgaacgttctcgtcacctattgacatctggaatttctgagattctagaggaggcaacttttactaatgttgaacagtttctggaacctcttgagctctgttatagatcattatgtgcttgtggtgacaaacctatagctgatggaagtcttcttgatttcttgcgtcaagtatcaacttttgggcttgcccttgtgaagctcgacatcaggcaggaatctgatcgacacactgatgtccttgattcgataacgacacatcttggaattggctcctatgctgaatggtctgaggagaaacgccaggattggctgttgtctgaactgaggggcaaacgtccattgtttggttcagatcttcctcagactgaagagactgctgatgttttaggcacatttcatgtccttgcagagcttcctgcagattgctttggcgcgtatatcatctctatggcaactgccccatccgatgtgcttgcggtcgagcttttgcagcgtgagtgccatgtaaaacatccactgagagttgttccactttttgagaaacttgcagatcttgaagcagctccagcagctgtagcacggctcttttcaattgactggtacatggataggattaatggcaagcaggaggtcatgattggatattcagactctggcaaagatgccgggcgtctctctgcagcatggcaaatgtataaagcacaagaagagctcatcaaagtggcaaagcattatggagtcaagttgacaatgtttcatgggaggggtggaacagttggcagaggaggtggtccaactcatctggccatattatctcagccaccagacacgatacatggatcacttcgtgtaacagttcaaggcgaagttattgagcactcctttggagaggagctcttgtgcttcagaactttgcaacgctacactgcagctactcttgagcatggcatgcatcctccgatttcccctaagccagaatggcgtgctctgatggatgaaatggctgttgtagcaactaaagaatatcgatcaattgtcttccaagaaccacgcttcgttgaatacttcagatcggctacacctgagactgaatatggtaggatgaatattggcagccgtccatcaaagaggaagcctagtgggggaatagaatcactccgtgcaattccatggatctttgcttggacacaaacaaggttccatctgcctgtctggcttggatttggtgcagcgataaagcacatcatgcagaaggacatcaggaacatccatatactgagagaaatgtacaatgagtggccattcttcagggtcacccttgatttgcttgagatggttttcgcgaagggagacccgggaatcgcagctgtgtacgacaaattgctagtggctgatgatttgcaatccttcggcgagcaactgaggaagaactatgaggagacaaaagagctactccttcaggttgctggtcacaaggacgtccttgaaggtgatccttatctgaagcagcgtctgcggctgcgtgagtcctacatcaccactctgaacgtgtgccaggcctacaccctgaagcggatacgcgacccgagcttccaggtgagcccgcagccgcccctgtccaaggagttcaccgacgagagtcagccggcggagctggtgcagctgaaccagcagagcgagtacgctccaggcctggaggacaccctcatcctgaccatgaagggcatcgccgccggcatgcagaacaccggctaggccaagatcttcggtgtgcaaataacctgtctcccatgagacggtggacgatatgtgtaggcctgtgagcagttagtacaccggcgccagtgtgttctggaggatttttcatgtcagagcctttctcttgtgtgcttgctgtagatgccaaggggagcttattggctgttgaagcctgatgcaaaataaagtacgaaactatgttttttgtttaactaataactagcaaacatgcttccgttgcattgaaactagcagcttcgtgcgtagtcatctgtggataataaaag

SEQ ID NO: 131737 - DNA, 732 bp, Zea Mays
atggctgtgcggaggatggaaggtgcgggggagcactctgccgcgggctggaaggtgagcgcggcgaggcggcgggaatcgcggctgtggctgcgcgaaggatggaaggcatcgtggtataagaatgggaacatgaacctttggaaccttgtcgagatcccatatggactacggcagcagcgcctgctaggagctggagctggagctggagcagtagtcaaggcatttgagcctgcactggtgggtgggtgcgttgctcttgctcgtgccacggccgtagctgccggatggaaatgcaacggctgtgtggcatggcccaatcaggcctaccaggagtgccacacgcgctgtgttttgttcgggtacgttagttttgaggttaagggcgtgtttgcgaccctgcaccaagctggctcggcctgccctactggcccagccccaggttggcatggcccagttggtgcaaatctctttgtttgtgttgctgtacaaaataagctcggcccaggcgagaacatgtttgtgacccttacagacagctgggctaagaggccaactgcccaactgccaaactgggaatatgtttggcagttggctgtggtcggcctggcccatagacaggaaatagagatggacattgctaacataaaaaagagatgcacattgctgacagaaaatagaggattagaacaacatatgtcaattgaacaatacaagcatcaactgagttag

SEQ ID NO: 131738 - DNA, 1248 bp, Zea Mays
aaagaaaattaaaaaggaaaaataaaattaaaatccaagtcttacgcgagtccccttcccgatccgccggccgatccacccaccgccgccatgccggcgttcaaggccccggcgccgggcttcgccgtgcgcttcagccccttccacgagaaccgcctcctcgccgccacgtcccagcacttcggtctcgtgggtaacggtcacctcatcgtcctcgacctagccggcggcgggcctggggccgccccggcgccggtcttctccttcccgacctccgatgcgctcttcgactgcgcgtggtccgagtcccacgactccctctgcgccgccgcctccggggacggctccgtgcgccttttcgacgccgctctcccgccggcgcagaaccccgtgcggctcctccgggagcacgcacgggaggtgcacggcctcgactggaaccccgtccgccgggacgccttcatctccgcctcctgggacgacacgctcaagctctggtcccccgaccgcccagcctccgtccgcaccttccggggccacgagtactgcgtgtacgccgccgcctggtccgcgcgccacccggacgtcttcgcgtcggcctccggggaccgaaccgcgcgcgtctgggacgtccgggatcccgcgcccacgctcatcctgcccgcgcacgaccacgaggtgctctcgctcgactgggacaagtacgacccctccatcctcgccaccgcctccgtcgacaagtccatccgcgtctgggacgtgcgcgcgccgcgggcgcccatcgcgcagctcgccggacacagctacgccgttaagcgggtccgtttctcgccgcaccgccagggcatgctcatgtcatgctcctacgacatgactgtctgcatgtgggactaccgcgccgaggatgctctgctcgccaggtacaatcaccacacggagttcgttgccggcatcgacatgagcgtcctcgtcgacggcttgctcgctagcaccggatgggacgagatggtctacatctggccatttgggacggatccaagagccatgtagcacgcagatgcaatagaccaggtgatttgtactattggttttcagctttgcattgggcggtggtaatactaattacatgctcctacatgttcagttactatctcttcaaatgagttgaagaagttggaataatgtcaaaaaattgttcagttactatctcattgagctctagcctctcttatactagtaagaaggaaa

SEQ ID NO: 131739 - DNA, 1650 bp, Zea Mays
atggctgggaggaccgcgcccgcctccctcccctccttctccctcacgcccgactccctcgctgcccctttatcctggatctcgtcatggacgctaccacgaccaacgattgatatcatgtccaagttcttcaagctgatggtggcttatagtgtgcttgaggttcttcgacctctctataattcccctaagatactggaacaaaagcatgagatgttgcctgtagagtaccaatgctttattgcagtcttcctcctcgtctgccccaatgtcggcaagtcagccctcttcaacaggatcattgcgtctctgcgagctaatcagttctgtgagcgtctccctagccccaatggcgagtcaattgttgattgccatcagatctcaaagatgccaaatcttgcattcaccatagcaaacaagactttcaccttaacaccagagctgtacatagtgaagttggagcaagcaggacaaactatctgcatcaatgggtttatggcatttgacgtaccgcctcctcgtggtcctctctgctacgctaaacatatctgtactactcttaagttaaacatgaagaagtcatcgggctcgggctcggtgtcgttgccgcggagcatcccggagctgtacgaggagaggggagccagcagcctccgggagttcgggttccaggagctccgggccgccaccagtgacttcagccgcctgctcaaggtcggcgaggtggcttcgggagcgtttacaagggcgtcgtccgccttcctggcgggcccgccggcggcacgaagttcaaggttatctcattctggcatatctcatttgcctgctgatgaagtgaagcctttggttaaatatgataatgatgaagatgcacactcacctggtggtcgtggaaggggtcgtggtggtcgaggccgtgggcggggcaggggcagaggtggacgtggaaatgggttcaatgagtatgctgatgctggttgggaagacgatcacgcccgtgcatatatgggcaatggatatgcccgtggaagaggtcgcagtttcaggggccgtggtaggagaggcgacgacgataaccagcctgaataccaacaggtcggaggttatttcaagaagatccaattgaaccaaaaacttgaataaaatttccaacatttctggaagacgactccagtccatctgcagcggtccttgttgggataggtttcaaaggcatgagagtgacgagggtcaaaaatctgaacctctacgcttttggtttatatatgcaaccaacttctatccgtgagaagttgggtcctaagtatgcttcatttccaactgacaagctgatggagaaccctgatttctatagtgatcttctcaggaaatgggttcaatgagtatgctgatgctggttgggaagacgatcactcccctgcatatatgggcaatggatatgcccgtggaagaggtcacagcttcaggggccgtggtaggagaggcggcgacaataaccagcctgaataccaacaggtcggaggttattacgaggaggcacctgttcatgctccagctttaggtgggtaacctcacaggacacaaatgaagtgtacaaaatattttcaaacaaaattaagcaaggcctgaagataatctgaagagctttgt

SEQ ID NO: 131740 - DNA, 536 bp, Zea Mays
accagatatgtgtctaaattttctttcttgtgttttaatacaggcttatagtgtgcttgaggttcttcgacctctctataattcccctaagatactggaacaaaaggtaactgttgcgatacatgtcaatcttcaatttcgttgtcgcttagcagttgttgggctttggtacctagtctgtaattttgctgatgcaccagcgacacatatttatcattgtttgttttttaatcaataacaaagcacaggtacaatataatcttatatagcttttaaggtatgtaaacatccactttagtgatgctaacaaatgtataaaataattattattattttttcatagcaatatattttatcatattgcatcttagttcatgctacctggatgtaaatgtggtgcggtttagtttagtaagattttcactaatcactacatagtgcagcactgggctgttaatattttttgtaccatgtgtcataagcatgagatgttgcctgtagagtaccaatgctttattgcagtcttcctcctcgtc

SEQ ID NO: 131741 - DNA, 1623 bp, Zea Mays
atggtagctagagaagagcaagcgatgacgagagaggtcaaaggtaaggggttactagttgacatccttgatgaccacgaggaggtatcaatcgataacagcaagctgctagacctcaacgagggtttcgatgtggaggatgaaggaggggaagctgcaggcgatgacgaggacgaggaagacgaaggtgaggagggcgacgatggtggtagcaccaccgatgttggtgggagtgccagctcaagcaacaataggagcagcaacaacaacaattcggagagcgaaaaggcggacgccaagggaggcagcaagtcagaggtgagcggtgagcagagggttccgtcggtgcggcagtacaaccggtcgaagctgccacggctccggtggactcctgacctccacatggccttcgtccatgccgttgagaggctcggtgggcaagagagagcgactcctaagctggtgcttcagatgatgaatgtccggggcctcagcattgctcatgtaaaaagccacctgcagatgtacagaagcaagaagctagaccaagatggccgcccgaggggagcagtttcctcagtgtattctccaatggatttccatttcatgagagctgatcatcggcgcttccacaacatgtccttcttccaaagagcagcagcctcggcctcctcctccggcgggcaggaacgcggcggcttcttcgcgtcgaggaacttcagcactccggagttgagccggctctatggactcctccaccatcgcccggctccgacccaaactttcgacttcagaaattccagtttcagaaatcatgagtggccgtgggccgcgtcgtcgaatcagcaggaggcgatgacaatctccaggaagcacgttgtcatgccaccctcgacatcgccgcagacacacgcatcgcttgcatcttccgcagcgctgaggagcgatcggcggtggtggcctttcactgaggccggcgctgctgtcgccgccggcgagcacagggcagggacaggagttaccagtgtaaaattcgacaactgcgtcgggagcagctctcggccacttccgttgcccatgtcgccggccgtgtgcggagatcgtcgtcttccgttcagatggcggcacgggggaagcagtagggacgtagtcgtcggctacccgggtagcagctccatggtcgcaaaaagatcgtcgtcggatcccgtcgtcatcgacgatgggcatcaactcgagcggcagaattcgaagcacgttgtagaaccaacaagggcctccacagccactccggcagaggaggacgaggcgtgcctcaagcggcggccatcgtcgccggtggaggcccaagatgcgacgacgacgacgttggacctacagctcagcttgtcccctaccacggcgtcggccaagaagagaaagaccagcgggtccttcttcatggacgacaccagctgcgagttctcgacctccctctcgctgtcgccacccgtcgccgcccctgcagtttccacgcagcagcggcaggaaaagacgagacgaagcagcgacgacaacggcggaggcggaggcgttcttgggcagagtactttggatctgaccatgtcgatcagggcattggagtga

SEQ ID NO: 131742 - DNA, 391 bp, Zea Mays
gatctcacatcatatgcggtggaatacagtatgtacccaccgccgcaggccatggcatccgcatactcgccgccgcaatattgttcgtcgtacgcggcgtacccgcggcagccttacgggtaccctgctccgccaccgtacgggtacaatgctgcttccccacaaccggcgatgtaccagcaaggcatggcagaggtatgggcatggggcttggcctagggctcctaggcggtgcggtcggggggatgatgctcggagaggcgatcagcgactatgaggccgacgccacctatgatgccgggttcaacgatgcattagcattttagatctttgttgtcatgcagtcatggagattattgtccttgtaaatctctaattaataagaaacgat

SEQ ID NO: 131743 - DNA, 1020 bp, Zea Mays
gggagctgatcaggccacgcgatggcttcgtccacgaccggccattgcatattccttgcacttctgctgcttctcgcttccacggcctgctatggccagctctcgacgtcgttctactccaccagctgcccggcgctggagtccacagtgcgatccgtcgtgagtagcgccgtcgccagcaaccgcaggatgggcgcctctcttgtccgcctcttcttccacgactgcttcgtccagggctgcgacgcctccattcttctggacgacgtgccgggcagcttcgtcggcgagaaaaccgctggcccgaacgccaactccgtcctcggctacgatgtcatcaacagcataaagacagccgtcgaggccaactgccccggcgtcgtctcctgcgccgacatcgtcgccctcgccgcgcgcgacggcaccgtactgctcggtggaccgtcctggaacgtacctctcggccggcacgactcgacgacggcgagcctgagccaagccaacagcgacctcccctcgccggcgtccagcctcagcacgctcatcgccaagttcgggaacaagggcctgagcccgacggacatgacggcgctctccggcgcgcacagcgtcggcttcgcgcagtgccggaactaccgcaaccgcatctacaacgacgccgacatcaaccagcagttcgccaagctgctcaggaccaactgctcggccacgcagggcgcaagcgacaccaacctagcgccgctcgacgtggccacgcagctcagcttcgacaacgcctactacgggaacctgctcaagaagaaaggcctgctgcactcggaccaggagctcttcaacggcggctcgcaggacgcgctggtgcagaactacagctccaacgccaacttcttcttcgctgacttcgtcacggccatgatcaagatggggaatatcaacccgctcaacggaaccgccggccagatcagggccaaatgcagtgtggttaactaatagaatggccatcattattgccggccacca

SEQ ID NO: 131744 - DNA, 308 bp, Zea Mays
ttaatttgccgagtgtttttctttgccgagtgctttttgacaatcggcaaagtctttgccgattgtccgaaaaaagcattgccgattgtccgaaaaaagcactcggcaaagaaccctttgccgatgaaatctttgccgagtgttctttgccgagtgtaaaatagcctttgccgaatgtcttagacactcggcaaagaacgtaattccgatagtgtctctctacgctctatgtagtatgcacgatatcaccaggccagctgggcacggtaaacctaccccctctcttctgttggcaacgacgtgcatac

SEQ ID NO: 131745 - DNA, 671 bp, Zea Mays
cgctattgactccggctccgacctcgccggagaccgctcctcctcgtcaccggcggtcgcgcccgcctcgccggcgccctaggtctcgctcgtcggcaccgaccacatcttcctcgaccccttccacctctagacgcttgcgccacccaccctgatccctccatcgatcacactggatgctaccaaagacgaagaagctgacaatgaatgggttgttcaagggacccaggtagaccctatttcaggacatttcttcgagctccagcaggcgtcgagagtcgttgagcgctacccagagagatgaggaggagcatcactatgagaagatgtagcacagcaccaggaggtgcatcactaggcatggaacttggtcgtgtagcaccaggtgtgggaccagtggcaacaggtgtagcaccaagaggtgtagcactaggcatgggactagtggtaggagatgccacacatggaggcccctgaccaagatgatgaggctgaaaatagggatttcagagactctactatggcacgcacacgtcactgtaggaagagccacgtagtaatgccgcctgttgcaaaaagaacaagaggctgacaagacattaattaggtcacttatagattggtgagtgtatttttttatttgtctaatatatgaaattattttctccata

SEQ ID NO: 131746 - DNA, 1305 bp, Zea Mays
atgctgcgcgccctagtcggccggccacaaccgccgtcccagccgcgcgcccaagcaggccggcccccaacgccatcccagccgcgtggccagaagcaaggccccttcgtcgcctccgtccgccgcgctctcacctgcatccccatcccctccccatcctcctctgactcctccgacgactgctcctccggctcccgccgccatggccaccacgacgcccacgccaccaccgcctcctcctccacctccgtatccgacgccactgcccgcccgttgccaccagcccccgcctacgacgtcaacaagtccatgctccgctccttgtacgccgtgcagacgcccaagcggagccagcaactggagatcgaggtcgtggcggagaaaccgcgccgcctcatcatggccgacggcggtggcggaggcgatgccaagccagaggccgccctggcttctgaagggttcggcagaggggacaaggggcccaggttcgccgacctcggcgggatggaggcggtgatcgaggaactcatgatggaggtgtggtcgtgcccatgtgccatccggagatactgcatcgccttggcgttaggcctgtcgcggggctgctgctgcacggtccgcccggctgcggaaagaccacccttgcccatgccattgctaatgagacttgagtgccgttctacaagatctccgcaccagaagtcatatctagggtgtctgctttggagcagtgacctctctataattaaaaagattgactgttctacttctgacaactctttcatcaaggttttggttgagaaaatggtggcagggtgctgtcagtggaggaacaatgctgccaagagagtagcaactctggaatttgatcgcacccgaaagtcaatgggagttattgtgaaagtggactctgggaagaacttgctgcttgtcaaggtcgtcagtttcaagtgcacagcaatgacctgcttcttgctgctcatctgtttaagctgtgatgttgtccaaccatttgtgcactttgctacccacattcagttgctcgatggatctgttgtgctattggatgatggtgccaaggcactcatattatctacactccgtgagatgtccgccagtgctttgtgctgtttgggttttgcctacaaggatgaattggcagaatttgcaacatatgatggtgaagatcatgcagctcacaagtatctgctcgatccatcatactactcttccatagagagtaatacgatcttttgtggttttgttggtctaagggctcatatagccgtagcgtttgattgttag

SEQ ID NO: 131747 - DNA, 708 bp, Zea Mays
atgctagcgtccgaggccctcgccgctacgttccacctgtccaaggctgacctggagtggttcgacggaaagccctcgctcttctcgtcgcggtgtggggcaggggaggcttgcctgaaggtgttggtctacaccgaccggaaggggagtgcctgtggcgtcagctccgggcggctgctcgggaaggctacggtcccactcgacctcaagcgcgccgaggccaagcccgccgtgctgcacatctcctcaaaggccaagttgaagtttttgaatctatccttccgtgcagccttgagtgcgcctgatgaacccattcgggccgggaagggcagcccggcgacagcggagctctgcctcaccgtgcgcgcggagcctgacccgcggttcgtcttcgagttcgatggcgagccggagtgtagcccgcaggtgctgcaggtgcgcggtagcatgaggcagcccattttcacatgcaagttcgggtgccgcagcaatagtgacctacgcaggccggggatgcggccggagcgcgacgccatggagcacaaggggtggtcggtgacggtgcacgacctgaagggctcccccgtggcgatggcgtccatggtcacgctgttcgtgccgtcactgggcacggaccgcgtgagccggtccaacccgggcgcgtggctcatccttcgccccgcggccgatggcgcctggcagccctag

SEQ ID NO: 131748 - DNA, 1589 bp, Zea Mays
gtcagtgtgcgccatcgccccccactcagactcagccactgctgcagtccgccggctagtacacgtacgacaggctgtaccgaggttcagttcggtagtgtagttgtaggttgcgatggcgaggcggctgctggcggcggtcgccatagtagtcgtggccgccgcgctcgcgtgcggcgcgggcgcgcagctctcggcggggttctactcgtcgagctgccccgccgtgcacagcatcgtgcgccaggccatgtcgcaggccgtcacgaacaacacgcgcagcgccgccgccgtgctccgcgtcttcttccacgactgcttcgtcaatggctgcgacgcctcgctgctgctggacgacacgcccacgacgcccggcgagaagggcgccggccccaacgccggcggctccaccgtcggcttcgacctcatcgacaccatcaaggcgcaggtcgaggccgcctgccccgccaccgtctcctgcgccgacatcctggcgctcaccgcgcgcgacggcgtcaacctgctcggcggcccgagctgggccgtgccgctgggccggcgcgacgcgacgttccccaacagcacgggcgcggcgacggacctcccgggcccggactccgacctggccggcctggtggccgggttcgccgccaagggcctgagcccgcgcgacctcgcggcgctgtcgggcgcgcacacggtggggatggcgcgctgcgccagcttccgcacccgcgtctactgcgacgacaacgtgagcccggcgttcgccgcgcagcagcgccaggcctgcccgtcggccgacgccgacgacgcgctcgcgccgctcgactcgctcacccccgaccagttcgacaacggctactaccggagcctcatggccggcgccggcctgctgcactcggaccaggagctcttcagcaacggcgcactcgactcgctcgtgcgcctctacggcaccaacgccgacgccttctcgtcggacttcgccgcgtccatggtcaagctcggcaacatcggcccgctcacgggttccgcgggggaggtcaggctcaactgcaggacggtgaattcgaattcgtgacttcaggacggtgaatgccacccatttttaattctttttccctacaaggagttgtagaatttgcattccttcaacgatttcgaatttcgaatttgctgtgagtcagctgaagtggtatcgcctcttgtccattaactgaaaccaacccgtccagaccagacggccaaaccgctctggacagcactgcggcgtccgtccgtgggcggaccacagcagacaccaccccgtgaccgtgaggatcctagcgggaaagacgagcgttccggcgagacgcgcacgtcaagcgtgaagaattggtttctgaatgcgcctaaaaaccttggaaagcgacatgccaacaagagacatacgagttgcgtctgcctggtgtgcatttgtaatatgtggctacctctgccgcatgcacgtatctgtagatattctcgaattggctgtcacttattctcgaagtagctcattggggttgtgattttttgacgcaggaaacttctgatttttattaagc

SEQ ID NO: 131749 - DNA, 1304 bp, Zea Mays
gtcagtgtgcgccatcgccccccactcagactcagccactgctgcagtccgccggctagtacacgtacgacaggctgtaccgaggttcagttcggtagtgtagttgtaggttgcgatggcgaggcggctgctggcggcggtcgccatagtagtcgtggccgccgcgctcgcgtgcggcgcgggcgcgcagctctcggcggggttctactcgtcgagctgccccgccgtgcacagcatcgtgcgccaggccatgtcgcaggccgtcacgaacaacacgcgcagcgccgccgccgtgctccgcgtcttcttccacgactgcttcgtcaatgtgagcaagagcgaccatgccttgcttattcgttcaatatactatagtactgtactgtatgtcatccgatggccgttcgtgttccccccctgctgcagggctgcgacgcctcgctgctgctggacgacacgcccacgacgcccggcgagaagggcgccggccccaacgccggcggctccaccgtcggcttcgacctcatcgacaccatcaaggcgcaggtcgaggccgcctgccccgccaccgtctcctgcgccgacatcctggcgctcaccgcgcgcgacggcgtcaacctggtctctctcggcggcccgagctgggccgtgccgctgggccggcgcgacgcgacgttccccaacagcacgggcgcggcgacggacctcccgggcccggactccgacctggccggcctggtggccgggttcgccgccaagggcctgagcccgcgcgacctcgcggcgctgtcgggcgcgcacacggtggggatggcgcgctgcgccagcttccgcacccgcgtctactgcgacgacaacgtgagcccggcgttcgccgcgcagcagcgccaggcctgcccgtcggccgacgccgacgacgcgctcgcgccgctcgactcgctcacccccgaccagttcgacaacggctactaccggagcctcatggccggcgccggcctgctgcactcggaccaggagctcttcagcaacggcgcactcgactcgctcgtgcgcctctacggcaccaacgccgacgccttctcgtcggacttcgccgcgtccatggtcaagctcggcaacatcggcccgctcacgggttccgcgggggaggtcaggctcaactgcaggacggtgaattcgaattcgtgacttcaggacggtgaatgccacccatttttaattctttttccctacaaggagttgtagaatttgcattccttcaacgatttcgaatttcgaatttgctgtgagtcagctgaagtggt

SEQ ID NO: 131750 - DNA, 1306 bp, Zea Mays
tgtcagtgtgcgccatcgccccccactcagactcagccactgctgcagtccgccggctagtacacgtacgacaggctgtaccgaggttcagttcggtagtgtagttgtaggttgcgatggcgaggcggctgctggcggcggtcgccatagtagtcgtggccgccgcgctcgcgtgcggcgcgggcgcgcagctctcggcggggttctactcgtcgagctgccccgccgtgcacagcatcgtgcgccaggccatgtcgcaggccgtcacgaacaacacgcgcagcgccgccgccgtgctccgcgtcttcttccacgactgcttcgtcaatggctgcgacgcctcgctgctgctggacgacacgcccacgacgcccggcgagaagggcgccggccccaacgccggcggctccaccgtcggcttcgacctcatcgacaccatcaaggcgcaggtcgaggccgcctgccccgccaccgtctcctgcgccgacatcctggcgctcaccgcgcgcgacggcgtcaacctggtctctgttcgttccgtgccttgcttttccccccaatcgatgacgtagtgtagtattctctatctgctctcctctccttctcctctggggcgtcaacctggacttgtggcagctcggcggcccgagctgggccgtgccgctgggccggcgcgacgcgacgttccccaacagcacgggcgcggcgacggacctcccgggcccggactccgacctggccggcctggtggccgggttcgccgccaagggcctgagcccgcgcgacctcgcggcgctgtcgggcgcgcacacggtggggatggcgcgctgcgccagcttccgcacccgcgtctactgcgacgacaacgtgagcccggcgttcgccgcgcagcagcgccaggcctgcccgtcggccgacgccgacgacgcgctcgcgccgctcgactcgctcacccccgaccagttcgacaacggctactaccggagcctcatggccggcgccggcctgctgcactcggaccaggagctcttcagcaacggcgcactcgactcgctcgtgcgcctctacggcaccaacgccgacgccttctcgtcggacttcgccgcgtccatggtcaagctcggcaacatcggcccgctcacgggttccgcgggggaggtcaggctcaactgcaggacggtgaattcgaattcgtgacttcaggacggtgaatgccacccatttttaattctttttccctacaaggagttgtagaatttgcattccttcaacgatttcgaatttcgaatttgctgtgagtcagctg

SEQ ID NO: 131751 - DNA, 980 bp, Zea Mays
atggatgacagttcagtcaaagcagaagaccagacaatgttattggaggagggtggccaagcaatggctgcaaagccagcttatacttccctcacatcacaaatactcagacttatattcatggaccagttgcttctggagaatcgtttaacactgagggcaatatccgaatttggagggtatctactttatttttacatatgtgatcgtacaaacctgcttggagagtctgccaagaattacagtcgagatctgttccttttcctctactttcttcttatcattgtagcagctatgacttcctttaaggacatcaagcagagggatgagttcatctgtgttcagagggaaatccggcgtcaaccacaacactggacggaccacgcaaagaagcagctcagggtgatgcagcagctggacgaagaccacacgctgacgcagctcactaacgcatgggtcgaccttgtgctgggtggttccaagatccaagaagcgcgcctcatcttccaggacctgtccgacaagtacccgacgacctgcacgattcttaacgggaaagccctgtgctcgacgcacatgggaaacttcgaggacgcggaggggttgctgctcgagtcactgaacaaggacgccaaggatactaagactctcgccaacctcacggtgtgcagcctgaacctggggaaacccacaacgcgctacctcaaccagctgaagctcgcacacccggaccatgcgctggtgaagcgaatgtcctccgctgtagagagcttcgacagagcctgccaagcaatggcgtgaacctcgtttgcgaaaattacatctgttttccctaggatgagtcggaataacatcgtgatctactctgaagcaaagcagttagtgcttggataatcttactgctctgagaattttttgttctatctcaactttggctctctcatggccttatattatattatatgacgtaataaactcat

SEQ ID NO: 131752 - DNA, 2567 bp, Zea Mays
aaatattgacaaacaaactgaagagacgtatcccatgtcggtagtcttcttatggaagaaacacctgcaaccagtaaaattataccaaaatgcattttagtggcaccaatattagacaaatgctttattttttggaaagaaataaagtggaaccggaattgctaatgtggaccagcctttgccctaatcgtaaaattttcacgaaaggaagatatctctactgttgatgcttgatagaggaaagctacccaattctatctatcataattgctaatttcttagataaattataagtaaaatccaaaattatgtgcggaaggtatcatcaaataaatgttcgcaacactgaaacaaccaaaaactaacaaaggatatagaagtgaccaacgttgatagtaattcttctctattcttttagtattatatctgaatttattcaaaaatataaaagaatattctagatatatattttgttacctcacggaagaacatttctttgcagtgtttttgttaaagagaatgatattgctaaatttagagtatgcactatagaggatcccagaacattgaacaagatgttgtatctgaggcctccaggaaatgtgtgctcgattaatgaattggcagatctgtgggaaataaaactcaaaaaatccctaaaaatgttatatgtaacagaagagcagcttcttaaaggaatcgatgatgctccatttcccttgaagatggatttaatttttatatagtcaatatttgtcaagggtgatcatacgtatttttaaatcgacttgtcaatggaaggtactcaactgtaaattacacaatagtgaatgagtagtatttgacatcagatgtgaaccagaagaggagagaatcaactcaccaggaggccaagccgtcgctcccagccgacatacaccatgacctcaaggtccacgacctcatcctccgcggccccgtcgcctagaagatccatcgccacaatatccgactttctcttcctccccacctcaagctgcctccggtgtcatccacacccagtggtggagcggcagggacgagccaccggagaaatatggggatgtggtcgtcgaggagtcgcacacaatggtggtcgccgaggaggaggcgaagaggtgggcgaggccgtcgcggaggaagtacggatggaggttgatggtacggggtcaggtggtggcggccgccaggcacgatgctcactcgtctcccaagagacaggggtttccggcgtgcgtcatagcgacgtggcgatgggtagagaggggtcgtctggggatgcggtgagcgcaagcggaggaagaaccaaggcaccactctacaactggaggagatgtcgagacggaaggagagtgcgggtacagggggcggagccaacagaagtctgctgcaacgtacgttggcaggggcatggcgggctggttagcgggggtgggggagtgggcgtggagcgtggggatgacgacgaggcgaaggtcacgacaggcgtggagcggggggccgcgatggagggcgggggcagggacgggcaacgcgacgatggaggctcagatggaaggccgacgacgggcgggaggttgggcaagacgggcaatagagatatcgcgtgggcagacgtgggggcagggagacgtgggggcagggacgggcaacacgacgatggaggctcggatggaaggccgatgacaggcgggaggttgggcaagacaggcggcagagatatcgcgtgggcggacgcgggggcacgaggaagtgtggcaccgcggcaagattagcgggggggtgcgccggcgagattagcgggggagggtggagccgtggtgaaagtggtggacgccctcgttaccctctcaaggaatagtatagatttataataaccagggttcaatccaatcacaatgcatggttcatgagaagtggcaaaatgcaatacatcatgggaaaatgtacctacaagaagatcactgggacagcgatctagtgcttcgatgtcctatgcttagctgatgtactcttgcgtatggttgagaacaataatatgtaattcgattattaattcccaggaacatcagaatatttgtaacaggacaacatctttggcgattaatgggtgcctttaatgattgaacgacactacgacagtaacaagacatagtgaggaatcaaccaacagtcatacctgtgtgggacgccttggcctaattgcagattcctcaaatgcattcttgtgagaatgggcaccacgaggcatagaaaagtacatcaaattaatcatccttgtttgcattaataagattaactaccattgccaaggtgagctcatctccctgaaaggatagaaatcggtcaaattcaaattttacaaataaaacttatagaaaacccttatgctcaaagcttcgattgctctctattgtagtacaaccgaaaacaaaaggaaatagtaaggcacataccttgcaaaaacctcacagattgccacttctcatgattggattgaaccatgcattgtgattggaataaatggcaagatgtaatctgctggaagc

SEQ ID NO: 131753 - DNA, 873 bp, Zea Mays
atgacctcaaggtccacgacctcatcctccgcggccccgtcgcctagaagatccatcgccacaatatccgactttctcttcctccccacctcaagctgcctccggtgtcatccacacccagtggtggagcggcagggacgagccaccggagaaatatggggatgtggtcgtcgaggagtcgcacacaatggtggtcgccgaggaggaggcgaagaggtgggcgaggccgtcgcggaggaagtacggatggaggttgatggtacggggtcaggtggtggcggccgccaggcacgatgctcactcgtctcccaagagacaggggtttccggcgtgcgtcatagcgacgtggcgatgggtagagaggggtcgtctggggatgcggtgagcgcaagcggaggaagaaccaaggcaccactctacaactggaggagatgtcgagacggaaggagagtgcgggtacagggggcggagccaacagaagtctgctgcaacgtacgttggcaggggcatggcgggctggttagcgggggtgggggagtgggcgtggagcgtggggatgacgacgaggcgaaggtcacgacaggcgtggagcggggggccgcgatggagggcgggggcagggacgggcaacgcgacgatggaggctcagatggaaggccgacgacgggcgggaggttgggcaagacgggcaatagagatatcgcgtgggcagacgtgggggcagggagacgtgggggcagggacgggcaacacgacgatggaggctcggatggaaggccgatgacaggcgggaggttgggcaagacaggcggcagagatatcgcgtgggcggacgcgggggcacgaggaagtgtggcaccgcggcaagattag

SEQ ID NO: 131754 - DNA, 104 bp, Zea Mays
tgttcgttagaatctaggtgtttggatacacagattctcagattgcagattctgtttgaacaaactatacacattaacaccaaaccaacaaaaggtcattacat

SEQ ID NO: 131755 - DNA, 1806 bp, Zea Mays
gcgcgccgcacatgcacattgtaccactggcctggctatggcttccagccgatctaaaggcaagacggatagagacagacatgtattgcagttgaagtgttttaagtaaccgggcaatttgatcctgcagggtagggcgcgcgccatgcgctcacggactggaaactctgccggccctgtggcgtgtcggcccacgcatgtacagatgtactacgtaaccaccgcgcgcgatggggcacagggcactatataactcagaagcgcagtgtgtgctgggacaccatcgacgacagcacagctaacccaatcccaaatcaatcttccatggcgccggcgaccttgctactggcgagactggccgtggcgtgcgcgctggcgctcggcgccatggcgcagctgtcgccgacgttctacgacgcgagctgccccagcctgcaggccatcgtgcgggccgggatggccgccgccgtgcagcaggagccgcggatgggggcctccatcctccgcctcttcttccacgactgcttcgtccaggggtgcgacgcgtccgtgctcctcgacgactcgccgacgctgacgggggagaagaacgcggggcccaacgccaactccctgcgcggcttcgaggtcatcgactccatcaagtcccaggtggaggccgcctgccccggcaccgtctcctgcgccgacatcctcgccctcgccgcgcgcgacggcgtcaacctgctgagcggtccgacgtgggcggtgcagctgggtcgccgggacacgcgcacggcgagccagtcggcggcgaacagcaacctgccgtcgccgtcgtcgagcgcggcggcgctggtgtcggcgttcgcgtccaaggggctggactcgcgggacctggtggcgctgtcgggcgcgcacacgatcggcgcggcgcggtgcgccaccttccgttcccgcgtgtacaacgacaccaacatcagcgccgggttcgcggcgaagcggaggcagatctgccaggcgcaggccggggccagcgacggcaacctggcgccgctggacgccatgagctccgtcaggttcgacaacggctacttccgcaacctcgtggcccagttcggcctgctccactccgaccaggagctcttcggcgccggggggggcgccgtcgacttcatcacggcgcagtacgcgcgcaacggcgccgccttctcgcgggacttcgtcacggccgtcctcaagatgggcagcatcggcccgctcaccggctccagcggcgagatccgcgccaactgccggaagcccaactagacagacgtctacgtataccatagcatagacagacatcagtggcagtggtcagtttcgagatcgtgcgacacggacggacggtctggattcctcgacatggccagctaagagggccgtggctttttgcgtggaaagtgtggagtgcgttggaagggagcggcggaggcgatgatgattccgggcgatttggtgggtggagcgccgctgtcaggactagtactcatttcaggggagaggggagagctggggggggggggccagcgtgccgtcacacatcgatcaacccgcatatgagaccattgctgattttcattcttttttattttatttggccgcgttattctttcttttctctttcgtttctttgtgccacgattttagcctgtgatgagtctgtacgtacactgggcgattcatgattattattcttttttttttgttcaagaaatgtacacatgcatatccaatgtgcaaccgatcatgcatgattaataataactctctggtcagaacaac

SEQ ID NO: 131756 - DNA, 153 bp, Zea Mays
caaaacccatatatgtgtatcagccatatcattcttctgtccgcttgatgtgctccagcgattctttcatggacctcagccattaccaataaagcccccctttaccttctctttctattctataaaaaggcaaaaaaaattgtcatatgaaga

SEQ ID NO: 131757 - DNA, 110 bp, Zea Mays
cctaagctctataataggttatctctataatcctaccaaattgaatgcactatcaagacttcatggtgattttaatgaaccacaagggcctgtttggttcagcttttttc

SEQ ID NO: 131758 - DNA, 813 bp, Zea Mays
tcttctctctccctcacgtcttcctcccatggcgtgcagctctctctgctcctgctccctcgcggtgtctccagctccttcccatggccggcgctcgccccaacgtcgagctcggccttgccatctcccagcgcgccgccacccggagtcctgccccgacgcgcgtgctcctctgctcaccgcgcccctgcgagcttcctccgtcggccattgacgccggtgagcttatcccctggtgccgcgacctcgctgtggagtttcaagcgcgtttcttccctgctgcgcagctccctcggcgtccctcccgtgctcgatcgtagcccggtttccagagccctccctgccgcagctcgcgcccatcgtcctgcttgctcgagctcgccccggcctcctgctccttcacgaggtccttggctgcgttgtagcgagatttcagaggagaaatccatgtggactagcgaaaagaagcagccccagtacagcgtccgctagatgttcgatgaaatgccgaaaccaataattatcattgtctccgacttctgcagcaacagcgtcgttctctccatggtgctcgtcgtcgacttcgccctcacgtcgtcatggcttgacggtcgcctaagctcgtccctgctcatctactcgtcctcgccatggacatgcgtctccgcatgttgatgtgcccagatcgtcagtctcgcccttgccgttacaagcgtcgccggcgtccacagataggtgagcaggtgggtgttcaaaatatatggtgtgatcgacgccgttttagtatcgtgtgatgatttacatcattcctat

SEQ ID NO: 131759 - DNA, 640 bp, Zea Mays
cacttgtaggtacacgcttttcgacataatgattgactcaacagaggtgagagctcaaaggatgagttcttcattctgtagcatgagcctttcatctcatcagcccaaggagcaggagttggaggtggctaggctgcgcggggagctgagacagcgtgacgagcatcataaagtgcaacaagactacatgttctctttcatacagcagcaacacgagattattcaagaattatcccagcaacatggcttggatgtagtcctcccagagtttcgaccgccactgccaccgatgctgccacaattgagtccttttctatctacaatatctcaagctacgactgatgcaagtgggacggaacctactggaatggcttttgtggagtccttcgcctaccctcctcctgcaacagatagcaaccacaactctaataatccatgtagcgattttggtgcctgagtaacattgcatgtttctttgcatttaaacttgtgctttttccaattatgtatgatggtcaatatgaattgaattgaatctctatagtttgttgaacgaaagacttgaatatgtgagatgtgattgtggctttgaaaggatatgtgagctatgacgagcattgatgaatttaaagtattatgt

SEQ ID NO: 131760 - DNA, 648 bp, Zea Mays
caaattatggactgtaaagctagcgcaacaagagaggacctggaattcatactacttaatgaagatgcacagccaaaaccactgcctttgtcgctccttgcagacatcacaagtgatttctccgacaagaatattattggaaggggtggatttggcatagtttataagggattcatcgggaatcgcacggttgctgtgaagaggttgctgcgtgtactacattttgacgaggatggattctaccgagagattaaatgcctgatgaaggtgaagcaccaaaatgtagttcgatttttaggatattgtaacgagacacgaggggagatggcagggttcaacggtacacttgtcatggcacaagaagaagaacgattgctttgtttccaatacctatccaaaggagggcttaacaactatatcaatgcagatgcatcttctgcgcttgaatgggaacaatgctatcgaataatcaatggagtttgccagggcttacatcaacttcatcagcacaatattttacacatggatctgaaaccggaaaacatacttttgggtaacgacatggtcccaaaaattgctgatttcggcctatcaaggcgattgcatgaagaccaaagctacgttataactaaaaatttatgcggaaca

SEQ ID NO: 131761 - DNA, 104 bp, Zea Mays
tcatccatctcattacctcgatcttgtctttagaggtaagacagaacaaggcacgtggcggcttaccgttgtcattgagcacttgggttggtcggtcacaaagc

SEQ ID NO: 131762 - DNA, 2252 bp, Zea Mays
ctgcagcgcagaaaaaccagcggcgcagtgacaaaagcccacagcttcttctccctactcctccagtcctccgtcatccgtttcgctctctgccgccgccaccgcacaagaagctagctcctgcctgtaccgccccgtcatggcgatgctatcccgcgcagcctcctccgcggcccggcgcccgctgctgccgccgcctaggcttctggcggtgagggcgatggcgtcgtcgctcttcggccacgtcgagccggcgcccaaggaccccatcctcggcgtcaccgaggctttcctcgccgacccctcgtccgacaaagtgaacgtcggcgtcggcgcctaccgggacgacaacggccagcccgtcgtgctcagctgcgtgcgcgaggccgagcgccggatcgcgggcaacctcaacatggagtaccttccgatgggaggcagcgtcaagatgattgaagagtcactgaagctggcgtacggagaagattctgacttcatcaaagataagaggatagcagcggtgcaggcgctttcaggcactggtgcctgccggctctttgctgatttccaaaagcgttttttgccggattcgcagatctacataccaacaccaacgtggtccaaccatcacaatatttggagggatgctcaagtgccacagaagacattcacatactaccatccagagtcaagagggcttgatttctcaggattgatgaatgaaatcaagaatgctccagatggttcattctttttgcttcatgcatgtgctcataatcccaccggtgtagatcctacggaggaacaatggagagaaatatcccatcagttcaaggtgaaaaaacattttccattctttgacatggcataccaagggtttgccagtggtgatccagagagagatgccaaggcaatccgaattttccttgaagatggacaccaaattggatgtgctcagtcatacgcaaagaacatgggactttatggacaaagagcaggatgcctgagtattttgtgtgaggatgagatgcaagcagttgctgtcaagagccaactgcaacagatcgcaagaccaatgtacagcaacccacctgttcatggtgcactggttgtttctataatcctcagtgatccagaattgaagagtttgtggttaaaagaagtcaagggtatggctgatcgtatcattggaatgcggaaggcacttaaggaaaatcttgaaaagctaggttcacctttgtcatgggatcatatcactaatcagattggaatgttctgctacagtgggatgacacctgaacaagttgaccgtttaacaaatgaataccacatttacatgacccgcaatgggaggataagcatggctggtgttacgacaggaaatgttggttacctagcaaatgcaattcatgaggttaccaaaccaaattgagttagggtcctaccttctttggtcgatggaagctgatggaatgagactgtgaagcggcgtttccccccctctgttcctgacagaaataagtttagcctgctgctaccatatacatggacacagactcagatgtagacactcaagttttgagagctgtgatcctgtttcatttaatcaaaaacaattttgtttttttttcatcttgtcatggcaaatgttacaccagctgcaaaataattacaataattgatcttgatccagcgtcacagttacttcgcagattagagtttgtacaattgatcgaagaaaactgaccattacgactcaggtctctagcctgttggtggccacaaagcgtgtttcagttaggttgtcagtgtgtgcatggtaaagaaagccgatcttcagcaagaacagcggcaacgcaaaaaagaggtggattagtcgggcatggtacagaaaactgatcagcccaaaaaaaaaatctagatcaaatctcgattaaagaagcctggtgaaacttggaaactttgcacaagaaaaccccactttgcacaagaaaaacccactgcataaatgccaccaaaacgaggtaggcaaatgaatgtttaatttagctttggttggggtgcgccagcttagacagtagtgcaaagcctaagcgacactcaagagccctagtagcaagctactgttgcgagctcttccccacaaaaaataaatttaatatcgaagtagacacatggtctacatatcagatattaaactgataagaacagatactacacttgatcttagccaaaaggccgagaaaggtatg

SEQ ID NO: 131763 - DNA, 77 bp, Zea Mays
cgagctaggatgtcagttcagctcgtgaaaaaaatcaaacgagcttatccgagcggaaccgagcgagatgagccacg

SEQ ID NO: 131764 - DNA, 2000 bp, Zea Mays
gtgtaaccgtgtaagtgcaagagatgatgagcaagacgaaggcggctgtgcgaccaagatcctggcacctccctttcctcttcctgctgctcctcgcccagacttgttccccgcaggagcaaggcggcggcggcgccctccacgggagcttcgtccgctgcgtcgcgcgcctctcgccggccaccaccgacacgtccaggctcgtccacgccccgtcggccgcttcgtacccttcccttctgaacgccacgatccagaacctccgcttcgcgtccccgcggacgccgcgcccggcgctgctgctgaccccggcgaccgtcgccgaggcgcgggcctgcgtcacctgctgcaggcgccacggcctcacggtccgggcccgcagcggcggccacgactacgagggcctctcctaccgatccgtggcgggcgcccggcccttcgccgtggtcgacgtcgccgcgctccgcgacgtccgcgtggacgccgggcgccgcgtggcgcgggccggcccgggcgccacgctcggggagctctactacgccgtgacgcgcgagagcggcggggcgctcgggttccccgcggggatctgccccacggtctgcgtcggcggccacctcagcggcggcgggttcgggcccatgatgcgcaagcacggcctcggcgcggacaacgtggtcgacgccgaggtggtggacgccgaggggaggctcctggaccgcgccgccatgggcgagggcctcttctgggcgatccgcggcggcggcggcgggagcttcggcgtcgtggtctcctggacggtgcggctggttcccgtgccgcccgtcgtttccgccttcaccgtgcgccgcctcgtgcgccgcggggaccagcggcagacccaggcggctgtccgcctcctgacaaaatggcagcgcgtggcgcacgcgcttcccgaggacctgttcgtgaaggtggccatggagccggaggtcgacgacgccggcgagaggcatccatcggtgaccttcaagtcactgttcctcgggaactgcagcgggatggtcgccgagatgagcgcccacctgccagagctcgacgtgagggcgggcgactgcagagagatgagctggatccagtcgacgctctacttctacgggtacacgggcgaacaggcggccgaggtgctcctggaccggagcctgcagcccaaggactactacaaggtgaagctggactacctgacgtccccgatccccgcggccgggctgggcgggctcctcgccagggtcgtggaggacaggggcgggtccgtcgacgtggacccgcagggcggggcgatgagcgagacgccggagtcggacacgccgtacgcgcaccggcgagggtacctgtacaacgtgcagtacttcgtcaagtggggcggcgacgccaacgtgtcgtacgaggacgcgcacctggcgtgggtgcgtggcgtgcaccggttcatgacgccgtacgcgagcgccaggccccgggcggcgtacgtcaacttcagggacctggacctggggcagaacttggagggggagacgagctacgaggcggccagggcgtggggggagatgtacttcaggggcaacttcaggaggctggccatggtgaaggccgaggtggatcccgaccaggtgttctggagcgagcagagcatccctcccctgcttcagacgaatgggatgctttcggacacttgattgatgcttgtacctattacgaaaggcaagggtaatttctgaattctgcgcgacatctttgttcataagattcagcatttcattgcggcacggcactgctgatatcgcagtattgccgcccatgctatgtacagaaccaacactgaaactgcagggcgtcaactgagctactgaaatcggactgctttttacagtttctgctgatattcttttctctctatcttctctacctttcacgacatgctgtattattaatactgataaatacaggggataatgttgtttctattc

SEQ ID NO: 131765 - DNA, 1229 bp, Zea Mays
actgtccccagagcccaaacaagccagctagggttgctcccttttaacctcgcgccgccacccccttatacctcaacgcacatctccaccgtcgtccgccgccgccgaaggacggaaggagaagagggtacggccgtctcctcgcccccatggtacgccgcctccatcccatccccgtgctaccattcccatcttgtctcctttctcttcctcgtccggcctgtgatttgtgaggccaactcgcccggcgtcccgcaggcccacgagaagaagctgtccaacccgatgcgggagatcaaggtgcagaagctcgtcctcaatatctccgtcggggagagcggcgaccgtctcacccgcgccgcaaaggtgctcgagcagctcagcggccagacccccgtcttctccaaggcgaggtacacggtgcggtcgttcggcatccggcgtaacgagaagatcgcctgctacgtcacggtgaggggcgagaaggccatgcagctgcttgagagcggcctcaaggtcaaggagtacgagctgctcaggaggaacttcagcgacaccgggtgctttggtttcggcatccaggagcacatcgaccttggtatcaagtacgatccttcaacaggcatctacggaatggacttctacgtcgtgctggagcgtgcgggctaccgtgtggcacgccgcaggaggtgcaagtcccgcgtcgggattcagcacagggtgaccaaggaggactccatgaagtggttccaggtcaagtacgaaggcgtcatcctcaacaaggctcaggccaacacgttgtaaacctcacctgtgggcaaaacagctctctggtctcttctcctcctccgtgtcaacgcaagaccaccacccacctcgccaggcttttttgggtttaatttgtgttctcagccctgatgtttagtctgctagcactctgtgggtgctgttgtcgcaagatcaccaccatgtcaattatttccgtgcccttgtcgcactctgtgtgctgttgcttgaaaacatgctagtttgatctccctagcgcagcttgtgatctggcttttttgtttggttatatgcttttatctgccacctgcgttttagttcttgatggattaccatctcccggtctggaaaatagagggtgacctaaagcatctccaccagaatgagaattctcttttactgaaatattggtataggagattgagaaaaacaaaactatagaa

SEQ ID NO: 131766 - DNA, 1123 bp, Zea Mays
actgtccccagagcccaaacaagccagctagggttgctcccttttaacctcgcgccgccacccccttatacctcaacgcacatctccaccgtcgtccgccgccgccgaaggacggaaggagaagagggtacggccgtctcctcgcccccatggcccacgagaagaagctgtccaacccgatgcgggagatcaaggtgcagaagctcgtcctcaatatctccgtcggggagagcggcgaccgtctcacccgcgccgcaaaggtgctcgagcagctcagcggccagacccccgtcttctccaaggcgaggtacacggtgcggtcgttcggcatccggcgtaacgagaagatcgcctgctacgtcacggtgaggggcgagaaggccatgcagctgcttgagagcggcctcaaggtcaaggagtacgagctgctcaggaggaacttcagcgacaccgggtgctttggtttcggcatccaggagcacatcgaccttggtatcaagtacgatccttcaacaggcatctacggaatggacttctacgtcgtgctggagcgtgcgggctaccgtgtggcacgccgcaggaggtgcaagtcccgcgtcgggattcagcacagggtgaccaaggaggactccatgaagtggttccaggtcaagtacgaaggcgtcatcctcaacaaggctcaggccaacacgttgtaaacctcacctgtgggcaaaacagctctctggtctcttctcctcctccgtgtcaacgcaagaccaccacccacctcgccaggcttttttgggtttaatttgtgttctcagccctgatgtttagtctgctagcactctgtgggtgctgttgtcgcaagatcaccaccatgtcaattatttccgtgcccttgtcgcactctgtgtgctgttgcttgaaaacatgctagtttgatctccctagcgcagcttgtgatctggcttttttgtttggttatatgcttttatctgccacctgcgttttagttcttgatggattaccatctcccggtctggaaaatagagggtgacctaaagcatctccaccagaatgagaattctcttttactgaaatattggtataggagattgagaaaaacaaaactatagaa

SEQ ID NO: 131767 - DNA, 1213 bp, Zea Mays
actgtccccagagcccaaacaagccagctagggttgctcccttttaacctcgcgccgccacccccttatacctcaacgcacatctccaccgtcgtccgccgccgccgaaggacggaaggagaagagggtacggccgtctcctcgcccccatggcccacgagaagaagctgtccaacccgatgcgggagatcaaggtgcagaagctcgtcctcaatatctccgtcggggagagcggcgaccgtctcacccgcgccgcaaaggtgctcgagcagctcagcggccagacccccgtcttctccaagggtgagtactgagttctcgcggctccgtttcatgccttccgctgacggggtgcttccttctgcctgctggcggtgttggttcgtcttgcagcgaggtacacggtgcggtcgttcggcatccggcgtaacgagaagatcgcctgctacgtcacggtgaggggcgagaaggccatgcagctgcttgagagcggcctcaaggtcaaggagtacgagctgctcaggaggaacttcagcgacaccgggtgctttggtttcggcatccaggagcacatcgaccttggtatcaagtacgatccttcaacaggcatctacggaatggacttctacgtcgtgctggagcgtgcgggctaccgtgtggcacgccgcaggaggtgcaagtcccgcgtcgggattcagcacagggtgaccaaggaggactccatgaagtggttccaggtcaagtacgaaggcgtcatcctcaacaaggctcaggccaacacgttgtaaacctcacctgtgggcaaaacagctctctggtctcttctcctcctccgtgtcaacgcaagaccaccacccacctcgccaggcttttttgggtttaatttgtgttctcagccctgatgtttagtctgctagcactctgtgggtgctgttgtcgcaagatcaccaccatgtcaattatttccgtgcccttgtcgcactctgtgtgctgttgcttgaaaacatgctagtttgatctccctagcgcagcttgtgatctggcttttttgtttggttatatgcttttatctgccacctgcgttttagttcttgatggattaccatctcccggtctggaaaatagagggtgacctaaagcatctccaccagaatgagaattctcttttactgaaatattggtataggagattgagaaaaacaaaactatagaa

SEQ ID NO: 131768 - DNA, 676 bp, Zea Mays
actgtccccagagcccaaacaagccagctagggttgctcccttttaacctcgcgccgccacccccttatacctcaacgcacatctccaccgtcgtccgccgccgccgaaggacggaaggagaagagggcccacgagaagaagctgtccaacccgatgcgggagatcaaggtgcagaagctcgtcctcaatatctccgtcggggagagcggcgaccgtctcacccgcgccgcaaaggtgctcgagcagctcagcggccagacccccgtcttctccaaggcgaggtacacggtgcggtcgttcggcatccggcgtaacgagaagatcgcctgctacgtcacggtgaggggcgagaaggccatgcagctgcttgagagcggcctcaaggtcaaggagtacgagctgctcaggaggaacttcagcgacaccgggtgctttggtttcggcatccaggagcacatcgaccttggtatcaagtacgatccttcaacaggcatctacggaatggacttctacgtcgtgctggagcgtgcgggctaccgtgtggcacgccgcaggaggtgcaagtcccgcgtcgggattcagcacagggtgaccaaggaggactccatgaagtggttccaggtcaagtacgaaggcgtcatcctcaacaaggctcaggccaacacgttgtaaacc

SEQ ID NO: 131769 - DNA, 112 bp, Zea Mays
ggtagcgaggcgagggatgagctaggggcggtggtgagtgcctcacctcggggcggctgcggcgagtgcgaggcaagggagctagggcggcgacaacgagtgcgaggcgggg

SEQ ID NO: 131770 - DNA, 1388 bp, Zea Mays
ctagccgccgcgcgcgcccaccctgctcccagccagccgccgctccctgttaccgccgccgccctctgcttctcttccccccacccatctctctctcccagccggctctctctctctcctctcttctccctgcttcagccgattccaagccgctggacaccaggacgccgagcaagccaggctgcccagccgcgaccccgagcgcccctgcccgaccgcgccaagcgcgcgaccctgcgcgacgacccgccgcccagcgcacgacgccctgcaacccgcgcgcctcaagccgaccgaagccaggaaccgaccaagccgccaagatccgaagcgcccgtgaccgttcttcttcgcgagtaaaggagcatttagtcatccggcagcgacgatcctacagggggcaaacacgatctctgcccctccttccccaaaatcatctctctcccgatcttggcctccccagattcaccacctgctctcctctccggctacgaccttggctcatcctgattcggacacgcaacatggtttaccactctagtttcgctgatgatgatgggatcacaaaagcttgcagctgtcctttgcttccactgaaaactcatatcaagggcccggcaccagcctctgaccctgataaagcggacattgttgatgaagccataactttctttcgagccaatgttttcttcaaaaatttccatgtgaaatgctcagcagacaagttattgatctatctgacgttttatatcaatattgccttaaaaagactagaaggttgccggacactagctgttgggactaaagcaatcattaatctgggattggagaaagttcctgtacctggggaaccagggtttcctttccctggacttttcactcttccccagtcccaggaggaagcagaattgttgaggaattatttgaagcagataagggaggaaacaagtggaagattgctcaactgtgcatacagagctaatggctttccaaacaagtggtggttggcttttgctaagaggaagttcatgaacattgtcatcctttagacttgggctttttgtaccaactggttcaagctgttttttcactcatgatcgtgtgaagtatccacacacaacaaagatagttatcctacatcccaaagtaacaagccaaagacttcgatgataggatagatgaatgacataagataaattatttgttcccaatttgcgatgtataaccgtgggaacaataattatcatgttgtattgccttttgtaattctcaccctgctatatcagagagacgaaacctcatacgggggtatatttgtatgagtatattctacaatgatgtctaaaacgagacagttcaaatgttcttactattggtttagtattagc

SEQ ID NO: 131771 - DNA, 1125 bp, Zea Mays
atgatgaacttttcttacagcagttgaggtagtctgacaagaaaagtaatatcagaacataaatgctgtggaattatacttcttcatttggagttaaactgttaatgaatggagttaaactgttaatgaaacctttccatgggttatttactttagatggaccttttacattggtttttcccatattggttattttagttacattttggttctgattaattggtatctacgtgcggtgtattttttagacgctaataataaatgcatgaattgaatggccaggtttaccactctagtttcgctgatgatgatgggatcacaaaagcttgcagctgtcctttgcttccactgaaaactcatatcaagggcccggcaccagcctctgaccctgataaagcggacattgttgatgaagccataactttctttcgagccaatgttttcttcaaaaatttccatgtgaaatgctcagcagacaagttattgatctatctgacgttttatatcaatattgccttaaaaagactagaaggttgccggacactagctgttgggactaaagcaatcattaatctgggattggagaaagttcctgtacctggggaaccagggtttcctttccctggacttttcactcttccccagtcccaggaggaagcagaattgttgaggaattatttgaagcagataagggaggaaacaagtggaagattgctcaactgtgcatacagagctaatggctttccaaacaagtggtggttggcttttgctaagaggaagttcatgaacattgtcatcctttagacttgggctttttgtaccaactggttcaagctgttttttcactcatgatcgtgtgaagtatccacacacaacaaagatagttatcctacatcccaaagtaacaagccaaagacttcgatgataggatagatgaatgacataagataaattatttgttcccaatttgcgatgtataaccgtgggaacaataattatcatgttgtattgccttttgtaattctcaccctgctatatcagagagacgaaacctcatacgggggtatatttgtatgagtatattctacaatgatgtctaaaacgagacagttcaaatgttcttac

SEQ ID NO: 131772 - DNA, 1442 bp, Zea Mays
ctagccgccgcgcgcgcccaccctgctcccagccagccgccgctccctgttaccgccgccgccctctgcttctcttccccccacccatctctctctcccagccggctctctctctctcctctcttctccctgcttcagccgattccaagccgctggacaccaggacgccgagcaagccaggctgcccagccgcgaccccgagcgcccctgcccgaccgcgccaagcgcgcgaccctgcgcgacgacccgccgcccagcgcacgacgccctgcaacccgcgcgcctcaagccgaccgaagccaggaaccgaccaagccgccaagatccgaagcgcccgtgaccgttcttcttcgcgagtaaaggagcatttagtcatccggcagcgacgatcctacagggggcaaacacgatctctgcccctccttccccaaaatcatctctctcccgatcttggcctccccagattcaccacctgctctcctctccggctacgaccttggctcatcctgattcggacacgcaacatggtttaccactctagtttcgctgatgatgatgggatcacaaaagcttgcagctgtcctttgcttccactgaaaactcatatcaagggcccggcaccagcctctgaccctgataaagcggacattgttgatgaagccataactttctttcgagccaatgttttcttcaaaaatttccatgtgaaatgctcagcagacaagttattgatctatctgacgttttatatcaatattgccttaaaaagactagaaggttgccggacactagctgttgggactaaagcaatcattaatctgggattggagaaagttcctgtacctggggaaccagggtttcctttccctggacttttcactcttccccagtcccaggaggaagcagtaggactgattaagtctgcaaaacgactgtacccatggattccagtgataaattgacgattgcgcattctgtgtctgaatgcagaattgttgaggaattatttgaagcagataagggaggaaacaagtggaagattgctcaactgtgcatacagagctaatggctttccaaacaagtggtggttggcttttgctaagaggaagttcatgaacattgtcatcctttagacttgggctttttgtaccaactggttcaagctgttttttcactcatgatcgtgtgaagtatccacacacaacaaagatagttatcctacatcccaaagtaacaagccaaagacttcgatgataggatagatgaatgacataagataaattatttgttcccaatttgcgatgtataaccgtgggaacaataattatcatgttgtattgccttttgtaattctcaccctgctatatcagagagacgaaacctcatacgggggtatatttgtatgagtatattctacaatgatgtctaaaacgagacagttc

SEQ ID NO: 131773 - DNA, 1184 bp, Zea Mays
aaaaatcaaccgttttctagaagggtctcaataggccgccagccgtggaggacaggaggagacctaggtacccaccgcggcatcgcgccaccgcccaggcacccacggccccacgcctggacagcccgacgcccgcagcatgcagcggcgctggcgcgcagcgctgctcgcctagtcactggaggccagagccgccaccccgctgagccagaccgccggacgagcggagcccgcaggccgcagcgatgctcgccccgccgacgcccggacccagagcaccgcgcccacgggccaccgccgttgtccagccgagcaaccgtgagccaagcagagcaggggtttaccactctagtttcgctgatgatgatgggatcacaaaagcttgcagctgtcctttgcttccactgaaaactcatatcaagggcccggcaccagcctctgaccctgataaagcggacattgttgatgaagccataactttctttcgagccaatgttttcttcaaaaatttccatgtgaaaagctcagcagacaagttattgatctatctgacgttttatatcaatattgccttaaaaagactagaaggttgccggacactagctgttgggactaaagcaatcattaatctgggattggagaaagttcctgtacctggggaaccagggtttcctttccctggacttttcactcttccccagtcccaggaggaagcagaattgttgaggaattatttgaagcagataagggaggaaacaagtggaagattgctcaactgtgcatacagagctaatggctttccaaacaagtggtggttggcttttgctaagaggaagttcatgaacattgtcatcctttagacttgggctttttgtaccaactggttcaagctgttttttcactcatgatcgtgtgaagtatccacacacaacaaagatagttatcctacatcccaaagtaacacgccaaagacttcgatgataggatagatgaatgacataagataaattatttgttcccaatttgcgatgtataaccgtgggaacagtaattatcatgttgtgttgccttttgtaattctcaccctgctatatcagagagacgaaacctgatacggggtatattctacaatgatgtctaaaatgagacagttcaaatgttcttactattggtttagtattagc

SEQ ID NO: 131774 - DNA, 1929 bp, Zea Mays
gcagttcataaaaatcaaccgttttctagaagggtctcaataggccgccagccgtggaggacaggaggagacctaggtacccaccgcggcatcgcgccaccgcccaggcacccacggccccacgcctggacagcccgacgcccgcagcatgcagcggcgctggcgcgcagcgctgctcgcctagtcactggaggccagagccgccaccccgctgagccagaccgccggacgagcggagcccgcaggccgcagcgatgctcgccccgccgacgcccggacccagagcaccgcgcccacgggccaccgccgttgtccagccgagcaaccgtgagccaagcagagcaggggtttgtgatttgaagtttgatctgaagttttgacttgaatttgattatttatttgatagtaatctcatatttaattataggaataaggtggacatgatgtttaattatattgcttgatgttttcgatgtgattggtttaaatttttttgttatagtcttagtagcccccctcttggatcaatcctggatccgccactgattactgctacgaatatatgtacacagtaatataatctctaagctcctcatgttgctacatttgtaaacttcaatatttcattactgctacaaatctatgtacggttccagttgactatggtagcttccttgctttctgttcttgtcttaccagtctgagctaaagttttatttattaaattgtgatgcaatgttgcatcaatgctggacttcggcatttgaattttacgtgcactctggtttttatgttgtttactgtccatctttctcctaatcaataaaatgctttgattactattgacataatgtgaacttcgatttatatgttgtttattatccatatttggccctatccatgaaattatttgattcatgttcatataatacttagaagaatgtaatgtaagcctcaaattctctaatttgagttgctatccagtttaacacattaatttaactgtctaaatgtatcgtttaaaaaaactcgcgcaaagcgcgagcaagttactagtaataaatgcatgaattgaatggccaggtttaccactctagtttcgctgatgatgatgggatcacaaaagcttgcagctgtcctttgcttccactgaaaactcatatcaagggcccggcaccagcctctgaccctgataaagcggacattgttgatgaagccataactttctttcgagccaatgttttcttcaaaaatttccatgtgaaaagctcagcagacaagttattgatctatctgacgttttatatcaatattgccttaaaaagactagaaggttgccggacactagctgttgggactaaagcaatcattaatctgggattggagaaagttcctgtacctggggaaccagggtttcctttccctggacttttcactcttccccagtcccaggaggaagcagaattgttgaggaattatttgaagcagataagggaggaaacaagtggaagattgctcaactgtgcatacagagctaatggctttccaaacaagtggtggttggcttttgctaagaggaagttcatgaacattgtcatcctttagacttgggctttttgtaccaactggttcaagctgttttttcactcatgatcgtgtgaagtatccacacacaacaaagatagttatcctacatcccaaagtaacacgccaaagacttcgatgataggatagatgaatgacataagataaattatttgttcccaatttgcgatgtataaccgtgggaacagtaattatcatgttgtgttgccttttgtaattctcaccctgctatatcagagagacgaaacctgatacggggtatattctacaatgatgtctaaaatgagacagttcaaatgttcttactattggtttagtattagc

SEQ ID NO: 131775 - DNA, 431 bp, Zea Mays
ataaaaaatcaaccgttttctagaagggtctcaataggccgccagccgtggaggacaggaggagacctaggtacccaccgcggcatcgcgccaccgcccaggcacccacggccccacgcctggacagcccgacgcccgcagcatgcagcggcgctggcgcgcagcgctgctcgcctagtcgctggaggccagagccgccaccccgctgagccagaccgccggacgagcggagcccgcaggccgcagcgatgctcgccccgccgacgcccggacccagagcaccgcgcccacgggccaccgccgttgtccagccgagcaaccgtgagccaagcagagcagggtcttagtagcccccctcttggatcaatcctggatccgccactgattactgctacgaatatatgtacacagtaatataatctctaagctcc

SEQ ID NO: 131776 - DNA, 383 bp, Zea Mays
gtggtattaatggagaaagatcagaaatagctgaaattgaagcagcatcaacaggtgaagctgctcggcttagagctgctctccggcgtgctccacccggcgctgttcggcaacctcaccagccttttgactgcttacacagacctgttttgattagagtcgagcagcgattcttccatttcggaccacgacctagctaaaggctaatggttccaaatgtctgaagtaccgaagacagggctagctcctcgttttttgtcatgtcaaataaatcgtgtatgattgcaacaatattggcaaaatatcgttgtgctttatattttgatatactgtgaacaaaacaagtgccctatgagaccatcatgatttatgcattttcaaac

SEQ ID NO: 131777 - DNA, 1023 bp, Zea Mays
atggcgtggagcggccgcggtggaagtaagaaatacgagattcacagagggaggagactagagtttggacgcaacagcgtctgcgtgtgcctgtgtggggggcgctatcgcggcgagcatcatgggggtggaggagggggcgagggcacgacagaggtgggcgcgactgtcgcggcgagcatcacggggctgtcgcgggcgaggaccgtggggtgggggcggctgcgggggcatccacgcccttccatctacggagagcagagtgggagcgaggatggcgggggttgccgcgggggcatcctggaatggcgccctttccatccacagatagcgagcgcgggacgaggatcgtggggtgagggcggctacggggacatccacgcccttcccatcgacgggttgcggagtgggagcgaggaccgagcaactgaaatattcaagaaaattattaagttgctagcttataaactgcctgggggcggatcgcctatcgactacagcacgtggattggcatcctggacccccttgtttcccagaacggtgaacgggtcgagatgtttacttcgatatatatgcggcctagtttggtagacgatcaccatcagctaatcacctctgccaagaaccgaagcacatgcgaaagtaaaaaaactcaacagtatttactgaagcacatgcacggggcgaggatggcggaggcgttggaagccgggcgaccagcaacctccctgccgctctgcaactctgctcgtgtcccgatagactcagttctcagcggccaagtaaaacgcggcaagggatttgaatgtcacggatggctatcggtgcgcggtttggaatccgagtcgagtggaatccgattcgccgtcgagacttcagtcggcccttacccgtgttgttttgtctatcgcgcgcggtcgcggacgcggaggaagaggcgaagtcgaaacagtgtaaagccgctgtgcggcaagcctaacggtggaggaggggaggagccggaaagcgtgagggctgcgtga

SEQ ID NO: 131778 - DNA, 480 bp, Zea Mays
atgtggcctcctctcaattcagaccctccaccatcggaaaaggctagaaaggcaactagggtttcctgtctccaccgaagatcgtcgccctcatccatctctcgtctcctgtcttcctcgccctcatcggaaaagcagctcaagagcgttaaaacagctcgttgttttgggatttgttgcctcaagtttcatctagctacctccaacaaatccttcaatctccatggctacatcgtgacactgtatgggatgatggcactcccaatggaaaggaggaagaggtgtcttatgatgcagctaaggaagtgaaacagcttatatgtgaacttagatctctgtgttgaattgattgtgtgaacttgtctttgtgaaacttttgtgtgcgaacttgatggctttgtgaaattgttgtgtgcgaacttgatgactttgtgaaactgctattttaagatttgatatctttgtagaacttttatgtgc

SEQ ID NO: 131779 - DNA, 742 bp, Zea Mays
aaaccggatgtcagcagcaacagaacacctacatgaggaaaacaagaatagtcaggagaccgggggagcacccgaatatacctgcaggcagcaagctgcagcaccctgctttcaccgtaattctatagagaactcaccatacgaaccttcctcctccaactccggcggctgcgcctgcgtcggtcccgcaccgcggtcgcgaggacctcgggccgcaggaccagcggcgaccagaggccgctctggctgtactcgaagccgaactcgctggtgtcctcgaacttgccgaggagctcgtcggagaggtccctcggcaccacctgcaccaagccacagctgctgccttccgaggacgacgagtccgccgcttcctcggcagacggagacaggtcgggcggcaggctcatgaggtccagcaacgacggtgatggcggcatgctggctcctgtcctgatcaggcaggcaggcggacagtaagaatgcatgaggaacaaacaaggatgggtggatggagatggataggtagataggtgagctgttgtactttcttggtagcggggcaagatgcctgtggtgtgggggcactgcgcggatggccggatgggacggacggaggggctcctgctgcctgctgctggcttgcttgttgtctttgggtagatcaggatggtgaaaggacctgctttgttggtttcagtgtcattccgtgttcagaacgtgcaaattcaacttcaccaaaata

SEQ ID NO: 131780 - DNA, 2969 bp, Zea Mays
cacaactggtttcctgatagcaagtttatttcacgattgacaacaaagacttcagtaactgaattgaaaacaaggagttcattagatatttgtttccagtgtacttaatgtttgcttttgaggacttgaataccactaagtctccactcctcccctcatctaattgtttaatctgatacacggacacttggctttgcaaaaatttccctccagacaagctgcatctctccccccctcttgaatcttgatccatctccgaggccacctctcagaccaaaagatcgcatgatctgcagagatctccatgcccagtccaagaactcacagaccagccatgcctagggctgaacgcttgctactccttctcatgctgtccattcctttctcccatgcctggtccatcgattacccgagccccatcgccaaccttccttctacgtgggccaacaacaaagctactatcccctacaacgcaacctatgccgacggttccgcgatcagagccattcttgtcaggcagaagcctgccgggtttggtccatcctttggctgcggtttcatctgcgctactgcgccctgcaagggcttcctctttgcagtcttcttcatgtcaaccggagatcctgtcttcaatgcctcagccacgccaccaaggatcatatggacagccaacaggtaccgtccagtgaaggagaatgcgtcgttgcagtttagcaaggatggagatctcgttctgagagacctggatggttcgctggtctggtccacggctacatcaggcagctcggtcgttggcatgaacctcgccgagactgggaacctgatactcttcgacgtgatggggaagacggtgtgggagtcgttcgcgcacccaaccgacactctcctcatcgggcagtcactgtggcaagggaagagactcagttccactgcttccacggaaacaaacagtactcaaggtcagttctacctcactttgctcggcacaggcctctatgctttcaccgacgacgcagatccaccacagctttattaccagaaaggcttcaatgtaactgatgcgatactagttcaatcgaagagaaacgtgtcctctgaccaagccaagaacagcacggcttacgtttccttcctgcaagggagcttctcagcattcctcagcttcaacagcacagctatcaagctattcgatatctctctgcccttgccgtcttcagcacagttcatgagtctcgaggatgatgggcacctcagagtctatggatgggatggcgcttcatggagagctcttgctgatgttctgcatgtgtaccctgatgaatgcgcgtaccctacagtgtgtgtagcgtatggaatctgttcacaagggcagtgcagctgcccaggcggaagtgacgacgacgacgagcttttccgtcagctggatgaccggaaaccaaacctgggctgctcattagcgactcctctgtcctgtgatttgatccagtatcacaagcttatcgcactcccaaacgtcacatacttcagtcttgcaaataacaactggacatggactaccgatgaagagagctgcaaggaagcatgcctgaagacatgttcatgcaaggcagtgtttttccagcatcaaggcgatgtttcaaatggctcctgccatctggtgccagagatcttctccctcatgaattaccatccagaggtggctggttacaatctatctgcatatgtcaaggtgcagatgttaccaccaccaccatcaagtagcaagggcataaacgcaactgcttaccatgtcggcgttcctgtcctggtggcagtcatctgcattctcattctcatggtcagaagaacagtagtgaagagcctaggcctgcaagaggacgacgatccgttcaaaggagtgtctggaacgcctacacggttttcgtacagacagctgcgagaagcgaccgacaacttcagcagaaagctggggcaaggcgggttcgggccggtgtacgagggaaagctcggaaacgccaagatcgccgtcaaatgcctgcgcgacattgggcacgggaaggaagagttcatggccgaagtcgtcaccatcggtagcatccatcacatcaatctcgtcaggctcatcgggtactgctcggacaagttccacaggctccttgtctacgagcacatgagcaacgggtctctggacagatggatcttcaggaagaaccagagcggctcgctcagctgggcagctcggtacaagatcatcctagacatcgccaagggtctggcctaccttcacgaggaatgccggcagaagattgcccatctcgacatcaagccggggaacatcctcctcgacgacaggttcgacgcgaagatctcggacttcggcttggcgaagctcatcgacagggatcagagccacgtgatgaccaagatcagagggacgagggggtacctcgcaccggagtggctgtcgtcgacgatcaccgagaaggccgatatttacagcttcggcgtggtcgtcctggagatcgtgagcgggaggaagaacctggagaacaaccagcctgagggcagccctaacctagtcaatatactgcaggagaaaatgaaggccgggcgagctctggatatagtggacgaccaggatgaagacctccagttacatgggtcggaaatggcggaagtgatcaagctggctgtctggtgtttgcagcgtgactgcagcaaacggccagccatgtctcaggtcgtcaaggtcttggaagttggaaggtgccatggacactgacagtagtgcaggccatcacgatgcaaccggcagagatggtacttctgatgcttcatcatcccctttgtccccggtgccggtgtctgcaagataacgtgttccattctagcagaagtaggggggaagggctcctctgcaattcagttgtaaccactgtagtaccgtgtgtagtgtctttgtaaatctg

SEQ ID NO: 131781 - DNA, 412 bp, Zea Mays
ttgtagagactcaattagagatggcaatgggtacccgcgacccaatacccgatgggtatttactccattagggtatgtatgtgggctaaatattctaccccgtgggtctgttattgggcaaaaatcttcacccaatgggtaaacgggtattagaacgttctgccttcacccatacccgttaacccgtgggtataaaatacccaatataaacttagcccaagcatgaactttgactttagtcatccatcttttttactatttaacatccttttaggccataatgttatagaaggcttacgacaatttaatgaccatgtaatggaacatgtaatgtgctatgtagtactatcctagtgttactactttatccaattatctttggtgtgttgaatggatggttaaatgatgctag

SEQ ID NO: 131782 - DNA, 3378 bp, Zea Mays
aaggttgacatgtcagcggctggcgccatgggccccacccgctctcctccctagaagacgaaagctgtggtcgggctcgggcgtcctcctcctctcctccctccctccctcacccgcttcctcttcctcctcctcgcctcctccgcctcctttccgtccggccgtttcttcccaagtggcgccggtcccggtcccggtcccactcccagcaggtgccagcgcgcaacgggacgccggcagtgggtacacccgcgcgagcgcgaccatttccgcgccgtcgccgcccgtctcctacctaacctaacgcgcccccacccaatcgatcgcctatccgcctcgcctcgtctcgtctcgtcaggcgggggaggggtcggtcaaaggaacgggggcagggattccgttcccagttcctcccagccaccgaggagcgggcctcgacgctcctctggtcctgtcctcttcgccatggccgcgccggcctcgtcgccggtcgagttcctgctccaccgcccgctgccgcgccagcggaggaggccgccactggccggagcgttcttcgcgcccacggggctgtccggcgcaccgctgctccgcgcgctggcgtcgctcgcggcggacctgctggggaccccgccccctgccgtcgcagcgacggaacatcgacgcgctcatgcggaggctcgcgctgctctccgcgctcctcgactcgctcctgctcctcctcgccgacgaaggcgaggccgccttctccgacgccgccaacctctgcttccgcgagctctacgtcgtgctcttccgcgccgacctgctcgtctcctacgtcgcctccgccggccgcgcgtgggcgctgctacgggcgccccagctcgccgcctcgttccgcgaccttgacgccgagctcgcagtcgtcctcgacgtcctacccgccgcctcgctccgcctctcgtgggacgccgctcagtacctcgacttcctccgcgcgcgctgccgccgacgggcgccggcccactaccacgaccccgcggaggccgctctcggagactgcctcctcgccgccctgcgccacttcgagctcggccagccgccggacccctccatgctccgatccctcctccgccaaatcggcatctccgacgccgcttcttgccgctctgaaatcgagtacctggaggagcaaatcttgaaccaagaggaggacgccgacctccccctcatcggcggcgttgtcgccttgctccggtactgcctcttctcccttttcgaccccagcaacacaaagtcgttgcgtgtttggctgtcggtggggaacagacagcggccgctctcctggagctgcagcgacgacacctccttctcggtgcccaaggagttctcctgcccgatttctttggatttgatgcgcgatcctgtggtggtctccaccggacagacctatgaccgtccgtcgatcatacagtggatcgaggaggggcattccacctgccccaactccggccaggccctcgctgacaaccggcttgtgccaaaccgggcgctccgcagcttgatttcacagtggtgcggggtgcatggctttcagtttgattcgccggagagcaacgaggggatgattgaatgtgttgccgtgtcgtgcagcagcaaggcagcaattgaggcaaacaaagccacagcaaggattttggtcaagatgctgatggagggatccgataatgcaaagccagtcgcagctagggaaatccggttgttggcaaagactgggaagcaaaaccgggcgttcattgctgagttgggtgcgataccgttgctatgcaggttgctgctgtcatcggattggatggcgcaggagaacgcagtgactgcattgctcaatctatcaatctttgagccgaacaagacccggattatggaacaagaggattgcctgcatcttatcgtcagtgtgttgaagaacggtttgacaacagaggccaaggagaatgctgcagctacgctcttcagtttatctgtggtccatgactacaagaaaaagataatgaatgagccaggggctgtggaggagcttgcgtctatgctgaccaaggggacagcaaggggaaagaaagacgcagtgatggcattgttcaacctctcaacacacccagaaagctcaggacggatgcttgagtcatctgcagttgtatctttaattgagtcactgaggaatgataccgtttcggaggaagctgctggtgctctggctctgctgatgaagcagcctagcatcgtgcaccttgttggtagctctgaaacagtgatcactagccttgttgggttaatgaggcgtgggactccaaagggcaaggagaacgcagtgtcagctttgtatgagatatgccggagaggtggatcgacattggcacagcgcgtggcaaggatacccgggttgaacacggtaatgcagaacatcacgctcacaggaacgaagcgtgccaagaagaaggcaagcctgatcgtcaagatgtgccagagaagccaaatgccatcggcgctggcgctaggaagtaccttggcagtggtggatcattcgttggtagggaacagcagattgaggcgcgctccaagctttggcagcggggagttgtcaaaccctgtgtcaatttcagtgcctgtgccttagatggagaaagaacccccaaaaaaaaatccatttttgagagcccacataattgtcaccgcattcagtgagttttgtccctgaaattctttcattgcgtcctcaaatgaaggtatacagatttaatccaaagaatgaaatatatcagatgtgctcgtttgtatgtggctgtgaataactgtgcagatatataggtttacaggtagaattctggcttgacgtttccttggcaagcctggaaatcatttatttatttttgttcagtttcggaaacaccgaatatgtatgcgacttgctgtaaactgttcccataatttagtactcgccgcatttcacaaaatcgtaagtcgttttggctatgcgtaaggtatgtacctggaaaagccaaaacaatttacaaatggaattgtaataaaacagaggaggatgaattatcaacaaatgcgcctttagcatatacgtacatgtcttgctttcgatcgaccaaagagaactggtgctgcttgttgcatagcagagggaatggatgccaatctgaagaacatcccgagaaaggcagagcgctttgattcttgaagatatatttttcccccactgaagacaaccttcttgcaaaagaattgtcctctcaccagaatctgaatctcctccagaaagattatatacgtgtgcatgccaatctatgctggactatgaacagaaaccgtgtggaatattgtgttccc

SEQ ID NO: 131783 - DNA, 2317 bp, Zea Mays
gcggagcacaagagaatcgagaacgtcaccaaggccgtctgaaagcgaaaaggccctttgcctctcgctctaccccaaaccacagcagtcagcagcagaccctcgccatgggactgagatccccgctcgtgctcctgctgctcctcctcttcctcgccgctactttccgtcccagcgcggccgctttggcccctccaacaggcagcatcgtgaagcagctgtcgtcggtcgtcaggtggccgcgggccgccccctcgacgcacgggcccaaacagcccggccacccccagtacgccgatggccacgtgggggtagccctgcaatttgagagcggctactttgtagagacacttgttgagggtgacaagcttggtgtcacgccgcacaccgttagagtatctcctgttgagggcggggagctccttgcggtcgactcggcacatagcaacattgtgcggataaccccgccactttctgagtatagcaggggaagacttgttgctggttctttccagggccattctggtcatatagatggtaaaccaagtgatgcccgattcaagcgccccacaggcgttgccgtggatgatatgggcaatgtttatgttgctgatacagcaaacttggcgattcgaaagattggagaatcaggagtgaccaccatagcgggtggtaaatcgaatatcccaggatacagggatggccccagtgaagatgcaaagttctctacagattttgatgtggtgtatgtgaagaaaatgtgttctcttctggttattgaccgtggaaatgcagcccttaggaagatttctcttccacaagaagactgtacttaccaggattctgcactcctatcttcagatctcatattggtcattggtgctgttgtggctggatatatcttctctggtttccaacacgggtttggattctcaggctccgagaaggtagaggcacctgaaaacgagcagcacgagagcagcacaatcgggaagccacctctggtggtggagagcctgaaagaggaaccaggagctgggtggccatccctcgggacgctaattgccgatctcttgaaacttgccatcgagggagtggggaaactgctactcagcgtagtccctcaacgcatgcaacacgggaagaggaagacagatctcaccccgctcagggacaggctggtgatgcccgaggacagagaggagacggcagcggcggcgcagaagctcagcagcacaccaatgcggcccgagacagcccacgcccctaaccccgtaaccgagacggcagcacccaaggccccgaagagcacgaagccatccaagctcagggattcttcgaccctgtcaagcaagcacaggtcctccaagcggcaggaatacgcggacttctacggcacctccgagcccgctcccgtaggtgccgccgccaaggtccccaaggacaggctccgccaccgccaccaccaccgcgagaagagcggggaggtcgcctacggcgccgcccatcacgacctgaagcccgcggaagcgaagcctgccgattacagcgatccgagctacgatccgtacgtgaggagcaagtatgccgccgagagtgggtacaggtattgacgtgtcgctagctgtcctgtcctgtcctctcctgccgggggaaacagcggaatgaaaacctttcgccggcgtctgcctggcaatgttgtaagtgtgaagctatatagcctccacaagcgcaaagcgaggcgcaaacaaagctgctgctggtgcctggtgctgctcatggtttggtggtgcccatgagatgtggcaagtagtcatcctagttaggttaggtatggacggccaggacggggttggcatctggcccggtttcaggatatgctaagtgcgattttcgcagagggcgacatgtagagcctggcggcggttttgatttcgtatctgcagttcgatgtatccatccatggatcgatcccttgtgcctgcctgcctctgcctggcggcgcgtgtcggcacctgacagcaggtgatgcctcgtgacgggcagttaacccttttgccggtggctcactgatctgctgcctgcctgcctggcccggacgtctgttcgctgtccctgaatgcgatgcatcgtctccgtttcggtctgcacgtcaggtctagttgtgccgaagctgtagccatcacaggccgacctggcgtcgagagaagcgaggatggctgtgtgtagtcaatctctgtcgtactactactgtccactaccagctttggtggcgtcggtccgcatggcatgtgactggaataggctccagttagag

SEQ ID NO: 131784 - DNA, 1712 bp, Zea Mays
cccctctcatcgcggcacaggcgcaggcgagcggccgtccgtccaggcgtccgtccaagcgaactggttcaatcgtccaggcgagcggccgtccgtccatgcgttggattccaagaaccgatggacaaggcgaccaagcttttgatttatggtgcttcagcacacttgttgttgtccatgatggccatggttattgagtctagaaaaagaaaaagagatagtagaagagtcggtattacttatgggccaatggagtaaagggataggatgagacttgattatcttaacactaaaatatggatgagtgatacaacatgtgtgaacatgcttagacttggtaggtctagtttctttcgcttttgtaagggctttagagaccgaggtttacttgaagatacaatacacatgtgtgttgaggaacaagtggccatgtttttgaacacagtgggacagaaccttaggaataggttggtgggaacaaattatggtagatctggtgagactgttagtcgctacttcaacaaagtgcttcgtgctattggagagctacgagctgaacttattaggccaccatcattagagactccatccaaaatagcaggaaatccaagatgggatccctactttaaggattgcattggagctattgatggcacacatataagagcttcggtttccatagatatggaaccttcatttcgtggtagaaagtcttatgcccctcaaaatgtaatggcggtcgttgattttgatcttcgattcacatatgtcttggctagttgggagggttcagcacatgatgctttagtactaagagatgctttagagcgagagaatggccttcgtgtaccacaaggaaaattctatctagtggacgctggatatggagccaaacctggatttttgcccccttttcgtgttgtccggtatcacttgaatgaatggggaaataatccggtacaaaatgagaaggagttgttcaaccttaggcactcgtctcttcgtgtcaccgtagagcgtgcatttggttcactgaagagaagatttaaaatacttgatgatgccacaccattctttccattttctagtatgaaacatagattgatgagggagatgttaatgctgttcctagtcctatagatgatattggggcttcatcctcagctcctagacctaggaagaaggcaaaggttactagtaatgaagaggcagggctgattggagcattcaaagatggtgctgaaaggcttgcaatggctattgagaaggctagttcagatgacctaccacctgacttgcttcaaacattgcaaagtattccaggttttgatgacacacacaaggccttttactttgcatatctagtgaaaaatcctggattagcaaggcagttccctactctcccattgacatatcagataagttttcttgctcggttcgttagtgagacctttccttagattatgaggaccgggaattaggactatgctggaggttaagtggaaattagaactatgttgttcttttgttatgtaaaccatgaccaatactttgttttcaagtactggtattgaaataatggctttgctatgtcgaaatactcggtttgttatgaaatactgggtttgttatgaccaacatggatgctcggtttgtttgttttgaaatactgggtttgagattcattgtaatggtgtatgctcagtttgttt

SEQ ID NO: 131785 - DNA, 648 bp, Zea Mays
aacggatggatccgccccgcccctctcgcggccgtaaaaaatcgtgttgcctcccatccttacccaatcccctctcatcgcggcacaggcgcaggcgagcggccgtccgtccaggcgtccgtccaagcgaactggttcaatcgtccaggcgagcggccgtccgtccatgcgttggattccaagaaccgatgatattggggcttcatcctcagctcctagacctaggaagaaggcaaaggttactagtaatgaagaggcagggctgattggagcattcaaagatggtgctgaaaggcttgcaatggctattgagaaggctagttcagatgacctaccacctgacttgcttcaaacattgcaaagtattccaggttttgatgacacacacaaggccttttactttgcatatctagtgaaaaatcctggattagcaaggcagttccctactctcccattgacatatcagataagttttcttgctcggttcgttagtgagacctttccttagattatgaggaccgggaattaggactatgctggaggttaagtggaaattagaactatgttgttcttttgttatgtaaaccatgaccaatactttgttttcaagtactggtattgaaataatggctttgctatgtcgaaata

SEQ ID NO: 131786 - DNA, 2194 bp, Zea Mays
gcggaaaacaaatccgtctcttcccaccaccaaggcaccaaccgccgccatcgtgtgatggccgccacgcccgacgagcggaagcaggagaggccgatgaggcccgcgacgtcgccggcgagcgtggtggcggacttcgccatgggaggcgcggccgccgtggtggcaaagacgggggccgcgccggtcgagcgcgtcaagctgctgctccagaaccaggccgagatgctgcgccgcggcaccctcacgcgcccctacaggggcatcgccgacgccttcacccgcatcctccgcgaggagggccccgccgcgctttggcgtggcaaccaggccaacgtcatccgctacttccccacccaggcttttaactttgcattcaggggctatttcaaaagcttttttggctatgacagggagaaagacggaaagtggaagtggttagctggaaatgtagcatctggcagtgctgccggagctacaacatcattgctgctataccatctagattatgcaagaacaaggctagctactgatgcaattgaatcacggggaaccaagcgccagttcagggggttgctggatgtttacaagaagacacttacaaccgatggcatgtctggactataccgaggtttcagtgtgtctattacgggaatctccttataccggggtttatattttggtatctatgatagcatgaagcctctagttctagtaggcccattggaggggaatttcttcgccagttttgtgttgggctggacaataactacgttctctggggcttgtgcctatccattcgacacggtccgtcgtagaatgatgttaacttcaggagaaccatttaaatacaagaacggtttccatgcagtaaaactgatagtttcaaccgaagggttcttcacattattcagaggtgttggtgcaaatattctctcagggctggcaggggctggagttctttctgggtatgatcaactccaacggttggcaagccggcatgatcaaaattttgagcacaatatgaaaggggcattgaaatgatgtgcatatgatatgaatagattcagatccttggttgaagtccagatcattcaaatgggatgctcaagcaagaactcctgagcctgaagaacttcgcaaaaaatattgggggaagaaaaaggaaaagttttcctggagatgaatttcacaaggagatggaatcattgcaacaaaagataactcttgtaaacagagagtgctgaatatatattttaatgtgtagatctaatccttcaagtatgagcacatgtacatgttggtgtttcttcgattgttagaggcaatagtatcctatcaatgtgaaatgtaaatccaaatccttcagtaggtcatgaccaagctatttttctaaaaagggatggacatcttgactcttgaggaaggttcttcagttacagatttggatttttgctaacatcatatgagcatgtcatgtgcagatgcaaatgacatttttgcaggagtgtcagaccttttttgaagtgacaggattcaagtggatatcgtatccattaatctgtgcatcactcaaaagaagagcaaaggagcctctaatccccatctgtctctgattctgatcatctccagggagccgagtaattgccactgcgctgggactgaacaactgaaaggagggaggctgatgagccgtgtgagctcactgggaggtgcagtcgccatggtgaccaagatggggaccatgccagtggaatgtgccaagctgctgctcctgaagaccagaactatgatgagatgaggctaggggccctcacatactcatacaatggcatcaacgacacattcactcacatcttccacgagtagggtgccgcttcaaccaggtcaatgacatccactacttcccacccaatgaggagctaaatacatctaagcttccttcctacttctggcttggatcacagactaatggacctgaatgttgtttctaagtggtgcacaggcaccagctctgcccccgctggtgtccttactcgtgagctttcatgagatgatacagataaccttgagtgttgcttttaggttgtaatattatcagtgacaaagagttcctgtcattatttcattcaatcattacttgtatgactgttacttcatacttttgttattgttgctgccctgatggttgagt

SEQ ID NO: 131787 - DNA, 2141 bp, Zea Mays
gcggaaaacaaatccgtctcttcccaccaccaaggcaccaaccgccgccatcgtgtgatggccgccacgcccgacgagcggaagcaggagaggccgatgaggcccgcgacgtcgccggcgagcgtggtggcggacttcgccatgggaggcgcggccgccgtggtggcaaagacgggggccgcgccggtcgagcgcgtcaagctgctgctccagaaccaggccgagatgctgcgccgcggcaccctcacgcgcccctacaggggcatcgccgacgccttcacccgcatcctccgcgaggagggccccgccgcgctttggcgtggcaaccaggccaacgtcatccgctacttccccacccagggagaaagacggaaagtggaagtggttagctggaaatgtagcatctggcagtgctgccggagctacaacatcattgctgctataccatctagattatgcaagaacaaggctagctactgatgcaattgaatcacggggaaccaagcgccagttcagggggttgctggatgtttacaagaagacacttacaaccgatggcatgtctggactataccgaggtttcagtgtgtctattacgggaatctccttataccggggtttatattttggtatctatgatagcatgaagcctctagttctagtaggcccattggaggggaatttcttcgccagttttgtgttgggctggacaataactacgttctctggggcttgtgcctatccattcgacacggtccgtcgtagaatgatgttaacttcaggagaaccatttaaatacaagaacggtttccatgcagtaaaactgatagtttcaaccgaagggttcttcacattattcagaggtgttggtgcaaatattctctcagggctggcaggggctggagttctttctgggtatgatcaactccaacggttggcaagccggcatgatcaaaattttgagcacaatatgaaaggggcattgaaatgatgtgcatatgatatgaatagattcagatccttggttgaagtccagatcattcaaatgggatgctcaagcaagaactcctgagcctgaagaacttcgcaaaaaatattgggggaagaaaaaggaaaagttttcctggagatgaatttcacaaggagatggaatcattgcaacaaaagataactcttgtaaacagagagtgctgaatatatattttaatgtgtagatctaatccttcaagtatgagcacatgtacatgttggtgtttcttcgattgttagaggcaatagtatcctatcaatgtgaaatgtaaatccaaatccttcagtaggtcatgaccaagctatttttctaaaaagggatggacatcttgactcttgaggaaggttcttcagttacagatttggatttttgctaacatcatatgagcatgtcatgtgcagatgcaaatgacatttttgcaggagtgtcagaccttttttgaagtgacaggattcaagtggatatcgtatccattaatctgtgcatcactcaaaagaagagcaaaggagcctctaatccccatctgtctctgattctgatcatctccagggagccgagtaattgccactgcgctgggactgaacaactgaaaggagggaggctgatgagccgtgtgagctcactgggaggtgcagtcgccatggtgaccaagatggggaccatgccagtggaatgtgccaagctgctgctcctgaagaccagaactatgatgagatgaggctaggggccctcacatactcatacaatggcatcaacgacacattcactcacatcttccacgagtagggtgccgcttcaaccaggtcaatgacatccactacttcccacccaatgaggagctaaatacatctaagcttccttcctacttctggcttggatcacagactaatggacctgaatgttgtttctaagtggtgcacaggcaccagctctgcccccgctggtgtccttactcgtgagctttcatgagatgatacagataaccttgagtgttgcttttaggttgtaatattatcagtgacaaagagttcctgtcattatttcattcaatcattacttgtatgactgttacttcatacttttgttattgttgctgccctgatggttgagt

SEQ ID NO: 131788 - DNA, 270 bp, Zea Mays
atgtcggcgctgcccaagctctccagctccaaagcctctaaagctttggatgcacgagcccatgcatcatatatgtgagaagcatttgtcatctccctaacaaatagctcaaaccattcggagccattattacttgtttggtaattatctgcagttggaggatgttctgtatctgtagtcatatccacaccaccatttgaaattcctacacggaatgcaagattgatgctactgtcagcaatacactctagaaaactacttcaacgcttt

SEQ ID NO: 131789 - DNA, 2117 bp, Zea Mays
cagcccaaaatcccacatccgcacccatacggccacacactgaaacacagctatgtgtcgttaaaggcaaacagacccaggattatgtctccaattaaattcccagaaaactctgctcaactcgttctatcgtctgtcgtctcgctctccacatccgttgatccatcccttccaactccaatcaactccgtcccaaactacaatccgtggcaacagaaaaaggtgtatcttttaccagaaacagaagctagattcccggattgctccgcttgatcgctggtgaatcgacccaaccgagtggcccatggccggaaccgagcggctccaccgcccgattgacccgccgcggcccgcgggcagccgctccgtcgtggtcggtgctggtggctcgccggcgaggtgggacgacgataacgacgactgcggcggcggcggacgtgtcgaaggcttggcgggactccacatatttgaccaagaggcagaggagtcaccaaccaaaaacgacatggccaacagccttgatactaactgcactcccattgctaaaggatgcaacactgaaacaaccgaaacttctgtagagtcggaacctgtaaatgtcttgaacctgcttcatgatcataccggcatctgggtccctgtttctgtcccgcctatgacagcgctggccagcgaggattggcacagagggtttcgttgcaatggtgggcacttcccggaagaagagttcagctgggagctggatgaagacaataaggagatgacaatgtgggatgtttttgctgatatggctgtcgcagcaaaagataaggtgatatctgctgcaaaatatgagtatgggagatgtgggatgtcgacagtgtccaacttctttctacaagaggcttggaaggatatggcacaaacacttgtggatgcaaacactggtattgcgaatgagcttcttgagacagagccaactaagtggttgcctgacagtgctgccacctcttgcatgctctgtggcgtgcgatttcatccaataatgtgctctcgccatcattgtcgtttctgtggtggagtattctgcaatggctgttcaaatggcagaagcttgatgcctccaaaatttaggactgcagatcctcagagggtttgtgatgtctgcggagtacgtctagagagtatccaacctcaattgatgaatcagattagtcgggcctcacaacttccaactcgggatgtcacagacctgagtaccttgaggtcatggctgaatttcccttggtcacacacaatggaatatgagatatacaaggctgcaaattctttacgtagttactgtaaggtgggaagactgaaaccagagaagtctatccctgatactattcttagacaagcaaaaggccttgctatagttactgtggtgaaggttgggatgatggttacatacaaacttggcagtgggctggttgttgctcgaagagtggatggctcctggtcaccaccgtcagcaatctccacctgtggtattggatatggggctcaggctggaggtgagatagctgactttattattgttctgaggaacacggatgccatcaaaacattcagtgggaaggcacatctatctgttggtgctggtgttagcgcttctgctggccatgttggacgtgcagctgaagctgacttccgtgctggtgatggtggttatgccgcatgttatacatacagttgtagcaaaggtgcctttgtgggctgtgcgttgaatggcggcatagtatcaactagagacactgagaacgcacgattttacggaggtcctgtccaggcatctgatatccttctaggatcgacggcgaggccgcctgcagcctctcctctgtacaaagctctgtcagaattatttgacaagattggaaagtaatcctctctcttgcagaccctgcctcaccttgtaaatacaatcgaatttgtgcccttcaggaattggttggaaacaattgcgcaactgtacagtaaggccattcttcaacacgtcaaatgtgtttagtgatgctaccaacaaaaccactctgtaaatatttgtacattggattgacaatcgcatcaagatgtgaaaaaaggtgtttattctt

SEQ ID NO: 131790 - DNA, 615 bp, Zea Mays
atggaaggggccggtggtgaggcttggattttgcttcccctccacgacttccacatggatcccatacatcccggcatcagcgtgtattccttccatgagggaggcgtggattgggtggaggaagttgtgcctgcgcgtgccgtctatggaagggggagccatgaccgccactgtagagtagattgggcggaggctaggtgcgcgggggaggtgcggggcatgtggtggaggctgtatccagatattgggcggaggctaggtgcgcggggcatgtggggggaggtgcggggtgggggaggaaggtgcgggggctactccctggggcgcggcggcatgctgagatctacacgcagggacggaggtgtggggggagtgaggttcggtggtggcatactgagatctgcgacagagactgaggtgcggggggagggaggttcggtggcggcatgccgagatctgcggtggggacagaggtgcgaggggagggaggttcggtggcagctaggtgggagtcgatcttgtacatctttttggcggagcgcgaggtatggaggaggtcaacttcttctcgctgacgaagaccacaccgtcgcccaccaggatcccgagggctga

SEQ ID NO: 131791 - DNA, 1655 bp, Zea Mays
gggcgttttccagccgccggccagggacgagcgccaaggctcccagccgccgccagggccgactgtgcacgcctatgcgcgcgcgccttgcgtggggcccgtccgagcgccaaggtgcccgcgccaagcgcgaggcggagaccgcgccgagcaccgccggtgggccgcgccgcgcgctgccacgagcccgcgccgagcagctccttgcgcaggggagccgcgcgccagggccatgccacgcccgcctcttttcgccaggagcccgcgcaaggacgcctgcgccggggagccgcgtccgtagctggccgcgcgcctggtgcgcgccaggccgcgccgagcgccctcgccggggcggagccgcctgcgccagggcatgcggccgcaccaagcgccggccgttgccgagcgccctcgggaggtggccataccgcgcccgcgccgagcgcgagtcgcgcgcgcgccgggcttgtcctgcgcccgcgactccaggaggctgcgccgagccgctgaccggagccactgctcctcgccgtcgcattgcgtcgagcgccgccagggagggggccgcggccgagcctggcagacgagccatggccgggtcggggccgacattgcaggttcactgcatgtcctttgctccatgccggagagcagtgccacgccagagcactgggcttgcagcgccattcctccacccccctcccccaaacggccgacacagcggccggatcgagggccattaggccctcccattggaggaggaagacggggccaccccatttgggcgatggcctgtgaagatgatgcgtccacgcggagcatcgacggcacgagggggctgtccacgacgggcagcaatggtcccgacgaccataggcactggtggagatggcgaatgacgagcaactgctgctgcagtgggcggaggcggtggtggtgctgccaaatcgacatccataggggccgatgcagacgatcccgcgtcaaacaccggcgccggtggcgacggggatgcagtggggagtccacactccaccaccggcagcggaaccaccgctgtccatccatggagaacgcagaagtgcacattttgcacttgcacacggcgttcagggatctcgtgcaccggtgggagtgcagtggcttgcccaacggtgaacgcttccaacattgcatcatcaacaatatgaagaacttcgcgcatacggcgtatgcgtatggaaacgtgctcagtggtaatcagtggagagacaagagcaaatgagacaaatgactggtgttgtctgtttattgcagggatcttcatatatatacatgtgtacaaagggcatcagacccttggatcaaataaccgtagaatcaacggttggatgggtcttgatcatatattacattgttttgtaacatatcttactccagctgagtctagtgctctcatctctctctcgtgtgtgtaggagtccactggcggccggatctcgtacgtcgtcgacgatcgttggtgcacgtgcgagtagcagtgcatgctgatggacgagttgaagtagctagcggctaacatatgcacgcgcgcatgaagcaagtttgatctatctttctgtctatatatgttaattttatatgtatatataataatatatctatctatctagaaa

SEQ ID NO: 131792 - DNA, 846 bp, Zea Mays
ctgcatataccgagtagaatagagaggggagagggctagggttcagagcacgacgagccataacttcaacaagcagcgggcgggtctcgggcggcgcgcgggcgcttggtggacgacactcaagcggaggcgggcagcgcttgggagtcaggcatgcgaccttgcggctgtgctcaggcggggcgttgcgtgaagcgctagggagtcgggtgtgcgacgggcggcgctcgttcctcaggcatgtgcggacgatgctcagacgacgccgacacaggtccaggtccaggtccagttcatggagcatggttaccaccttggtttgcggcacaatatgctcattacgcggaggttgtcgcaggtcactagaataaacaagggaaacctgctgtgcataatgttttgcataagagaaaatggttgccctcaagaaaaatgtaggaccttatgtataaaaggtatcaacaagatgttaatgggataaacctcatattgagaccgctaagatgaaatggattcatgttaaggagaaattggttgtcctcaagaaaaatgcagaaccttatgtacaaatggattgtcttcaaaatgttgttcttgtagctacaacaaagagaaacaacaatggtggtgatgctatacgtgtagaagtagcaatgttggtcttgtagctccaagattttgttattttgttgttgatgaatgatatctatgataatatattgctaagtgtatgtgatgatcattggttgttgtttaattataatggtttgtgcttattgtgctacattgacattggtaataattaaaaaattaaaatggccttggttgggccaaatgttttgtgac

SEQ ID NO: 131793 - DNA, 599 bp, Zea Mays
aatgcctccgtgatcggtttaagttctttcgctgcggagatggcagcggcggcggggccgtacaaagagatgctggaagtggtgaacgcgtgcgcggcccggatccggtggcgcctccgtccagcttccaagcgccgcctcctcaacgatatcctgtttctctgcactgggttgcggcctgtggtactggtcgactatggtggcacaatgcctcagctacaagaaaatctttgtggcctgctatatcttgcccgacagttcaagctctgcaaggtgaggtttgttcagtttggccagaaaggcatcccctacctgaacacctacgacggccgcaccatccgctaccccgaccctctcatcaaggccaacgacaccatcaagatcgatctggagaccaacaagatcatggacttcatcaagttgtatttgccctttcatagacttcatcaagttatatacttagttaggctcaatgttagcacaaacagttgatgaacaagtttaaatttagagtacagttatgtatgagttatttgacaatgcttatttatgagatattgaatgttatttatctatattatattaattatagtgttatt

SEQ ID NO: 131794 - DNA, 264 bp, Zea Mays
tcgtgcacatcacctacaaggaggcctacaaagaagctttttgttaatgacgttgataagaaggatggaggggctgactgtgctgcagccaaagctaggcttattagctcctgcaagatcactggaatagatagttcagaacaaataagtgacattttgcgtggcattgaaggaagagtgagctatgtaattgacccaaaaggcacttcaagcgggcaggaaagtctaaggcccttactaagtacttccaatagtgcagtctaa

SEQ ID NO: 131795 - DNA, 1652 bp, Zea Mays
atttttgtcaccaagtgttcatattttaccgtatgtgtcatcataggtagacagttcttttaccaaggaaggaaaactgctacttcagagcttcaaacacgggcacagtatttctttagtttgaaagagatcgaatctgcaacaaaacattttgatcctgcaaataaaataggtgagggtggctttggacctgtttacaagggcacactagcaaatggtactatagttgcagttaaaaagctatcttcaaagtcgagccaaggaaatcgcgagtttttaaatgagataggaataatatctgctctaaggcatccgaatcttgtgaggctatttggttgctgtattgatggggatcagcttcttcttatatatgaattcttggaaaataatagtcttggccgtgcgctttttggccgcacagaacatcagttaaaattggattggccaacaaggtacaatatctgccttggaactgcaaaaggcctggtctatctgcatgaagagtctgcactaaaaatcgtccacagagatattaagccatcaaatattcttcttgatggaaagatgcgacctaaaatatcagattttggcttggctaaactgaatgatgactgtggacgtgtgagcactcggatcgctggaactgttggttatatggcccctgaatatgccacaagaggttgcttaacacgtaaagcggacatctatagttatggagtggtggctcttgaggttgttagtggaatgagcaatacgaatagcatgtcaaatgaagaatatctgcatcttcttgattgggctgaaagattgaagcagcaagggaagctgctggaaatggtggaccggcgtctcggttctgactactcccaagaacaggcactgaggctgctggatgtagctctcctctgtacaagcatacaaccaacccagcggccaagaatgtcttcagtggtgaagatgctttgtggtgagatccccgtcgagattgtacctgctgacgatgatctaagtgaagatctacgactcaacatcgctcaatcccggcaatcaatagataacagccaaacaaattggtcccagtactcagtaaataacagccaaacaaattggtctgaaacgctttcaagcgatcgttcggtcttgccccacagcagcaaggacagtggctacctcccatcttcgagctccctttctgtcaagctgtgaacttcagcatcgagaatagctagccaggtgtcggcttttttttggggcccgttgctgcagttgtacataggcaaatgttgggtttcatgcttgcaatgcaagtatttgatgtctcatctcgattgtcaagtgtcattcaagaatatcgtccacgacacatggcaattgatcacagtactgtctcaacgtcagccatatttcggctagctccttagtttgttgctttggatgtagaaagttataatgacttataatttggaacagatggagatgtagtatatcattaggacagtgcacttgagaaatgtaggccagaaatattgtttcatatatgcagatcttggagacagtgcaatactttatttcggtcttctttctattgtttacaagcgcagttgtgtgcatgcagtactgctcatgttccacctttttgtatactgtcccta

SEQ ID NO: 131796 - DNA, 924 bp, Zea Mays
atgggcgccgacgcccgcgtccgcctcctcctgcttcttctcttcctcctggacctcggctgcagcaatggcggcggccgatgctcctcggcgcagacgatgctgccggcccaagaagttgaagcactcaaaggtatagcctgcaagcttaacaaagcagattgggattttagtgtggatccatgcagcggattaggaaattgggtcaatgtcactggtttgcttagcagtaatgtgacatgtgattgttcattcaacaaccacaccgagtgccatgttatcagcttggagcttatgcggcagaaccttagtggagttctaccagatgaagttgtcaatcttacttatctgcaaaatcttgacttgtcacgcaactccatccaaggaccaattccagcatcatgggctgacctacctgtttttaatctgtctctccagggaaatcgtatatttggaaccctgccgaaggagcttggacgcatgcccaagttgaaatctatacagctagaaggcaatcagcttgcaggttctattccaccagagctgggtaacatcatcagtctgcagagatttttcatttctgcgaataacatcacaggagagttgccctcaaccttttctaggctgacaaacatgacagattttcgtgttgatggaaacagtatctcagggaaaatacctagtttcataaagaactggcagagcgtcaacagaatcgatatgcagggtaccttgatgagtgggcctattcctccagaaatttccttgttgaagaacttgacagaactgagggtgactgatttgagtggaccaagaatgaaatttcctcccttacaaaatgcactacaccttacggaagtggtcttaagaaattgctccatatatggtgaaattccttcttaccttggtcaaatgcagtacctg

SEQ ID NO: 131797 - DNA, 389 bp, Zea Mays
acatccgtgcgttctgccaccgcgcgtgtgccattcccaagttcgaaagtttccagacccccaaaaggcgaagcggcgatgagttccaccggaggcggcggccgcggtaaggcgaagccagggaccaagtcggtgtcgcggtcctccaaggctgggcttcagttccccgttcgtcgcatcgtgcggtgcctcaaagccggcaaatatgcagagcgcgtcggcgctgggcccccgtgtacctctccgccgttctcgagtatctcgccgccgaggtgctggagctggcagggaacgctgctcgtgacaataagaaccgtatcgtgctgcgccatatccagctggtggtgcggaacgacgaggagctgagcaagctactgggcactgtgtca

SEQ ID NO: 131798 - DNA, 370 bp, Zea Mays
gtcgtaaaatttagtttgaaaatgcataaatcacgatggtctcagagggcacttgttttgttcacagtatatcaaaatataaagtacaacgatattttgccaatattgttgcaatcatacacgatttttttgacatgtcaaaaaatgaggagctagccctgtttttggtacttcagacacttggaaccattagcctttagctaggtcgtggtccgaaatggaagcatcgctgcccgactcttgttaaaacaggtctgtgtaagactcttgcaaaaactggagcacaaacgtttcctttactacctaaaaaggcctattactgaaaggatcatcttgatgccaatcaaacaggctaacaagagaatagtgg

SEQ ID NO: 131799 - DNA, 1077 bp, Zea Mays
atggggctgcactacttcaagtcctgcaccatcaggggcaccatcgacttcatctttggctctgccaagtccttttacgaggactgcgccattgtttccgtgaacaacatggaggagatcatgaccttgcctgtggcaccacctcaacttgacattcacgacaatccaatcaaggttgccccagggaagggaggcttctccttcaagacatgtaccatcaccggggaagggcaacaaatcttcctcggaaggatgggcacgccttccatctactcctacacccagattgctaaggaggttgtgcccataatctacgacaaagggaacatcttcatgcccagtaatatgactggtagacgatgtgccactttcaagtgctatggacctgggttagagaaaatatggcacgtcaaacttagatacgctgaagccatatactttcttgggacagattttatcaacggagattcatggatcctgtccataccacctactgatgctgaaacattgctatcagtttgaatatatagaatcctcagaggtcatcaaagatcatcatctaccactaattaataatgagccaaattaaataagttttgcgtatatattttatccctatctataaattatgcatgtgttgtaaacaagtcgtggatgggcttcatttgttctcgcgattgaaaaataacaaataaacaaagtagaaaagaggatgaaccagaagtcttgttcagcaagaaggaaggaggaatgacgatatttcccatgtgatacttgtaaatcatatgtgtaaacttcgtgggcgtgcttgtaatttcatacgaagttgtacctctcgtctataaatagagtaacagtgtcatgcataaattcacctttcgagagctcaaagctttatttagctcagccttcgaagtacctttgagctatcacttgtatgaagccgaaggtatgtttgtaattgtttgttatattgcaaggagtgaaataataagtgtggaagcatgaagatgagtaacatgtcttgctcgtaattgtttacatttcatccttgttaatatataagcatttgtgccc

SEQ ID NO: 131800 - DNA, 2272 bp, Zea Mays
ccaaagcagcaaaggacgtcaatcaatgagcaaatacatcgaattgcgcgaaggcaaagcgtccaagcaaccacttctgctctgcatcccgtctgggcctctgcatttgcttggctgctgctcccttctcccaccgaccaactcgatcccgcgccatggatcgcgccgaccccgcgcggggccgccttgccgtgctctcctcccacctccgtggtgcaggggccgaggaggcggcggggctggagaggtcgccggtatccgcgccggcgcccgggccccgcgccggcgcgcttgccgtggtggacgggaggaccgggaagcggcacgaggtcaaggtctccgaagacggcaccgtgcgcgccaccgacttcaagaagattaccactggaaaggacgacaagggtcttaagatttatgatcctggttaccttaacactgcccctgttcgctcgtccatctgctacatcgatggagatgagggaatccttcgctataggggttatccaatcgaagaattggctgaaagcagctcgtttgttgaggtggcctaccttttaatgtatgggaacttgcctactcagagtcaattggcaggctgggaatttgctatttctcagcattctgctgttccccaaggactgttggatatcatacaatcaatgccccatgatgctcaccccatgggtgttcttgccagtgctatgagcaccctttctgtctttcatccagatgcaaaccctgctctacaaggtcaagatctttataaatcgaagcaggtgagggataaacaaattgtgcgagtacttgggaaggcaccaacaatagcagctgctgcctacttgagattagcaggaagacctcccgtccttcctttaaatactctatcttattcagagaacttcttgtacatgctggactctttgggtgacagaacatataaaccaaatcctcgacttgctcgagctctagatattctttttattctgcatgctgaacatgaaatgaactgctccactgctgctgttaggcaccttgcttcaagtggtgtggatgtatttactgctctttctggtggtgttggagctctatatggtcctctgcatggcggcgcaaacgaggcagtacttaaaatgttaaatgagattggaagcatggaaaatattccagatttcattgtaggagtgaagaacaggaagaggaagatgtccggttttgggcaccgtgtgtataaaaactatgaccctcgtgctaaagtcataaggaaattggcagatgaggtgttctcaattgttggacgggatccacttattgaggtggccattgccctagaaaaggcagcgctgtcagacgaatattttatcaagaggaagctgtatccaaatgtggatttctactctgggctaatttatagggcaatgggattccctacagaattttttcctgtgctgtttgctattcctcgcatgggtggctggctagcgcattggaaagagtcactcgatgatcctgacactaagattataaggccccaacaggtcagtagaaactagaaagggaaaatattatctagtactgttactgtttttctaaactagtgtgaacttccattcccacatcacctactttatttttgttatatatttcaaaattaattagaacgaaaacatctatgctctgtcatgctggttgtaagaaagtttgtggtacaagtagggctgagaccagatttttgtctgcttccataccatttcgtgacgatgttctgttatttctccaggtatacaccggcttctggcttaggcactatacccccgtcagagaacgagtgctatcaagccagagtgaggaacttggtcaggttgccacctcaaacgcaactaggcgccgccgtgctggttctgccctgtagaagctgcagcgtataaacgcaccggcatactcaataaacatcgaccacttttgtgcttgaaaaggccacaaatgctttttagcttggttggagttgtaggccttttgttgtcgagtatataggcaataatgcagtgagaacaccacaccgttacaatgtaaaactgtcacgaggcatcacttgctggtgtacaccccttgcgttctctatgacttaatcacttaacttcccaaaagatgaattaagaggtacgatcgagtacccgtgttcttgcgttgacaccatgtgctcattttggtgaaattttgttgttcatttgcatggagattagtggaaacaaagatcgctgttggcgtatttgtg

SEQ ID NO: 131801 - DNA, 573 bp, Zea Mays
ccaaagcagcaaaggacgtcaatcaatgagcaaatacatcgaattgcgcgaaggcaaagcgtccaagcaaccacttctgctctgcatcccgtctgggcctctgcatttgcttggctgctgctcccttctcccaccgaccaactcgatcccgcgccatggatcgcgccgaccccgcgcggggccgccttgccgtgctctcctcccacctccgtggtgcaggggccgaggaggcggcggggctggagaggtcgccggtatccgcgccggcgcccgggccccgcgccggcgcgcttgccgtggtggacgggaggaccgggaagcggcacgaggtcaaggtctccgaagacggcaccgtgcgcgccaccgacttcaagaaggtaccgagcagcgagcgcggattgacggtcccggcggtcgcgccgtgccgtgccgtgatcccccggggtcttggcgttctagccttctaggaggcgcttgctattgtcaattgtcatgttggctgtgttgctgccggaacatgctgtgcgaattgtcaatttgtagcaatcatgattgatgaccaaagatcgttga

SEQ ID NO: 131802 - DNA, 370 bp, Zea Mays
cttattaagaaccttggaacaattgctaaatctggcacttcaggaacaggagctgctcgagtctcttgttgaagctgatacgagaaggcaggaaagagctaaaaagatggaagaaaagaaagtgtatctgcaactgtacgaagcaatggaggcgctggtccacatctgccgggaaaacatagaataaaattcaaatttggtggtcgcaaaagtgtggagactttatttcatataaagttaggcttaacattagtgcaaacagttgtattttagtttagatttagagtacacttatgtatgctttgtttgacaatgtttatttatgatatattgaatggtacttatttatattatattaattataatgttg

SEQ ID NO: 131803 - DNA, 1263 bp, Zea Mays
gatatgcagttgacagacacacaggtacataaattactgttaaggcaacaacatattcatgtactattagaaagttgccccgatgaagctcacattgatccactggttcatacaaatataacgaaatagaccaaaacacctacaaccccagtgggtaaacatggtgacgttggcaagaacattccgaccaacacaaacgtcactcctcaagcaacaccacatacggaatcttgctcgccgatatttgatgcgacgccgcaaataaagtctcccggcggcgtccaacaggcggcagaaacagatcttcccgatagtggtcaatgctttgatcagactccatctgagcatgtttctgttgaaaccgatccagctacaaacactcctcaggttgaccaggtttcacttgatttggagatgcaaactgtgttagctctacgcgaatatttgtgtggtacgcaatctgacaccagcaggaccataatagattatggtgaatattgttcgacatgttctgatatatatgaatcttttgccgatgggaagtgtctcgacaatgtgttcatgtagtgcttcatccaatgtgttgatgatgatgccaaaaatcagcagccttccacgagttcgaacagattaattcttgatgttaatgttgggtcactactcaactttgaggaacaggaacgacacagtcggaaccctcaacctttttatgaatctgtactgcacacacttctagacaatacattgcctgagtcagatgaattggataaatgcaaagcgatcatggttcccatggtaagcagggggcattggacattgtatgttgtcaatacagtcaagaagtgcatccacattttagattccaatccatatggggcaacacttggtggtactacatggaaggactatcattttgcccaattggacttaggtggcagaaagttaccatgggctaaggttattatgagtagattaaacaaagccctacaacatgtacggcccaggacatgctttcccaaatttggcaactttgcaattgacttgtgcccaaattgtcctaacatggcagcaggatccaatgattgtgggttttatgttatgggttacattctcttttatgactgcgttgaagtatctctgcggtcagacatagaagcaggcaacactagtgagatacggtctcttgcgctgcattatatcacattgcatccgaagaacaaagcattatcgctgcttgaagacatccaaagattcaaggtctaa

SEQ ID NO: 131804 - DNA, 294 bp, Zea Mays
atggaggccgcgctccgcgacggcgtgcctggcgtgccagctccgcttcttctggcccaacgacaccgtgctccccttcagatgcagctccaagtccaagctcttgttcttctgacagccgtgccctctgtattgtctagtggctactcttctgacctcagttccatggccgggcgtcggcaaaaaaaagattttgtctttgggttctttcttattggattttacgcttccactaaaaagcaattgttaaccgccgccaatatcacagatacgaacgtggacgagcggctgtaa

SEQ ID NO: 131805 - DNA, 1409 bp, Zea Mays
cttgccatctcggggatccggcactcgcctcccttttccctttccgcgccccatcaccattgccacaaatagcaaccaaggcagtaagcctagccaagccaaccgacggcggcgagagtatatatacacacacacctgacgcctctgctgctgctgggatcaacgcggcagcttagtgacgacgacgactcttctgtctctgcgttgattaatggacagtaacagatccatggcgacgagcggcgtggctccgttcgtggccaagacgtaccgcatggtggatgacccggcgaccgacggcgtggtcgcgtggggcagggacaacaacagcttcgtcgtggccgaccccttcgccttctcgcagacgctcctgcccgcgcacttcaagcactccaacttctccagcttcgtgcgccagctcaacacctacggcttccggaaggtcgatccggaccggtgggagttcgcgcacgtgtcgttccttcgcggccagacgcatctcctgggccagatcgtccgccggagcaacggcggtaagcgcaaggacgacggcaacggtgccggctccggctccgccgacgacgaggacgcggtagccatggaggtggtccggctgaggcgggagcagcgggccatcgaggagcaggtggccgcgatgtggcgtcgcgtgcaggagacggagcgccggcccaagcagatgctcgcgttcctcgtcaaggtcgcgggcgacccgcaggtgctgcgccgcctcgtctccggcgccgggggcgacgccgtgttcgccgccgcggagccggaggacggcgcgagcatcaagagggcgcggctgcttctcgatgccggaagcggcggcgacggcgccgtcgacttcagcgggctctatagcacaaccgccggaagcgaagacgacggcgtcgggttcggcagcgattacctgcagccgccaccgccgtacgtgttccccgtcaacagcggcggctactgactgatggcggtctggtagtccagcatctatccgagcgatgtggcgtgcttcgtcgtcgctagttgcccctcccgagtgacgtgttggactgaagtggcaacggcgccgacggacggtgagcaaccaacccaagataattagctaggaggtggtacaaagtgtaaagcctttggtttaggcaggtctgtggtgatctttaatttgcttgttgcaatgttttccttccctaccctgtcaagtgaatgctacggatcagcggcggcaaaagccgttagctgcagctagtttgccgctgctcttcatacagctgcacgccgttaaaacacatctcctttgcactggctgtcttattttttagttgttgagctggtgtaagcaaccagaaaagcttgacagatagctgacaacgtgtctgatagtttga

SEQ ID NO: 131806 - DNA, 869 bp, Zea Mays
gtatatatatgagccccaaaggagctgagttcagcaactcaagcttctcggccagtttcagcgacgtattcagtctagtctgtagacgttaagagcaagatgagcagcagcagtgttcttcttgtcagtgctgttctggtggcgctcgtcaccctgagctcatgcaggagcctgggagagttgtctgagcagaagacctactcctctgctcccagctatggtggctccccaactcctacgtacgcatcaggagaaggccacgagccaacgccaacaccatctcatcatggcacaacaccgacaccatcttacggcacaacaccaagtacacctgctcatggggtccctgaaattcccaagcatggatttgttggatcctgcgactactggaagagccacccagacatgatcattgcagttgttgggtcccttggcaacattggcaagacctttggtgctgcctgcagtctgctcgtcggcaagaagcttgagaatctgcatgatgcactctcgaacaccagaactgatggcgttggtgccctgctacgtgaggggtcagctgctttcctgaattccattgtcaacaagaagttcccctttaccacgcagcaggtgaaggactgcattgctgtgtccgtgacctctgacaatgctgcttctgcccaggccgggatcttcaagaaggcaaatgaataccactactaggacatggatatctccgtactatactgtttctcacaattcataccacctttcatttcttccccttttggttttctcgtgtaacatcacctctaagctatgttgatcttgttttttttttattgtcatgtattatcatgtctaatatacatatgaaacgaaatcaa

SEQ ID NO: 131807 - DNA, 94 bp, Zea Mays
gcgaaaaacaacttctctagtaatcttccgtactccatatccaacttggtctcgcttgagtacctgacatcggagaactgtttggaagcctcag

SEQ ID NO: 131808 - DNA, 399 bp, Zea Mays
atggttattccatatatgtttgcttttatgataacactatgctttttgcagaaacggtacaagttgccggacgatggatcatatgatatgaacgctcgttacgtgtttgagtataacgcgaacgatgtcgttgcagatgcaatgtactatgcacgaattcaggctataaaggcatggtacagagcaaatgctgatgatcgaccgatgccaaatacaaaggccgagtggtcatcaatttacttgacggaggagcaatacctagagggatttcagacaccacccgcttcagttgccgcacctggagatgggtctggtcaggacgacacaacacattcgtgggtgaacaatcttttcagcacgcatagtccagccggaggaggtggcgatggatatgagtga

SEQ ID NO: 131809 - DNA, 306 bp, Zea Mays
atggcccccaatggagaatcaccggccatgaccgccgtggcgccgctcctggcgacgatcttcggcggcgagcacaggcggcagagggtcccgtcgtcccacgagctccgcagctgcgtggcgggcgaccaccaccaccacaaggaaacggagctggccagccccgccggcgacgacccgagggacgccgcagcgcgccccgccggcggaagtggaggactcggagtgcgagtgctgcggcatgtcggaagagtgcaccccgtcgtacatcgccgcgctcttttacctgagccgctggaagtttga

SEQ ID NO: 131810 - DNA, 1245 bp, Zea Mays
ctccaatagttgcgcttccacttccacatcggtagccatcgctggctggctccaagtactggactccctcctgagtcgggaggaagcaatggcggctgagaggaggcagcagcagcagcagcacgagggcgcggtggcagcggcggagccgagcgtggcgcggcggctgtggcgcgtggtgcgcgccgtgctgtacatgctgcggcggggcctgccgtcgggccgcaagctcggcatggacctgcagctcctcctccaccgcggcaaggtcgcgggcggccggttcctcgcctcggcccagcacggccgccacgccgcggccttctcgtcccacgccggcgccggcgccggcgcggggggttcgttctcgtgcggcgcgctggacccgagcgtggcggtgcacgagccctcgcgcaggcggcgcgaggtcgagttcagctgcagcaacacgccgtcgtccgcctcgggcgtggggggcctcggcctcctcggcgccgccagacgccgccgccgacgccggcggcagcagcagcagcagcagcgcgacgagccggagccggcggccggcggcagcgggtacctgatgcagtactacagctacgacgcggccgaggtggcgcgggtgttcgagatgctcagcgacgaggacgaggacgaggacgtggtcgacgtcgacgaccgcggccggctcttcggcggcgacgccgtgcgagtgccggtgccgggcgcctcctccgcgacgccgtcacccgcgcaggcgcagctgctgcgcctggtggcggccgcgggtacgggcagcaggaagcagcagcagcagcaggcgcgcgtcggcgtcgccgccgggtcgtcggcttcgccggcggacggcgccgcccaggtggaccggcgcgcggacgagttcatccggcggttctacgagcagctgcgcgcgcagaggagcgccgcgtccacccccgactgctacggctacggcgtgggcggggccagcccctacgccgcgcgcgcgccgcggcccgtcaccgccggcatcgcgtagggccgcagcagcagcactacttgcttcacgtgtggctcactgcgcgcggccccgggctgtcagtggggggtgtgtgagtgtgtcaaccaagctgcatgagccaccctcgcgttccctctcccgggttccgggcccggcgagttgtgcacccaactcgaaacagctaaaatcatgtgctcttattgtctcccataatcttgcttaatcta

SEQ ID NO: 131811 - DNA, 140 bp, Zea Mays
gtcgatctccgtctttatttttagtttcttttgtagcctttctagagcactatgagtgttgtccgggttttcttgacccgtggttcagtcattacatctgaataaaattttatcttaataaaatggtacgtgtgtttgag

SEQ ID NO: 131812 - DNA, 387 bp, Zea Mays
gatccagcagaagtggagcaactgcgagaagaacttaggcgacatcaggattacctgaagcaacaagctgcgcaacatgaatattatgctacacagattcagcaacaacaaacactcatacaacaactagcacaggcccaagggatacacgtcccggtgccccccccaccaccacctcccgttcattatccttggtcttcacctccacctgtacctacatctccatctaccgaacatcaggtatgcatatttatcatcatttagttgttgttagttatattatgatgtaactcaacaaatgtcatttgtacatgtatattatacccctccagctaccttgtcgacgcatgaacaagaggatgggttagactttgtcgaaaccctctt

SEQ ID NO: 131813 - DNA, 602 bp, Zea Mays
atggaatatatttatacactactgttagccatactacctatatgttacatttcagctgtagaagcgagttggttggagatcagaaacaggctacccaacttgaagatggcactgcgacgggctctaggatggtcggaaggggaggttatgcgaccagagtcaaagccctgctcccggttaatgcggcagactgcgggcatcttctccgtcggtggtggtctggctttctgggtgctctgccgccttcactatggtccaagaatcactgttccaaggagtctcagatgggcgtcatgcggagcagtctctatgagcgcgacatcagcattgcttgtgcggctctttagcccagagtgtgagcctcaaaacatagctgccttcgacaaacctgaactaaaggcccaatagcataaccgaaaactggtgttaatctaccaagacccatgcaagtttttgttaatctgccaagatctatccaagtttctgtccttgtaatgatccaggcagttcctgtaagatacttttgcgtggtacaacccgccattaattgtttgtttgggattgctacaggtttcagtttcagcatggaagatgtggtttat

SEQ ID NO: 131814 - DNA, 818 bp, Zea Mays
cgagccgagccgaacgtggctcggctcgccgatgggtgcccctgcccctcgatagtcgcgccgctctcctgccccgttcggccgttccccatttgcctcgtcgcccaccgccccattagcgccgccctcccttatccgacccaacgccgccgccgccgccgcatagacctcgccggcgcctctgcgccgccccgtggcctccggaggtgctattcgcgcgcgatccgccgctgcgtccgtcgctctggcatcgattcggcggcgctgggagctgtagaagcgagttggttggagatcagaaacaggctacccaacttgaagatggcactgcgacgggctctaggatggtcggaaggggaggttatgcgaccagagtcaaagccctgctcccggttaatgcggcagactgcgggcatcttctccgtcggtggtggtctggctttctgggtgctctgccgccttcactatggtccaagaatcactgttccaaggagtctcagatgggcgtcatgcggagcagtctctatgagcgcgacatcagcattgcttgtgcggctctttagcccagagtgtgagcctcaaaacatagctgccttcgacaaacctgaactaaaggcccaatagcataaccgaaaactggtgttaatctaccaagacccatgcaagtttttgttaatctgccaagatctatccaagtttctgtccttgtaatgatccaggcagttcctgtaagatacttttgcgtggtacaacccgccattaattgtttgtttgggattgctacaggtttcagtttcagcatggaagatgtggtttat

SEQ ID NO: 131815 - DNA, 1782 bp, Zea Mays
cgagccgagccgaacgtggctcggctcgccgatgggtgcccctgcccctcgatagtcgcgccgctctcctgccccgttcggccgttccccatttgcctcgtcgcccaccgccccattagcgccgccctcccttatccgacccaacgccgccgccgccgccgcatagacctcgccggcgcctctgcgccgccccgtggcctccggaggtgctattcgcgcgcgatccgccgctgcgtccgtcgctctggcatcgattcggcggcgctgggaggtgagatggatctctaccgctcgaattggcgccgcttttgggtcgtttgcggggggttttgtggggaatttggttgtgaaatggtttgccggccatggagtttgggggggggtaggttcggatttgggcgtgggtggtgggctggtggctgtgccgtatgagatgtgaagctagttacaggcggcgagctgcttttgcaagctctgatgcttctgccgcagagttgacaaggtccgaatgggagttagtctgtctgtctttgcagctctgtttcttctgcacttgggtaaaaacgctgtgaaccccaaaattaggaagattcagttcagaggtgaggattaggggtgggtgtccggtctgaaatagcagtggacctttgatgcctctgtttgtcttggtctggttccagtgatagctgtatcttgtgctaggttatggttatagcagttcatcatatgagcttttggagaccagcaagatatggaaagttcctggtaattacttaagtatcatttcactgaatgagtaatgctagctagttagtgaaaaggaacatgtcagcacctaactgcaccagatatcagaccgcaacatcaggatacaatacaatgcagcgagataaacagtctacccaacgagtataaatatactatgagcagtatgttggggcctcagggaaagggggtaggcagggaattgaattcattctaataattataatttaggcatagattaattaagctaatactgtatgattttgtatggaatatatttatacactactgttagccatactacctatatgttacatttcagctgtagaagcgagttggttggagatcagaaacaggctacccaacttgaagatggcactgcgacgggctctaggatggtcggaaggggaggttatgcgaccagagtcaaagccctgctcccggttaatgcggcagactgcgggcatcttctccgtcggtggtggtctggctttctgggtgctctgccgccttcactatggtcaatgttcctatccatcctgctagctccctaaagtttttattttttgtataactcctgcatcttgtcagcagttctctctctctctctctctctctctctctctctctctctctctctctctctcagtgtggtgaaccgagaactcagaccattttgctgagacggtgtctatcctgtaggtccaagaatcactgttccaaggagtctcagatgggcgtcatgcggagcagtctctatgagcgcgacatcagcattgcttgtgcggctctttagcccagagtgtgagcctcaaaacatagctgccttcgacaaacctgaactaaaggcccaatagcataaccgaaaactggtgttaatctaccaagacccatgcaagtttttgttaatctgccaagatctatccaagtttctgtccttgtaatgatccaggcagttcctgtaagatacttttgcgtggtacaacccgccattaattgtttgtttgggattgctac

SEQ ID NO: 131816 - DNA, 541 bp, Zea Mays
atgaggctgtggactctggagactaaggagatgggtaatagcagtgtttgggtctggggatgcaacatggggtgcgagagcggggaagggagcgacggtggtgcatggtatcttcctctagaatgctttgacctcagcaaaacacaatttatttcatctaagataactgaagactttgaggaggtgcaggctgttgaactcatgctcgtgaatgcccttgttgaggctaatgattacttggggatatcattgcatgcacatgacccagaagatttttggaagtggcacattgtcaatggtgtgtccaacaacattctcaaccacatcatcctagagaacaatgagaacaagcctatcacaaacaactgtgacactcaagaggtaaacatagtccataatttttgtttttagcttctttgatttgcaaaaaaatgttgtcttgcctccttacaccctttgacaacaatgtatatatgccttgaacaaggccttcatatcctcaagatattcaaggattatcatgtcagcaaaacatccatcc

SEQ ID NO: 131817 - DNA, 1053 bp, Zea Mays
atgggtctgcatttgttgcatctgcagtttttcatcatgctgtcgtgcctgatttcagtctcggtgaacttcagcacttttctcgtgatcgggaagacgtctcctgtaacctacaaagtacttggccatctgaaaacatgcttggtcctcacctttggctatgtcctgcttcacgacctatttagctggagaaacatacttgggatcctaatcgtggtaattgggatggttctgtacttgtacttctgcactagagagactcagcaaataccagcagaagcctccccgcaagtcgttcagatgaaattgtacgttcatggtttctcatttgtgctgtatctgtctgctggaactctcggtctgaatggtgcttttagcaaggttgccaaggttggtcatgttgctggctcaagaaccagagaaaagttacaattggttgtatcaaatctagcagccaaagtgaatcatcaagcgattttgtttcaagtaaaaagacaaacttgttttacgtgcagctggaactcgggatcttggtgcatcctgctgattgcaaaagcatgttagatgctttcatagctggctgtgatttccattccaggatagccatgaacatgtatcagcatattcgtgagaccattgaagaagagaaagtaattcttgagtggcatcctcaacccgatcaagagaaacctctcgtgctgttgttgaaggatgcttttggcgctgagaggaggaaagctataagatgctaaatctcttcattgtatacgggaaaacgtaggaaggcactgcagctgatgttgctatgtgtgccatgcttgggatagacagaaatactcgtcttaaggagcttggttggacgctactcatgcgggtagtttatgcataaagttatgctcgttcgctgcttaaatgttgcatattttgtttttctctttgaaactgtgaagggcgcaactttttaacgacttctgtaacttgtgtatctagcatctgtattcggtattctaagttaaaatggcaacatttaattatattttacataatttcttt

SEQ ID NO: 131818 - DNA, 928 bp, Zea Mays
atgggtctgcatttgttgcatctgcagtttttcatcatgctgtcgtgcctgatttcagtctcggtgaacttcagcacttttctcgtgatcgggaagacgtctcctgtaacctacaaagtacttggccatctgaaaacatgcttggtcctcacctttggctatgtcctgcttcacgacctatttagctggagaaacatacttgggatcctaatcgtggtaattgggatggttctgtacttgtacttctgcactagagagactcagcaaataccagcagaagcctccccgcaagtcgttcagatgaaattgtacgttcatggtttctcatttgtgctgtatctgtctgctggaactctcggtctgaatggtgcttttagcaaggttgccaagctggaactcgggatcttggtgcatcctgctgattgcaaaagcatgttagatgctttcatagctggctgtgatttccattccaggatagccatgaacatgtatcagcatattcgtgagaccattgaagaagagaaagtaattcttgagtggcatcctcaacccgatcaagagaaacctctcgtgctgttgttgaaggatgcttttggcgctgagaggaggaaagctataagatgctaaatctcttcattgtatacgggaaaacgtaggaaggcactgcagctgatgttgctatgtgtgccatgcttgggatagacagaaatactcgtcttaaggagcttggttggacgctactcatgcgggtagtttatgcataaagttatgctcgttcgctgcttaaatgttgcatattttgtttttctctttgaaactgtgaagggcgcaactttttaacgacttctgtaacttgtgtatctagcatctgtattcggtattctaagttaaaatggcaacatttaattatattttacataatttcttt

SEQ ID NO: 131819 - DNA, 221 bp, Zea Mays
ggagaccgacttcaaatatcatatagttccctgcaaaggccttcatttgtttgttcaagccatgaattggggactggagacaggtttgtctttttaacaccttctaggaggcaaacctatgtgttattttcttgtattatatataggaggcaaaaagataggcatctccttccaaaccactgttatttaatcgctaagaagttgggaggactagataattg

SEQ ID NO: 131820 - DNA, 392 bp, Zea Mays
gacagtagtagtaaaaagaaagtgtgtgccacatttgcgcaatgtacgtacacgttcatgttacatctcggtccagaaagctccactgcttgcaacagcagtgacgaatcgtccgtcaggttagagcagcagccgaaggaaaactcgggtaccttgaatttgtgtgactatgtgtgttgtgatgccacccactgctctgcaagcccatcgccagcctccagcatactaaccacctctaacatcttggtactgacgtaatgtggccagggaggaactgggtacatagcagcgccacttgcatcatctcctctagctcaatgtggtcatatttgctcctcaggcccttgtcgacaagtgtgtccagctgcttttcttggtgcatcttcttcagc

SEQ ID NO: 131821 - DNA, 3262 bp, Zea Mays
acaagaatggctgactcttatcttgtactcctcttcctactagtgttcgtcacctccaactccagctcgcaatccatggcgcagatcactgacgcaagcgagctagcaatactcctagcaatcaagaaaggctggggcagcccatctgctctcagctcatggagctcccagaacgcttcctactgcagctgggcaggggtcaggtgcgtgaacggccaagtgtccgccctgtccttccagaacctcagcatagccaatccagttccagtcccagctgcttccatatgcaacctcaagaacctgtcgtctctcgacctttcctacaacaaactcaccggccagttccccacagcgctctacagctgctcggctgctcggttccttgacctctccaacaatcgattctccggtgccctcccagctgacatcaacaggctgtcgtcggcgatggagcacctcaacctgtcgagcaatggcttcacaggcagtgtgccccgggcgattgccgcgttcacgaagctgcggtccctggttcttgacaccaacagcttcgacgggacgtatccgggctcggctatcgcaggcctcagcgagctcgagacgctaactctggcaaataaccccttcgtgccaggccccatccccgacgacttcgggaagctgacgaagctgcagacactgtggatgtcggggatgaacctgactggtcgcatccccgacaagctgtcgtcgctcactgagctgacgacgttggccttgagcgtaaacaagcttcacggtgaaatcccggcgtgggtttggagcctccagaagcttcagatcctgtacctctacgataacagcttcaccggtgcaattgggccggacatcaccgccgtgagcctgcaagagatcgacctctcctcgaactggctcaacggaaccataccggagagcatgggcgatttgagggacctgacgttgctcttcctgtacttcaacaacctcaccggaccgattccgtcgagcgtggggcttctcccgaacctcaccgatatccggctgttcaacaaccggctctctggacccctcccgccggagctcgggaaacactcgccgctggccaacctcgaagtgagcaacaacctcctcagaggcgagctcccggacaccctctgcctcaacaggaagctctacgacctcgtcgtcttcaacaacagcttctccggcgttttcccggcgaacctcgcggactgcgacacggtgaacaacatcatggcgtacaataacctcttcaccggcgagttccccgagaaggtatggtcggggttcccagtcctgacgactgtcatgatccagaacaacagcttcactggcactatgcccagtgcgatatcctccaacatcacacggatcgagatggggaacaaccgattctccggcgacgtgccgacctccgcaccggggctgaagacgttcaaggcggggaacaaccagttctccggtactctgccggaggacatgtcggggctagccaatctcatcgagctgaacctcgctgggaacacgatatctggcgcgattccgccttccatcggatcgctgcaacgcctgaattacctgaacttaagcagcaatcagatatccggagcgattccgcctgggatcgggttgctgccagtgctcaccatccttgatctctccagcaacgagctcaccggagaaatacccgaggacttcaacgacctccataccagcttcctcaatctctcctccaaccaactcaccggcgagctccccgagtcgctgaagaacccagcatacgaccggtcgttcctcggaaaccgtggcctctgcgccgcggtgaacccgaacgtaaacttcccggcgtgccgctaccgccgccacagccagatgtcaatcgggctgatcatcctcgtctccgtggtcgccggcgccatcctcgtcggcgcggtcgggtgtttcatcgtccggcggaagaagcaacggtgcaacgtgacgtcgtggaagatgatgccgttccgcaagctggacttcagcgagtgcgacgtgctaataaccaacctccgcgacgaggacgtgatcggcagcggcggctccggcaaggtgtaccgcgtccacctccccgctcgcgggcgcgggcgcggctgcgccggcacggtggtggccgtgaagaagctgtgcagcagggggaaggccgaggagaagctcgaccgggagttcgacacggaggtgaagatcctcggcgacatccggcacaacaacatcgtgagcctcctctgctacatctcgagcgaggacaccaagctgctggtgtacgagtacatggagaacggcagcctcgaccggtggctgcaccccaaggacaacgcggccacggcggcgctggactggccgacgcggctgggcatcgccatcgacgcggcgagggggctcagctacatgcacgacgagtgcgcgcagcccatcatgcaccgggacgtcaagtccagcaacatcctgctcgacccggggttccgtgccaagatcgccgacttcgggctcgcccggatcctgctcaagtccggcgagcccgagtccgtgtccgccgtcagtggcaccttcggatacatggctccagagtacggacgcggcgccaaggtgaaccagaaggtagacgtgtacagcttcggcgtggtgctgctggagctggcgaccgggagggtagccaacgacagcagcaaggacgccgctgactgctgcctggtggagtgggcgtggcggaggtacaaggcgggggaccctctccacgacgtcgtggacgagaccatccaggacagggccgtttacatcgacgacgccgtggccatgttcaagctcggggtcatgtgcaccggggacgacgcgccgtcccggccgtcgatgaagcaagtcctgcagcaacttgcccggtacgaccgcaccgccagcgttgccggcgcgtgccaggacgaccgcggcgtcgaactgggacatctgcccaagggaaagcaaggtcgtcaccaagttgccaagagatcgttagacgccggatcatttttgggtggcgacgaggagagcggcaacttcgtggcccatcctgtttaaattttcagtttaactttactttttcggtatgacgttaaatatttctcgaatgtaaatttttgtggcttcccgtaatatgtgctgcgtgtacacgatgaagacgatagacaaattagggatttactaaaagtaagtgtctcaatttaagtttttcata

SEQ ID NO: 131822 - DNA, 1921 bp, Zea Mays
ttttgttcctcgtcgagctcctcgctccgcagccaatcatcctcagccaaaatttctagaacctcgcgcagtcgcccgcaccacgccaatctgctgctgctctcgatggtgcgcctccatcagctcctctctcgcacgcttgcatctcaccaaatcctcgcttctgccacctccagcgtccgctccaccccgcggctgcttctccctctccggttgccgccgcctgctcctcctccccatggccgtactctgcttcccatcatcgtagccgcgtcgcgtcaatacgcctcgtcgaccttcgggaggcgagggcgctcgacgcggccgccgatgttgctgaggcgcaagagagccaggagtccgacgcggaagggccctggcgagctccgcgtgcaaattggcatagaggaggcccttcccgacgaccctggaatcctgagcattgcagaaactcttcggacggatgttgggaaggcagtgaagctggccctcaacgaccttgaaggctcggattacatgaccagagatccttctatatgcaatgtggacaagtatgctagcattgaggtctctgtgttgctttgtgatgatgatttcatcaggaagctcaacaaagaatggagggatgaggatcatgctactgatgttctgtcaatgtctcagcatatcccagagcttgatattcccattctgcagttgggtgacatagtaatttctgttgacacagctcgacggcaagcagaagaaaggggacacacacttgttgatgagataagaatcctcatggtgcatgggctattgcatttattgggctttgaccatgaagtcagcaaggtggctgaagaagagatggagaaggaagaagaacatattttaaatactcttgaatggagaggaaagggattaattaagagtgcttatgatattgctactgttatggaacatttacaaaattctgttgaggctgatagcaatatagagaaagtgatcctacaagagaaacatcaacccaaactaagccatatcatctgtgatatagatggtactatcatggattatgaaggtggtctgcatgaaaaatcaataggatctttgagagaggcaattgcaacaggagtaaatgttatcatggttactggaaagggttcacttatctatggaagggatggcaaaaaagttcatagagcagaattggatttagatgtctgcaaggaggcattgctgtactccttgaagcatagaattcctcttgttgcgtactgtgaggaacaatgtctaacattgtttgaacacccatttgttgaattgttgcacactgtacataatgaaaacaaggtaaaagtgatgcattcaattgaggaccttttggaatattcatctattcagaaattacttctttttgatagtaccaaagaggattcatctgtcctaaggcagcatttttcagaactgagcagagggaaagcacatgttatcaaaatgcattcaaatacaattgatattgttcccctcaatacttcaaaaggtggtggtttaagaattctacttgatcatcttggaataacaaaagattgcgatcttgattctattggagactataccagatggctaagcaataaatgattcaactgacatgattactgggtcgttcttaagaaaaaaatgtggaatcgtaggcgcgccaaaggaacaaaactattgctctgaaggttgcaaaaattgtcttgaacacttgtagcatcagatatagacgtgaatgattgggccttcccttggtagtaattggacagccctttcctgtggaaatcgtgttaattgaacatgagttggaatgctttgcatctgaagtgaaatttatagaacgaggataactcatacaggggaccctcggcgtccagatgcaacgtgctcgaagatgctg

SEQ ID NO: 131823 - DNA, 780 bp, Zea Mays
aagtgaaggatccacaaaagggatttgttcactgtggaatgatcaagcatgctaaacatcttagttgtctaacttagttcttcagataaacaatctgtcctttttttaaatgtcatatttttgcttcatggaactactcgtgtcattctataaggcaaatgggagctgcaaaccaaataggaaaatttctatgggttcgtaattgtctgtttgaatgaatcatgttgctgtctgaacttaatctcttttccttgcatgtaaagaaaaacagctgccaattttcttcatgttagtacatatttcaatagctaaacaactacaccttgtatacttggagaagaatcctggagttattttacttgtttccttgatttgtagagacatgccagtgaggagcagtttagtcggttcttgctttatgaagtggatgcaattagaaaggcgtgtgccagcttggaagagggctaccttcctccagttacattcattgtggtgcaaaagcgccatcacacacgattttgtcctgaagatcattgttcacacaaacagacagatcgacgtggaaatattttgccaggatgaactagatgcaaaacctgaagaactggaaggagaagagttggaatctcagcttctagagcttgttgcagctctttcgatgcatccagtgcatgtcccaggcaacaagcaaccagctcgccctgcttcacagaaagctacagctaaagacgataaattggctacactgcaagctgaaatgacattatgaccaggttaatg

SEQ ID NO: 131824 - DNA, 829 bp, Zea Mays
caggcattttgtcgggcacctgcagcctgcccatgcgaggagggtgctagcgaactgggccctcggccatagagcagagaggatgctggtaaactggggcttcatccatggggcagccacgccatgggagagggaagtgttagagggctcgaccatcgaagtttgctggtcggccatggggacgggggtgcggccttggagctccggcgttcaagggaagcagcgagagggagttgcagaccggagctcgaatggcatctagccagcgcgcgcagggggagatggtgagctgcacaaaaaaagggaaactcgatctgggaggatggcggccagatgggactgctcgagggaatccacggcaaggtggggatggccggacttgagaaggacaggaagccatatgggagagggagcgtacgtgcaggaagcgaacaaggagcccaggccatggggcgagctcacctgctcgagctcggacctagagaaatgccctgcgctaggagcctggggagggggatgctgtgcagggtgccggccagaggtaaggtgcgccagggagagctcacagccatggataacgcaggggcagagaagagctcgcagggaactcagacgtcgtgaccgctggccggatcacaggctgaggagaagttgcacccatggcgccgcttacctagagttggccgagcagaagagggcggctggccatggagttcctgctgggcaccatggaaaggggagcagaggtgctgcacggcagaaggatgaaggagagcgtggggaggaagaggaggctgttggtggcggctaggggtgggaatgaaaattt

SEQ ID NO: 131825 - DNA, 707 bp, Zea Mays
ccatggggcagccacgccatgggagagggaagtgttagagggctcgaccatcgaagtttgctggtcagccatggggacgggggtgcggccttggagctccggcgttcaaggtaagcagcgagagggagttgcagaccggagctcgaatggcatctagccagcgcgcgcagggggagatggtgagctgcacaaaaaaaaggggaaactcgatctgggaggatggcggccagatgggactgctcgagggaatccacggcaaggtggggatggccggacttgagaagggcaggaagccatatgggagagggagcgtacgtgcaggaagcgaacaaggagcccaggccatggggcgagctcacctgctcgagctcggacctagagaaatgccctgcgctaggagcctggggagggggatgctgtgcaggttgccggccagaggtaaggtgcgccagggagagctcgcagccatggataacgcaggggcagagaagagctcgcagggaactcagacgccgtgaccgctggtcggatcacagactgaggagaagttgcacccatggcgccgcttacccagagttggccgagcagaagaggggcggctggccatggagttcctgctaggcaccatggaaaggggagcagaggtgctgcacggcagaaggatgaaggagagcgtggggaggaagaggaggctgttggtggcggct

SEQ ID NO: 131826 - DNA, 2123 bp, Zea Mays
tttatcgcttctgcttgctgtctcctctcaatccgtcaatctttgtcctactacttgtttacttccatcgaggcgtgctgaaatcactacaaactttacaagattcccctacaatggcgagcgatccgtcgacgttctcgccaatcggggtggacgccatgggcggcggctacttcatggccggcagcagcagctacggaggcggcggcattatgagcgccgaggtgccgcacttccaccaccccggcgtgcttcttgaccagggcggcttcgggttcggcggcctcggcaacgcggcggtcgtcggcggcgccgcgacggcggcggatctgggcgcgcactacgcggcgaacaacatcgtgctggcctccttcgccagccagctcctcgctaacgcccccgcgccgccgcgggatgatcgtgccggcgggaggacgccgccggacgagatggacgaagagctgtacggcgtcgccggctgcgacagccgcgtcgcggcgagcttgcggtgccccagccaatccggggccatggcggtctggtcgtcgccatcgtcgtccaagaagccgtacggcatctggaccagcgccggcggaccagctcatgaaccataccacctcgccgcggccgggctctccgacgcgggaggcctccgctacccgctcgccgcctgcagtggcggcaacgcgtccgcggcggcggcgagcgagctgtcgctgactctgtgctccaactccatcgcttcctcggacagcgcgctgaacgcgacggagcagtgctcctcgggagcgagccggtccgccctgaccgagctgccgcgggcgcggtcccggatggcgctgcacttcgccgcggtggtggcgcgctcgcggtacgcggccgtggtccaggatttgctcaacgacgtcgtcggccacatgctggacggcgtcgccgacgtgaccgacgactcgtgcagcggcatcggctcggttggcgcgccgtccgcggtgagctccaacaggttcatggcctcgaccgaagacgccggcgcgcgctggggccaggcccagagggtccggagcaacctcctcaagacgcttcagctgatggacgagaagtacaaccagtgcttggacgagatccagagcacgacggccaggttcaacaccctgatgcactcgcccccgggcggcggcggcggcggcggcggcatctgcgcgccgttcgcgcaccgcgccgtgtcgacgatgtaccgtgggctgaggcggcggctcgccggcgagatcatggctgcggcgagcagggccagctgctggggcgagtcgtcgtcgtcggtgacggtggccgcgggcggcgacgtggagcggagctgggagtcggccttcatacagaagcactggtcggcgcagcagctgcggcgcaccgagcagcagtgctggcggccccagcgcggcctgccggagaagtccgtcgccgtgctcaaggcgtggatgttcgagaacttcctgcacccgtatcccaaggaccatgagaaggacgtgctggcggcaaggagcggcctcaccaggaaccaggtgtcgaattggttcataaacgcgcgggttcgtctatggaagccgatgatcgaggagatgtaccaggacctcaagaggagctcgggtgcaggaggaggagggcacggcccggcgatggagccacagcagcacttgagcaagcgtcgaatttgcgagctggaagatggtggccagtgaaccatccagctccatagctgcctgccgtggatttaccattggcccttgtagtttccctgtgctatgtttatgtacatatcattgccaacgccagcatttaacatctgcgcatcttttatcctgggttgactgggaagggccaagagcagcggcggcggatactgctggatcagggttctggatgctctattcgtccgctcagcattccgatggttgcccgtttcagatatagcggatttcatgctttgtttcttgtcatgtcagcttgcattgcagtagtcaatttcagcaaaacaatttttttttggagatttgattctttctaggatcatgagcggatttcattgcagtagtcagttataaaatggttcatcctgaggtccaaaaagc

SEQ ID NO: 131827 - DNA, 2686 bp, Zea Mays
ttcccatgtcatgcattgttgcctgagaagtgatggcgtctcccgctgccgtgccctgcccccctttgctatcctgctccttgcaggcgttccatttggaagtgttcatctttccattttagaggacgtccatggggggtcatggggagctcaatcttcgagttttgatatattttttttcttgacgtctgccttggttcttgtgttcgtcttatattttatcgcttctgcttgctgtctcctctcaatccgtcaatctttgtcctactacttgtttacttccatcgaggtccttggctccttgcccattacttgtctgtttatctccatcaccgataattacttcgccagtcattgcacttacacacagtgggtttatctgttcatgcactttcgtatgcttgaattcagtttggctctatgtgccttccaataatgacagtagtagttatcaaaccctcctttttttccttcccaatgaatcatttcgcaatcaccatggggatctttttagttacgcggctcgtcttctcgccttcttttttctctagtgctactgccactactgatccgacaggaaaaccgcagagaacaacgtgttcagagttctaactcgtgctgcttgctgtctgtaggcgtgctgaaatcactacaaactttacaagattcccctacaatggcgagcgatccgtcgacgttctcgccaatcggggtggacgccatgggcggcggctacttcatggccggcagcagcagctacggaggcggcggcattatgagcgccgaggtgccgcacttccaccaccccggcgtgcttcttgaccagggcggcttcgggttcggcggcctcggcaacgcggcggtcgtcggcggcgccgcgacggcggcggatctgggcgcgcactacgcggcgaacaacatcgtgctggcctccttcgccagccagctcctcgctaacgcccccgcgccgccgcgggatgatcgtgccggcgggaggacgccgccggacgagatggacgaagagctgtacggcgtcgccggctgcgacagccgcgtcgcggcgagcttgcggtgccccagccaatccggggccatggcggtctggtcgtcgccatcgtcgtccaagaagccgtacggcatctggaccagcgccggcggaccagctcatgaaccataccacctcgccgcggccgggctctccgacgcgggaggcctccgctacccgctcgccgcctgcagtggcggcaacgcgtccgcggcggcggcgagcgagctgtcgctgactctgtgctccaactccatcgcttcctcggacagcgcgctgaacgcgacggagcagtgctcctcgggagcgagccggtccgccctgaccgagctgccgcgggcgcggtcccggatggcgctgcacttcgccgcggtggtggcgcgctcgcggtacgcggccgtggtccaggatttgctcaacgacgtcgtcggccacatgctggacggcgtcgccgacgtgaccgacgactcgtgcagcggcatcggctcggttggcgcgccgtccgcggtgagctccaacaggttcatggcctcgaccgaagacgccggcgcgcgctggggccaggcccagagggtccggagcaacctcctcaagacgcttcagctgatggacgagaagtacaaccagtgcttggacgagatccagagcacgacggccaggttcaacaccctgatgcactcgcccccgggcggcggcggcggcggcggcggcatctgcgcgccgttcgcgcaccgcgccgtgtcgacgatgtaccgtgggctgaggcggcggctcgccggcgagatcatggctgcggcgagcagggccagctgctggggcgagtcgtcgtcgtcggtgacggtggccgcgggcggcgacgtggagcggagctgggagtcggccttcatacagaagcactggtcggcgcagcagctgcggcgcaccgagcagcagtgctggcggccccagcgcggcctgccggagaagtccgtcgccgtgctcaaggcgtggatgttcgagaacttcctgcacccgtatcccaaggaccatgagaaggacgtgctggcggcaaggagcggcctcaccaggaaccaggtgtcgaattggttcataaacgcgcgggttcgtctatggaagccgatgatcgaggagatgtaccaggacctcaagaggagctcgggtgcaggaggaggagggcacggcccggcgatggagccacagcagcacttgagcaagcgtcgaatttgcgagctggaagatggtggccagtgaaccatccagctccatagctgcctgccgtggatttaccattggcccttgtagtttccctgtgctatgtttatgtacatatcattgccaacgccagcatttaacatctgcgcatcttttatcctgggttgactgggaagggccaagagcagcggcggcggatactgctggatcagggttctggatgctctattcgtccgctcagcattccgatggttgcccgtttcagatatagcggatttcatgctttgtttcttgtcatgtcagcttgcattgcagtagtcaatttcagcaaaacaatttttttttggagatttgattctttctaggatcatgagcggatttcattgcagtagtcagttataaaatggttcatcctgaggtccaaaaagc

SEQ ID NO: 131828 - DNA, 2299 bp, Zea Mays
cgagacccttttgcgttgctctctctcccgcagcagtatataggatgggcgccaacgtctagccattgctgcatctgtttgggagaagcaaagcagggtccctccgtatttcccatggtttttgtgacttgtgagagagaacaaggccaaacactgaaacacatctctgaagtctgagccctgacccagcagcgccaagatccgggaccgggagagggacctgctccctggggggtgccctttttgaggcgtgctgaaatcactacaaactttacaagattcccctacaatggcgagcgatccgtcgacgttctcgccaatcggggtggacgccatgggcggcggctacttcatggccggcagcagcagctacggaggcggcggcattatgagcgccgaggtgccgcacttccaccaccccggcgtgcttcttgaccagggcggcttcgggttcggcggcctcggcaacgcggcggtcgtcggcggcgccgcgacggcggcggatctgggcgcgcactacgcggcgaacaacatcgtgctggcctccttcgccagccagctcctcgctaacgcccccgcgccgccgcgggatgatcgtgccggcgggaggacgccgccggacgagatggacgaagagctgtacggcgtcgccggctgcgacagccgcgtcgcggcgagcttgcggtgccccagccaatccggggccatggcggtctggtcgtcgccatcgtcgtccaagaagccgtacggcatctggaccagcgccggcggaccagctcatgaaccataccacctcgccgcggccgggctctccgacgcgggaggcctccgctacccgctcgccgcctgcagtggcggcaacgcgtccgcggcggcggcgagcgagctgtcgctgactctgtgctccaactccatcgcttcctcggacagcgcgctgaacgcgacggagcagtgctcctcgggagcgagccggtccgccctgaccgagctgccgcgggcgcggtcccggatggcgctgcacttcgccgcggtggtggcgcgctcgcggtacgcggccgtggtccaggatttgctcaacgacgtcgtcggccacatgctggacggcgtcgccgacgtgaccgacgactcgtgcagcggcatcggctcggttggcgcgccgtccgcggtgagctccaacaggttcatggcctcgaccgaagacgccggcgcgcgctggggccaggcccagagggtccggagcaacctcctcaagacgcttcagctgatggacgagaagtacaaccagtgcttggacgagatccagagcacgacggccaggttcaacaccctgatgcactcgcccccgggcggcggcggcggcggcggcggcatctgcgcgccgttcgcgcaccgcgccgtgtcgacgatgtaccgtgggctgaggcggcggctcgccggcgagatcatggctgcggcgagcagggccagctgctggggcgagtcgtcgtcgtcggtgacggtggccgcgggcggcgacgtggagcggagctgggagtcggccttcatacagaagcactggtcggcgcagcagctgcggcgcaccgagcagcagtgctggcggccccagcgcggcctgccggagaagtccgtcgccgtgctcaaggcgtggatgttcgagaacttcctgcacccgtatcccaaggaccatgagaaggacgtgctggcggcaaggagcggcctcaccaggaaccaggtgtcgaattggttcataaacgcgcgggttcgtctatggaagccgatgatcgaggagatgtaccaggacctcaagaggagctcgggtgcaggaggaggagggcacggcccggcgatggagccacagcagcacttgagcaagcgtcgaatttgcgagctggaagatggtggccagtgaaccatccagctccatagctgcctgccgtggatttaccattggcccttgtagtttccctgtgctatgtttatgtacatatcattgccaacgccagcatttaacatctgcgcatcttttatcctgggttgactgggaagggccaagagcagcggcggcggatactgctggatcagggttctggatgctctattcgtccgctcagcattccgatggttgcccgtttcagatatagcggatttcatgctttgtttcttgtcatgtcagcttgcattgcagtagtcaatttcagcaaaacaatttttttttggagatttgattctttctaggatcatgagcggatttcattgcagtagtcagttataaaatggttcatcctgaggtccaaaaagc

SEQ ID NO: 131829 - DNA, 1581 bp, Zea Mays
gtgggccccgcgctgcctgattggcctgattcccttccgccttcaattcctacgcgcggtctcccttctcttccacctcaattcgtgtcgcctacgcctctcgctctcctcccgccgcgcgcgcgagaggagggaaagggaggggaggaagccggcggggggcgcgcggcatggacgcgcgggccagggaggctgcagagaccagcggccccgggttgccgctcgccgtgcgggagctcctcgccggaggggtcgccgggggagtcgccaagaccgctgtcgcgccgctcgagcgcgtcaagatcctgttccagacaagaagagcggagttccatggttctggattgattggatccttccgaacaatctatcggacagaaggtcttttagggttttacaggggaaatggagctagtgttgctcgaattgtcccgtatgcagctttgcattatatggcctatgaagaataccgccggtggatcattcttggctttcctaatgttgagcaagggcctgttcttgatctcgtggctggctctatagctggagggacagctgtcatatgcacataccctcttgatctagtccgcacaaagttggcttatcaggtgaaaggtgcagtcagtgtgggtttcagagaatctaagccctctgaacaggtttacaaaggaatcatggattgtgtgaaaacaatatacagacaaaatggattgaaaggcatataccgtggcatggctccttcactatatggaatcttcccttactctggtcttaaattctacttctacgagaagatgaagagccacgttcctgaagagcacagaaaaggtatcatagcaaagctcggttgcggatcagttgcaggtttgctaggtcagacaataacataccccctagatgttgttaggcgacaaatgcaggttcaagccctttcgtcatccagccttgtgggtaggggaacatttgaaagcctggttatgatagcgaaacagcaaggctggcgacaacttttctcaggattatctatcaactatttaaaggtggtgccatcagtagccataggatttactgtttacgactcgatgaaggtctgtctaaaagttccgtcgagggaggaaactgctgttgctgtcttggcagaggagcgaagcaatacagctcctatcccctccagttaggcaggagtgtaggatagcattctttcttggatcttatcttctccaacgcgttggagacaataattcgacgaccatcaataagcgcataagcaagcagtcgaaaagtaattcctggcggattagcatttctgtgtacaggctcttgtgtgtgtatatgtatatatagctgatgaataaataggttgcgccccctccctattctatcgcgacgagtacaaaagaatctatgcgccttgcattccccaccctgttggattgttgcgggctgcgcgcgcagcacgacatctaggattttttggtcagatcctcgcatatctcagattccttgcctatagcctgtactggtcctatggattgttcttcccagatcgaattcaaattcacattttacggttggagactg

SEQ ID NO: 131830 - DNA, 1489 bp, Zea Mays
gtgggccccgcgctgcctgattggcctgattcccttccgccttcaattcctacgcgcggtctcccttctcttccacctcaattcgtgtcgcctacgcctctcgctctcctcccgccgcgcgcgcgagaggagggaaagggaggggaggaagccggcggggggcgcgcggcatggacgcgcgggccagggaggctgcagagaccagcggccccgggttgccgctcgccgtgcgggagctcctcgccggaggggtcgccgggggagtcgccaagaccgctgtcgcgccgctcgagcgcgtcaagatcctgttccagacaagaagagcggagttccatggttctggattgattggatccttccgaacaatctatcggacagaaggtcttttagggttttacaggggaaatggagctagtgttgctcgaattgtcccgtatgcagctttgcattatatggcctatgaagaataccgccggtggatcattcttggctttcctaatgttgagcaagggcctgttcttgatctcgtggctggctctatagctggagggacagctgtcatatgcacataccctcttgatctagtccgcacaaagttggcttatcaggtgaaaggtgcagtcagtgtgggtttcagagaatctaagccctctgaacaggtttacaaaggaatcatggattgtgtgaaaacaatatacagacaaaatggattgaaaggcatataccgtggcatggctccttcactatatggaatcttcccttactctggtcttaaattctacttctacgagaagatgaagagccacgttcctgaagagcacagaaaaggttcaagccctttcgtcatccagccttgtgggtaggggaacatttgaaagcctggttatgatagcgaaacagcaaggctggcgacaacttttctcaggattatctatcaactatttaaaggtggtgccatcagtagccataggatttactgtttacgactcgatgaaggtctgtctaaaagttccgtcgagggaggaaactgctgttgctgtcttggcagaggagcgaagcaatacagctcctatcccctccagttaggcaggagtgtaggatagcattctttcttggatcttatcttctccaacgcgttggagacaataattcgacgaccatcaataagcgcataagcaagcagtcgaaaagtaattcctggcggattagcatttctgtgtacaggctcttgtgtgtgtatatgtatatatagctgatgaataaataggttgcgccccctccctattctatcgcgacgagtacaaaagaatctatgcgccttgcattccccaccctgttggattgttgcgggctgcgcgcgcagcacgacatctaggattttttggtcagatcctcgcatatctcagattccttgcctatagcctgtactggtcctatggattgttcttcccagatcgaattcaaattcacattttacggttggagactg

SEQ ID NO: 131831 - DNA, 1493 bp, Zea Mays
gtgggccccgcgctgcctgattggcctgattcccttccgccttcaattcctacgcgcggtctcccttctcttccacctcaattcgtgtcgcctacgcctctcgctctcctcccgccgcgcgcgcgagaggagggaaagggaggggaggaagccggcggggggcgcgcggcatggacgcgcgggccagggaggctgcagagaccagcggccccgggttgccgctcgccgtgcgggagctcctcgccggaggggtcgccgggggagtcgccaagaccgctgtcgcgccgctcgagcgcgtcaagatcctgttccagacaagaagagcggagttccatggttctggattgattggatccttccgaacaatctatcggacagaaggtcttttagggttttacaggggaaatggagctagtgttgctcgaattgtcccgtatgcagctttgcattatatggcctatgaagaataccgccggtggatcattcttggctttcctaatgttgagcaagggcctgttcttgatctcgtggctggctctatagctggagggacagctgtcatatgcacataccctcttgatctagtccgcacaaagttggcttatcaggtgaaaggtgcagtcagtgtgggtttcagagaatctaagccctctgaacaggtttacaaaggaatcatggattgtgtgaaaacaatatacagacaaaatggattgaaaggcatataccgtggcatggctccttcactatatggaatcttcccttactctggtcttaaattctacttctacgagaagatgaagagccacgttcctgaagagcacagaaaaggtatcatagcaaagctcggttgcggatcagttgcaggtttgctaggtcagacaataacataccccctagatgttgttaggcgacaaatgcaggtattgttttgctcatagcatgtgtctgtaaagcatgtatgtgttctaaataatatgtggtgcattatttacaggttcaagccctttcgtcatccagccttgtgggtaggggaacatttgaaagcctggttatgatagcgaaacagcaaggctggcgacaacttttctcaggattatctatcaactatttaaaggtggtgccatcagtagccataggatttactgtttacgactcgatgaaggtctgtctaaaagttccgtcgagggaggaaactgctgttgctgtcttggcagaggagcgaagcaatacagctcctatcccctccagttaggcaggagtgtaggatagcattctttcttggatcttatcttctccaacgcgttggagacaataattcgacgaccatcaataagcgcataagcaagcagtcgaaaagtaattcctggcggattagcatttctgtgtacaggctcttgtgtgtgtatatgtatatatagctgatgaataaataggttgcgccccctccctattctatcgcgacgagtacaaaagaatctatgcgccttgcattc

SEQ ID NO: 131832 - DNA, 1178 bp, Zea Mays
gtgggccccgcgctgcctgattggcctgattcccttccgccttcaattcctacgcgcggtctcccttctcttccacctcaattcgtgtcgcctacgcctctcgctctcctcccgccgcgcgcgcgagaggagggaaagggaggggaggaagccggcggggggcgcgcggcatggacgcgcgggccagggaggctgcagagaccagcggccccgggttgccgctcgccgtgcgggagctcctcgccggaggggtcgccgggggagtcgccaagaccgctgtcgcgccgctcgagcgcgtcaagatcctgttccagacaagaagagcggagttccatggttctggattgattggatccttccgaacaatctatcggacagaaggtcttttagggttttacaggggaaatggagctagtgttgctcgaattgtcccgtatgcagctttgcattatatggcctatgaagaataccgccggtggatcattcttggctttcctaatgttgagcaagggcctgttcttgatctcgtggctggctctatagctggagggacagctgtcatatgcacataccctcttgatctagtccgcacaaagttggcttatcaggtgaaaggtgcagtcagtgtgggtttcagagaatctaagccctctgaacaggtttacaaaggaatcatggattgtgtgaaaacaatatacagacaaaatggattgaaaggcatataccgtggcatggctccttcactatatggaatcttcccttactctggtcttaaattctacttctacgagaagatgaagagccacgttcctgaagagcacagaaaaggtatcatagcaaagctcggttgcggatcagttgcaggtttgctaggtcagacaataacataccccctagatgttgttaggcgacaaatgcaggttcaagccctttcgtcatccagccttgtgggtaggggaacatttgaaagcctggttatgatagcgaaacagcaaggctggcgacaacttttctcaggattatctatcaactatttaaaggtggtgccatcagtagccataggatttactgtttacgactcgatgaaggtctgtctaaaagttccgtcgagggaggaaactgctgttgctgtcttggcagaggagcgaagcaatacagctcctatcccctccagttag

SEQ ID NO: 131833 - DNA, 324 bp, Zea Mays
atggcgtgggcagctcggtccaacaagggggtggcggggcgacaggtcaggcgaggcttgcagaggatggtgactcgatatggcgtgggcagctcggtccaacaagggggtggcggggtgacagaatcaatcatgacaagaggacttcgaagattaaagaatttgaacattgatggagatggtgcagaagttgctcaggaggagcacgaaaatgtggcagataatgagaacaatgaaagtttacagtcccctcctgatgttgatggtttattagtccgcctgccacaccttcctcgaagtccaattaagatcatatttttttaa

SEQ ID NO: 131834 - DNA, 240 bp, Zea Mays
atggccaccgggcggcccgtacgactcgtgctggatgcctccctcctcctcgacccctcctccaccagggaggcggcggcggcggctctgcggcccggggtagaggagctgcggcggcggttgcgctactccaacctcaccgtggcatggtcaaatgtttctatattatgtcgcgatataatcaagtgcatgataacccatgtcaagttcatcatgaaatatgggaccattgaattttga

SEQ ID NO: 131835 - DNA, 119 bp, Zea Mays
ctgattttctcttcttatttccattttcttggttatttcaaattacaaattaaagtttattttaatcttatttcaggtttgagttagtatttataatgcaacaatcgaagaaacccaac

SEQ ID NO: 131836 - DNA, 1406 bp, Zea Mays
aacggatccgctctcagactcagagcaagctctctcgtaagaggcatttggcggcaagtaacaagataagaatgagaatggcggcggcgagcaacggcgcccccctggtggtgttcgacttcgacaagaccatcgtcgactgcgacagcgacaactgggtcgtcgacgccctcggcgcgacccgccgcttcgacgagctcctgcgccacctcccatggaaccacgccatcgatgcaatgatgggcgagctgcactcggagggcaagacggccgaggacatcagaggcagcctcagaagggcgccgctgtccccgcacgtcgtcgcggccatcaaaaccgcctacgccctcgggtgcgagctgcgcatcctgagcgacgccaacgccttcttcgtcgacaccatcctcgcgcaccacggcctcgccgactacttctccggcaccgacaccaacccggcccacgtcgacgccgccggccgcctcaggatccgcccctaccacgagttcggcgccgccgcccacggccacggatgcgccctcccgacctgcccgcccaacatgtgcaagggcaaggtgatggagaggatcctgctccaagaagaagcagcagccgcagccgcagccgcctcggcgaagtcgcggcggcggagggccgtggtgtacctgggcgacgggcggggcgactactgcccgtccctgaagctgcggggtggtgactacgtgatgccgcgggccggccaccccctgtgcgacctcatcgcggcctcgccgcccgccgccgccgtccgcgggtgggccggcttcgaggacctcgccagggttctcctcggcatcgtcgacggcgagatcgcccgcgccgccgcggaagaaggcgctggcgcgggcgtcgttgtcgtcgtgccggcgcgtcaggaggcgctcatgccccaggcggtccgcgtgcccaactgattgatgatcgttctctgatacaggtggatgcgtggaatatggcgcgccaaattactagtattaataactccaggctccatctattgtgctgagtgctgactggatcatgctggaaatctgcctcaaactgagagccaattagttgctggtttcttcgtgatatgtactagtattcctatggatccacccaagatatccattcccttgctgcacgattctgagtgattcattgtgatcctatcctgacctcatcaaatcgaccaaaatcggagtcaacagtgatcgttaaaaatggcatgcattggagaagctttcgttgggtctttctagttgtgtcacttaggatccctatgatcctatgatgtgatggatttagttctgaacttatcgcaaaatcgaattattatagaaaacgacaaaagatataaacaaagttaaatgtcaattgtcatgtca

SEQ ID NO: 131837 - DNA, 575 bp, Zea Mays
aacggatccgctctcagactcagagcaagctctctcgtaagaggcatttggcggcaagtaacaagataagaatgagaatggcggcggcgagcaacggcgcccccctggtggtgttcgacttcgacaagaccatcgtcgactgcgacagcgacaactgggtcgtcgacgccctcggcgcgacccgccgcttcgacgagctcctgcgccacctcccatggaaccacgccatcgatgcaatgatgggcgagctgcactcggagggcaagacggccgaggacatcagaggcagcctcagaagggcgccgctgtccccgcacgtcgtcgcggccatcaaaaccgcctacgccctcgggtacgtacgagctgcgcgcctgcgcctgcgctgccctttggccccttcccttccctgcgagttctctcttgatcctccccagatcctcctcttcttcaggtgcgagctgcgcatcctgagcgacgccaacgccttcttcgtcgacaccatcctcgcgcaccacggcctcgccgactacttctccggcaccgacaccaacccggcccacgtcgacgccgccggc

SEQ ID NO: 131838 - DNA, 165 bp, Zea Mays
atgaggtggccactagcaccatcaggggaatacgacgaagctcccagtcccggccccgagaatccgacggcggcacgagcgtggattgacaacagcaaatccaatcctcgcccacaggtccgcggtggcccacgtgattccggcgagcgtgacaaaacgccctga

SEQ ID NO: 131839 - DNA, 339 bp, Zea Mays
gcagcggaaatcttattaccaaattttacaagttacaaaaattttacttcgtacatgatcagagtgattactacattgattcaaagaaagaaactttgaacagttataaattatttatagttttgaaatatatgctagctcaagtgaccatcctcaataagaagataaaggcggggtatacttatataagaaggccgagcccaccggcacttaacaccatcaacagcagcacaaaaactataacctgaaaaacaacagggaataaaaccctgagtatggaattactcagcaagacttacccgactaaagaaaagactctcaaggatatgctagatttgg

SEQ ID NO: 131840 - DNA, 1229 bp, Zea Mays
acctgtcaggttgttagtggggattaactttagaagaagggattaacttcctctggcccacacgtcagccaccacgtgcatcgtccggccggtgagggaccaccgcggcagctatcctcggcgccgcgctcacgattccggaatcactccccacgcgattcgatcctctcgccggcccaggcatcgtagaatccccccaccgaaaaaaatcaagcgggcatacaaagagcgcgtgcgcagtgcttggaataggtgggtcgaacttcgaaggggttcgaggacttcagctatggcatctgtgggacgtgcaggacgaggagggaaaggagatggagggaagggagaagggtcgctggctcgcagggcgtggaggcagtacctgctccagctccagcaacatcctctccgcacaaagatgatcacggcggggtgcctcgccggcgtcagtgactccgtggcgcagaagctctctgggttccagaagattgagaaacgcagactcctgctcaagatgctctttggttttgcgtatggtggcccatttggacatttcttgcacaaaattttggattacatcttccaagggaagaaggataccaaaaccatagcaaagaaggtgttgctggagcaagtgacatcttctccctggaataacatattgttcttgttctattatggatatgttgttgagaggaggcctttgaaggaggtgacgaccagggtgaagaaacaatacccttctgtgcaactcagcgcttggatgttttggccgatagttagttggataaaccaccagtacatgcctttacaattccgagtgatcttccacagctttgtcgcatgttgttgggggattttcctgaaccttcgtgcaagggccatgtctctgaagcaggcctagatggtttagaaggaacgtatagcatcgtagctcctgcccggtgctaactaaagcagccgaagaaggaggacgctggatgctgtatcctgtactgttacaaaaaccgttgtttatttcctggtagtagtcggtttatttgattgtcaacgcatgcgaagacagattatgcttttgtaaaaaaaaaaattgtgatgggagcaaagtatggtgaattcggttagctttgaggaccagttcgtattcgttcattcattgttcagctaaatggtcatgggactgttccagcgtccaccgttcttgctttgctggtaatcaaacctgttgcctg

SEQ ID NO: 131841 - DNA, 963 bp, Zea Mays
gaggagagagagagaacggtgcgcccgcctgctcctcctcctcccccttccgtcatttataagcgacggcaacacaggcgacgaagccggggagaggggggcgcacgaggcaatttatagcgaggagaagaggagcggccgggcccgagcagagcaggccgggccagccatctctcctctgcggcgtcggcgcccgggatgggggactctggcggctccgttgtgtcggtcgacgtcgagcgcatctccttcggcggcaaggaacaccatatacaaacgaatcatggacctgtatctgttgcagtgtatggtgaccatgacaagcctgcccttgttacttatcccgatattgctttaaaccatatgtcctgcttccaaggactattgttctgtcctgaagccgcttcactgctgcttcataatttttgtatttaccatatcagccccccagggcatgagttaggagctgctccaatttcaccgaatgctcctataccgtctgttgacgatttggcagatcaggttgtggatgtcctcgatttctttggattaggctctgttatgtgctttggtgtcactgcaggtgcctacattctaactctgtttgcgtcaaagtatagggagcgggtactaggtctcatccttgtttcacctctgtgtaaaggccccacttggactgagtggttatacagtaaggtgatatccaatctgctgtattactatggcatgtgtgggttggtgaaggagtgcctacttcagcggtacttcagcaaggaagtgcaaggattctctgaattgcccgagtcagacatagtgcaggcttgtagaagcttgctagatcagcggcagagcatgaatgtgtggcgctttgtacaaacaatgaatcagtacgtaaacatctcacacctgtatactaatgatgattgtgcggtggaaaaactcggaggtgaagttaccgcgtac

SEQ ID NO: 131842 - DNA, 1580 bp, Zea Mays
agaggcaccgtatgtaagatcgaagcaagagattacacgtagatggagtcactactccagtcgcaaggcgtagccgccgccctgctcccggcctcgcgcccgcgcccgcgccgcggcaaccggctccggcggcgcacgcgggcccaggctaacatccggcatctggtcagcgtcgacgacctgcggcaggtcgcccgggacgccgccaccgtgggctgcggcggcgccgacgaccacgccttgaacggccgcgcgccagttgaaacgccgacgccggaggtctcccgcggcgcgggaaccgtggcccagaggctccgcgcaatcgccgaggcgtgtgcggaccgcgccgacatgcacgacatcatcggcaggcagcgggacaactggaaccacctgctgctccacgccaccaactccctggcgctcacggcgtccctggcgtccgcgctcgcgccggcctccccgacgctcccagcgctcagggcctcggccggggtcctcctggccacggcggccgtcaccatggccgccgtcaacaggatgcagccgtcgcagctcgccgaggagcagcgcaacgctacgcgcctctggaggcagctcgagcgcgacgtccgcgccgcgctcgaccaccggacggccaccacagccgaggccgacgacgacgtccaagaggccatggacagggtgctcgccctcgacgcggcgtacccgctgccgctgttccccggcatgctcgacaagttccccagcgccgtcgagcccacccggtggtggcccagacggcagccgaggaagaggccggctcagtcggccgccaagaccgtcaacggcgccacggccagcaactgcaacggctggacgcgggagctggaggacgagatgcgcggcatcgtgcgggtgctcagggccaaggacgagcaggagtacgtgtctaacgccaagctggctctgcgtctcaaccgtggcctcgccgtcgccggcccggcgctcgcgggcacggccgcgctggccacggccttcatcggctcctccggcgaggccggctccttggcccccggtgccgccgtcctgtgcggcgcgctggcggcggcggtgaacacgctggagcacggctggcagctgggcatgctattcgacttgttccgcaacgtcgccggcttctaccgcaagatccaggaggacattgaggcgtgcctcgacgaggttgacgtcgagcgcagggagaacggcgaggtgttccagaccaaggtcgccctgctgctcggccggagcacgtctgaccttagccacttcagggagatggcgtcgccgtcgttcaaggacgaggacatcaaggatttcgccgggaaactgttttagactctctcaccaagttcggtcgcgtactaactacgtagggtgctcttaactgttcatagttcatacgtgtagctatcatctcattttgtatattaggaaagtgtccggttttcatttataactaggtaaatacatgtgtgttgtaatgggaaaaaatagtacaacaataatatatgtatgaccatgtgttgtgttgttaatcaaaattaagctgcctctag

SEQ ID NO: 131843 - DNA, 1918 bp, Zea Mays
aatcaattcgaatcctattcgttgggctcgctttcttcagttgcattacttggcccacacaaactcttcccaataaattacgacccccagccaagctttggagtgcggttcccaaccatggcggcctcccccacttcctccctcgccccgccggtggtgcctatggagcttcacgccggcaaccgcgaccgcctcgtcgccgcgctccgcggccacatctccgcctccgcgcgcccgctccacggcctcgtcctccttcagggcggggaggagaagacacggtactgcaccgatcacctcgagctcttcaggcaggagagctacttcgcctatctctttggagtgcaggaaccagggttctacggcgcaattgacatcgcctctggacagtcaattttgttcgctccaagattgccagctgactatgctgtttggatgggtgaaataaaacctttgtcgtacttcagggatacatacaaggttgatatggtcttctatgttgatgagattgcaagggttgtgcaagatcatttcgggaaccatggaaagcctcttctgtttctgctacatgggaggaatactgactctggaaatttctcaaagcctgctagttttgaggggatggagaactttgatactgatttaattacacttcatccaattttaaccgaatgtcgtgtgattaaatctgatctggagcttgctctcatccggtatgctaatgatgtcagttctgaagctcacattgaggttatgagacgagcaaggccaggcatgaaggaatatcaattagaaagtatcttccttcaccatgtttatatgtatggaggttgccgacattgctcttatacatgtatatgtgctactggagataatagtgctgttctacattatggacatgcggcagctccaaatgaccggactttgaatgatggagacatggcactaatggatatgggagctgaataccatttctatggatctgatatcacatgctcataccctataaatgggaaattcaacagaagtcagacaataatatacaatgctgtgcttaaggctcataatgctgttatatcagacatgcggcctggagttaattggatggatatgcacaaattagcagaacgggcaatacttgaatctctcaggaaggaacaaattgtacaaggggatgttgatgatatgatggctcaaaggttaggggctgttttcatgcctcatggtcttggccacttacttggtattgacacccatgatccaggaggctaccctgagggattggagaggcccaaggatccaggactgaactccttgcggaccacaagagaactgaaagaaggaatggttatcacagtggagccaggctgctatttcattgatgctttgctaactaaaacaagggatgatccaatttcctcaaagttcttcaactggcaagaggttgaaaagtataaaagctttggtggcgttcgcattgaaagtgatgtgtatgtgacggctcaaggatgccggaacctcacaaactgcccgagagagacctgggagatcgaggctgtaatggctggcgcaccatggcctctgccggcttcaagttctatggtggtagcagcagagaatagcaatgacatatctaaagcgtcgtaattttctctatgctcaatccatatcccgagttgaaacaaattcgacctggattcttatattcaataaatagtgaggctgaggcgcaaaacattgttggattgatggctggaaaacatttcatacgctcacttaatttgtaagctttctgttatgtgtttgagatcgatggggaaacgtttagctattcaaatgtcttgtttttgtggagagtttcaaatgccttagaattaactcatcctggaccggaagaagattggacaaaaagatgttt

SEQ ID NO: 131844 - DNA, 739 bp, Zea Mays
agcaggggctagcagggcgtgagctgcgcgcaggcacgcgacgaccacggcaagggagcagagaaaattgtgcggatgactggaacagagacggcgagcacacgcgcacaaaaaggggagcacgcataggatagggaactgcggcgatgaagcgccatagctggagcaagagcgggacgcgaactaggcgacgacagcgcgcaaggacgatcttggctaggggaaaaactccgcgggcagggatccgagctgaaaggagccgggggagatgggcgcgcagaacgccgagcagagactggagcagggaccgagctcgacacagggagtttcacggcgcggtggccatgtctgggaccaggggcgcgacgatgggaactgggggaaaaaatggagctctagccggacgtcaggaagacgaccgagcagggcaccgaggaggaagtccagggcgtggcgattttggctgccgcgtcaactgttgccctctgttcccaccggaagaaacgacgaatggtggcgagcaggcacggctgggttggaaggtgcacagcgcgcagataaaaaggaaccgtgggcggcgagattttatcctctggcgactggagatcttttctccatgagcggcggccggatgaagatgatgacgcgcaggaaatatcccagggagataaacgatgcagcaaggaggttgaagataagagatgtacgcatgaaaaaatcaacgtcacgagctttttaa

SEQ ID NO: 131845 - DNA, 436 bp, Zea Mays
ataagtgatctgcagcaaatgttcttcttcctaaccaactgtatatgctcttaattgtcctctaatttcaataatatattgccattgttctatatatcagggtgactattcttacctgaatagagtattttgtgatctctttatccaggaaggataccagttcaactatgtgtttgactggaccattctgaagtatcctcagctaggctccaacctgtgaaccagggcaggtgaaagaaccagtggagctgctggaccctcaatggataagatggagaaggccccaggtttgccctactcttgcaaaaaaatgcgtaacaaatctgtggtacaaaccagacacatatttgtgcccgatcttcgtgtaggagaagcgttcggtagaaggaaccctagcggtcctgtgaaccagaccgacagttacgcgtaacagcca

SEQ ID NO: 131846 - DNA, 392 bp, Zea Mays
gatgtaagcaatctcatgcacctgttgttgctcgcaaggttcatccctcacaagtacaagatcaaagactcgaaagcttaggttgctttgagccatggtggatctcccggtgtgacaacatggggctgggtctgggagctcttctcaaatccgggggctctcggtctgctcttctcaatttagtgttatctttttcttttagaacaatgccaaagaaacatgacagattgctttgcttgtttttgacatgatgcaaaagcaattgagtctttacttttaaacctttgttatttttgttttgattcaattctgatactgctgaaatgtacgaatatctattattttgatgcaatagtggtgttttgcaatgtttaacagcttgtgtgatccaa

SEQ ID NO: 131847 - DNA, 535 bp, Zea Mays
atggagatcgactacagccactgggtggacgagcagaagaggcacacggcggagctgacgtcggtgctccaggggcagcagacatcggagctggagctccgcctgctggtggagacggggctcagcaactacgagcgcctgttcaggatcaaggcggcggcggccaacgcagacgtgttctacgtcatgtcgggcttgtggaagacccccgccgagaggttcttcctctggatcggcgggttccggccgtcggatgtcctcaaggtacgtgcgtggccggctagctgttcccctctccccgcgaacccacacacagcagtgatgattcatctctgttgttgctggtgatgaatgacggatggaggcttaagagaacacaatgtttttctgtgccagaactttattttattttatgtagaagtgtagaaccatatagtctctttggctaatttaatatcgttttgttatctggaaatctggactaatatatttatcacatctttaaaagtggtattttgaattattagatcgacat

SEQ ID NO: 131848 - DNA, 248 bp, Zea Mays
ggcctgggaaatcaggatttccctccatcagctaccaagcctgtagatcagtcggctgctgccttcctggttgagcaaccaaatctataccctggacaagttaccattgtcgccctcagtccactaaccaaccttgctctggcagtcgagcttgaccctttgttctcgaagaatatagggcagattatttttcttggcggtgtgtattcaattaatggtaatgtgaactatgcagctgaggcaaatgt

SEQ ID NO: 131849 - DNA, 228 bp, Zea Mays
atgccgcccacaacagtcgtctgcctcggcgcccccagccgtcctcctcatcagtttgctcctcgctgccttgccgtgatcaagatgtcccctggaaggatggctggggcaaggacacgcacagatcttgttgagcttgaatcagagaagcaaaactcattagaagttagagctcagttagatgccctcaagaagaaggtagaagaatcagaaaaatcaagggtttaa

SEQ ID NO: 131850 - DNA, 109 bp, Zea Mays
gttaccttgtgttgtttaaagttcctcaagttgctagttaccaccatcgtattcatatcgtgtcattgcatttgatctcggcaccctattagtgttataaaaaagagag

SEQ ID NO: 131851 - DNA, 105 bp, Zea Mays
gtgggttcgacctttgcttatggtcatggaagaggcgacgatgccaaaactcttgcagagctcggattccaaatcggtgattacttgagcgttgcaatcatgtag

SEQ ID NO: 131852 - DNA, 103 bp, Zea Mays
ccttactattatttgtaagttattaagtgtactacaacttttatatttggcccaagccatgatcataaggtttacatgaccttttgatcctacttacatctag

SEQ ID NO: 131853 - DNA, 499 bp, Zea Mays
aagcttattgtatttgcagatgtatagtgctcagatgggatctcaaatgggaccccagttcacccgtacgacaatctggacagaccccaaacaccaacgaaacacagggttctaagaccgaacaaggaaacccacagatggacatgcagtggtcgatgcctcctagaggacagattcttcctcctccacaaccaggtatgggatattggccgccaccaccatggggatatcctacacatccaatggggccatggggacgcccccctggccaacacagccacttccatcactagcggatttcggctctcatcaagtgactcctccccctcacgatgactttgcgggcagatgtctcaattctagtggtggagctacgaacaacaatctgatgtcctgatcgagagcgatggagctaatgtttgaacttgtgtgtttgaacttgtgaactaaaattgtgcactatggatgtgaacttatgtgaatttgtgaacttatgtat

SEQ ID NO: 131854 - DNA, 538 bp, Zea Mays
atttaattacatttataccttcggcttgatagaaggcaaaaatccaagtgttgcgcacgagcgattacaagatagccatgggatcaacgagaagtactgtcacgcaccaccaccggcagaggacgagaagccaagtcctgcgcccccgatgcggccaccaccaccaccaccgctgccacccagggaacttcctccaccgaagccgccgacgtcatcgtcgccgttgtcgacgcgagggcgcttggcctctgcggcgttaaagatccgcgccgcgatctcctgcgcacgctgcttcgcgagctggatctcatcggggggcggcgcaacgctgttgtacgacggggcgccgccagcgggcggcgaggcaggcggcgggccagaagagaaccccgtgcgccgcggcggcggcgaggggtcgtcgtacttccgcttggacgagtagtggtcgtcggccatggcggaggacgggtttgctagggtttgggcggcggctgcgggaacgaggaagcgataagacgggggaaaccctagcacgctt

SEQ ID NO: 131855 - DNA, 1785 bp, Zea Mays
gccgcgggctggggagcacgggccttggcatcgtcatagccgcgggagtcttcggcgccgccgcctcgttgctcctcgcctacttcttctagcagtgcaccgggaagggcaaaggaggccgccgtcgccacaggcgcggcaccagcgagtcgggcggtggggaagacgggagctggtggaccgagaggctgcgggcggcgcacaaccgcctggtcccggtctcgctgttccagaagcccatcgtgaaggtcaagctcgctgacctgatggccgccacccatgacttcagcactagccacatcgtggtcgccgggagctcgcgggcggccggggacagcttaccgagccgtgctacgggacgggtctgcactgacggtcaagcgcctgcactcgtgcccactttcggagaaggcgttcagggcagagatgggtcgtatggggcagctgcggcatcctaacatcgtgccactgctgggcttctgtgttgtcgaggacgagaggctgctggtgtataagcatatggagagtggggctctttcatcggtgatgaagaagccaggggaagcgccgctggattgggcaacgcgacttaggatcgccgtgggggcagcaagggggcttgcgtggctgcaccatgggttccaggttccgcagattcaccagaatttgagctcgagtgcagtgcttctcgacgaggattatgatgctcggatcacgaatgttgggctcacaaggttggtccggatggcgcctggcgagggtggtgataccagtcctttcctgaacggggactttggggagtttggctatgttgctccagagtatgctagcaatccagttggtacgatgaaaggcgatgcgtatgcatttggggtgatattgtttgagcttgttagcgggcaggaggctgctgctgtggttactgacgtgacaggtgaaggattcaaggggacattagtggactgggttaaccagctcaaggcttctagtcgaatcagtgatgctattgataaaccattgcgtggaaagggccatgaggcagagattcaggagttcttgaagatagcttttgcttgcacccagccccgtgtgacggagaggcattcaatgtatcgggttttccacgctctgaagagcatcggagagggctgcgatgtcacggagcagtttgatgagttcccattggcctataacaaggatgattcagacgctatttagctgatgatgctgattgccaattcgattgtggaaatgtttggtcaggcttattgatgatatatatatttagccttgctatggacagaccggaagcataaatgagtgataagagaacaatatcgaggcaccaaatctagcgccggatgccgggtggtcaattacatcgttgcatcgacaggggatgtgataaccataagtaatattgctcgaaaatgtagagctgactcttgaagcctttgactacatgcagctgccattcacgctgaaagcgcattctaacacgacatgatacaccagcaattggaatgttgtcaacatcagcggcaacgacgacaacgccacatcgagaaacaacaactgtgggccagggagcacaatcccgtggtgcggtgacttgcccacgtttgccatgctgccttgatgcatggcacatcaacaagaagagcaccagtttggaaggctaattccgaaggaattgagatgtgcagagggagatgaagaatgtggagaaagacatcagggtagctaccaagcgcaatgacatgttatctgcaaaggtacggtcag

SEQ ID NO: 131856 - DNA, 2145 bp, Zea Mays
ccctcaaccgcgcattcccctctcccacacccgcctcgttcgcccctaccgcgccatcaacgcgcctcccccgccgcacaccccgtcctccccatgccgaatcgtgatggttatgctccccacccacgcgccacgtgcctcctccttccccgccgctcccacccgagatggttagctcccctccttcttctggtcccttcccctgcctcactgccagccagcgatggagcaaggccaagggattcgccggattcaccgagcgggctctggtggcggccggcgctgccgtcgtgtccgccattcttgtcaacccccttgacgtcgccaaggtacgccggtgaccctgtcgttgcctctttcgcttcctctcaactgccgcccctcaaccctcgacacttgcccacaactgtcgccattgcccgctcgccatggcactaaaataaaccccctctgtggccgccccgtatcctctcgctgcggccgcgggctggggagcacgggccttggcatcgtcatagccgcgggagtcttcggcgccgccgcctcgttgctcctcgcctacttcttctagcagtgcaccgggaagggcaaaggaggccgccgtcgccacaggcgcggcaccagcgagtcgggcggtggggaagacgggagctggtggaccgagaggctgcgggcggcgcacaaccgcctggtcccggtctcgctgttccagaagcccatcgtgaaggtcaagctcgctgacctgatggccgccacccatgacttcagcactagccacatcgtggtcgccgggagctcgcgggcggccggggacagcttaccgagccgtgctacgggacgggtctgcactgacggtcaagcgcctgcactcgtgcccactttcggagaaggcgttcagggcagagatgggtcgtatggggcagctgcggcatcctaacatcgtgccactgctgggcttctgtgttgtcgaggacgagaggctgctggtgtataagcatatggagagtggggctctttcatcggtgatgaagaagccaggggaagcgccgctggattgggcaacgcgacttaggatcgccgtgggggcagcaagggggcttgcgtggctgcaccatgggttccaggttccgcagattcaccagaatttgagctcgagtgcagtgcttctcgacgaggattatgatgctcggatcacgaatgttgggctcacaaggttggtccggatggcgcctggcgagggtggtgataccagtcctttcctgaacggggactttggggagtttggctatgttgctccagagtatgctagcaatccagttggtacgatgaaaggcgatgcgtatgcatttggggtgatattgtttgagcttgttagcgggcaggaggctgctgctgtggttactgacgtgacaggtgaaggattcaaggggacattagtggactgggttaaccagctcaaggcttctagtcgaatcagtgatgctattgataaaccattgcgtggaaagggccatgaggcagagattcaggagttcttgaagatagcttttgcttgcacccagccccgtgtgacggagaggcattcaatgtatcgggttttccacgctctgaagagcatcggagagggctgcgatgtcacggagcagtttgatgagttcccattggcctataacaaggatgattcagacgctatttagctgatgatgctgattgccaattcgattgtggaaatgtttggtcaggcttattgatgatatatatatttagccttgctatggacagaccggaagcataaatgagtgataagagaacaatatcgaggcaccaaatctagcgccggatgccgggtggtcaattacatcgttgcatcgacaggggatgtgataaccatgtaagctgtaatatcagtttacaattctgtatgttgttttaaagttactgttagtgcctgtagtatctgtgtggaactgcaattcttgatggccaaaatcctggtgtcacctttcgaagttccttcttggaacaaccagcttgctgttcagtcattggattggcactcaatgtttcattaccttcttggaaacttataggagggtcctgggtagttaaaaatgttctaatgtctctttagcttatactcttctt

SEQ ID NO: 131857 - DNA, 1735 bp, Zea Mays
cacccacacaaaccaccatgccaccgcggaatccacccactattttgcactgtttgtttttagttccctttaaaatgccgcggccggcgcggcgcatccggctgcgtaccggcccccttttccacccacccgcccacccctcgtttcctgcaattcgccgccatcgttcgctgaacttgagcgcgtctgccgcctgccaccaccgctctctgcctctctgctgctctgttctttctcccgccggggcagaggagggcggggaggcccgttgagcgagcctcggtcggtatggggatctgcgcctcgtccaagcgcgtgcggcaggaggagcaggactccgacgagaacgtggtgtacgtgatggacgagcagggcggcgggggagaaggcgaggacggccgtggcgcccgcgcggcggcatcccgcaaggtggcctccctcttctcgcagaagggcaagaaggggcccaaccaggacgccgtcatactctgccagggattcggcatggaggacggcgtgttctgcggcgtgttcgacgggcacggccggtgcgggcagttcatcagcaagctggtgagggactacctcccgttcatgatcctgagccaccggaacgcgctcctcatgggctccgacgacgacgacgatgatccggccttcagcgacgcgtcggcgtcggcgtcggcgtcgtccacggacggcagcgggcagtcgtcgccggcgccggcgcagctgctggaggagtggcgggaggcctgcgccaacgcgttcgaggccatggacaaggagctcaagctccaggccaacgtggactgcaacttcagcggcaccaccgccgtgtgcgccatcaagcaggggaaggacctcatcgtcgccaacctcggcgactccagggccgtgctggcgaccatgtcggacacgggctacctcaaggccgtgcagctcaccaccgaccagaagcccaacgtgccccaggaggctgagcgtatcaagcgctgcaacggccgcgtgttcgcgctcaaggacgagccgtcggtgctgcgcgtgtggcttcccgacgaggactgcccgggcctcgccatggcgcgctctctgggcgactaccgcctcaagcgccacggcgtggtgtcggagccggaggtgacgcaccgccgcgtcgcgccgggggacctgttcatcatcctggccacggacggcgtgtgggacgtgctcagcaacgaggaggtcgtgtccatcgtctgcgccacgccgcggaagcagcacgcgtccaaggccgtcgccgaggccgcggcgcagcgctggcggaccaggtacccgacgtcccgcgtcgacgactgctccgccgtctgcctcttcctgcgggaccaggactgggccagcagcgtcgccgcggccagggccaaggcggccgctagccgctagtgctagtgctagccggggcggacggcggacgaagctcgctccgacgataagcctgcggacggcgatccataacggcagctaatgtactgggagtgtaattaagtgctgtaacatagtgttaattaagctctgatgtttttgcgaggagagaaaaaagtcgtttaattctcagttttgagttttgactcctgatcggtgaccagctgaccttgcatgttatggtgtcggacgaagcgaatggctggcaggaacgccgtttgtactctgtgtggcatgtaaattgttaccggttgaagaagagttaccagtccaa

SEQ ID NO: 131858 - DNA, 1455 bp, Zea Mays
cctttaaaatgccgcggccggcgcggcgcatccggctgcgtaccggcccccttttccacccacccgcccacccctcgtttcctgcaattcgccgccatcgttcgctgaacttgagcgcgtctgccgcctgccaccaccgctctctgcctctctgctgctctgttctttctcccgccggggcagaggagggcggggaggcccgttgagcgagcctcggtcggtatggggatctgcgcctcgtccaagcgcgtgcggcaggaggagcaggactccgacgagaacgtggtgtacgtgatggacgagcagggcggcgggggagaaggcgaggacggccgtggcgcccgcgcggcggcatcccgcaaggtggcctccctcttctcgcagaagggcaagaaggggcccaaccaggacgccgtcatactctgccagggattcggcatggaggacggcgtgttctgcggcgtgttcgacgggcacggccggtgcgggcagttcatcagcaagctggtgagggactacctcccgttcatgatcctgagccaccggaacgcgctcctcatgggctccgacgacgacgacgatgatccggcgcagctgctggaggagtggcgggaggcctgcgccaacgcgttcgaggccatggacaaggagctcaagctccaggccaacgtggactgcaacttcagcggcaccaccgccgtgtgcgccatcaagcaggggaaggacctcatcgtcgccaacctcggcgactccagggccgtgctggcgaccatgtcggacacgggctacctcaaggccgtgcagctcaccaccgaccagaagcccaacgtgccccaggaggctgagcgtatcaagcgctgcaacggccgcgtgttcgcgctcaaggacgagccgtcggtgctgcgcgtgtggcttcccgacgaggactgcccgggcctcgccatggcgcgctctctgggcgactaccgcctcaagcgccacggcgtggtgtcggagccggaggtgacgcaccgccgcgtcgcgccgggggacctgttcatcatcctggccacggacggcgtgtgggacgtgctcagcaacgaggaggtcgtgtccatcgtctgcgccacgccgcggaagcagcacgcgtccaaggccgtcgccgaggccgcggcgcagcgctggcggaccaggtacccgacgtcccgcgtcgacgactgctccgccgtctgcctcttcctgcgggaccaggactgggccagcagcgtcgccgcggccagggccaaggcggccgctagccgctagtgctagtgctagccggggcggacggcggacgaagctcgctccgacgataagcctgcggacggcgatccataacggcagctaatgtactgggagtgtaattaagtgctgtaacatagtgttaattaagctctgatgtttttgcgaggagagaaaaaagtcgtttaattctca

SEQ ID NO: 131859 - DNA, 1498 bp, Zea Mays
cacccacacaaaccaccatgccaccgcggaatccacccactattttgcactgtttgtttttagttccctttaaaatgccgcggccggcgcggcgcatccggctgcgtaccggcccccttttccacccacccgcccacccctcgtttcctgcaattcgccgccatcgttcgctgaacttgagcgcgtctgccgcctgccaccaccgctctctgcctctctgctgctctgttctttctcccgccggggcagaggagggcggggaggcccgttgagcgagcctcggtcggtatggggatctgcgcctcgtccaagcgcgtgcggcaggaggagcaggactccgacgagaacgtggtgtacgtgatggacgagcagggcggcgggggagaaggcgaggacggccgtggcgcccgcgcggcggcatcccgcaaggtggcctccctcttctcgcagaagggcaagaaggggcccaaccaggacgccgtcatactctgccagggattcggcatggaggacggcgtgttctgcggcgtgttcgacgggcacggccggtgcgggcagttcatcagcaagctggtgagggactacctcccgttcatgatcctgagccaccggaacgcgctcctcatgggctccgacgacgacgacgatgatccggccttcagcgacgcgtcggcgtcggcgtcggcgtcgtccacggacggcagcgggcagtcgtcgccggcgccggcgcagctgctggaggagtggcgggaggcctgcgccaacgcgttcgaggccatggacaaggagctcaagctccaggccaacgtggactgcaacttcagcggcaccaccgccgtgtgcgccatcaagcaggggaaggacctcatcgtcgccaacctcggcgactccagggccgtgctggcgaccatgtcggacacgggctacctcaaggccgtgcagctcaccaccgaccagaagcccaacgtgccccgtgagtgtgtccgtcatagtcgatcgtcggatgattggatcgtatccctactccctagcggatggataactaaaccgtatcatgcactacgcagaggaggctgagcgtatcaagcgctgcaacggccgcgtgttcgcgctcaaggacgagccgtcggtgctgcgcgtgtggcttcccgacgaggactgcccgggcctcgccatggcgcgctctctgggcgactaccgcctcaagcgccacggcgtggtgtcggagccggaggtgacgcaccgccgcgtcgcgccgggggacctgttcatcatcctggccacggacggcgtgtgggacgtgctcagcaacgaggaggtcgtgtccatcgtctgcgccacgccgcggaagcagcacgcgtccaaggccgtcgccgaggccgcggcgcagcgctggcggaccaggtacccgacgtcccgcgtcgacgactgctccgccgtctgcctcttcctgcgggaccaggactgggccagcagcgtcgccgcggccagggccaag

SEQ ID NO: 131860 - DNA, 106 bp, Zea Mays
gcaaacaactacgaggaaatagatctactatcaaccgcagagtacaagttacagggaggacctatatttataggcgtataggaaagcatattctgagacatattcc

SEQ ID NO: 131861 - DNA, 237 bp, Zea Mays
atggaggaaggggattggggcgctgcgcggaggaagggggagagctgcttgcgtggagccatggatggaagggcgacctgtctgcgcagggcgagctgcctcagcggattgcgttcgcggattgtggactgcctgcggggaggtgtaatggagaacaacctggatgttgaggagttgttgctccatcgttggaaggtgggcgacaacgatggaagcagcttgcggggaaaccggtga

SEQ ID NO: 131862 - DNA, 261 bp, Zea Mays
atggattacagaggtgttgctaatattaatgtcactgacaaccagtttgtagagcagctctttttaaagttcccctccaagctgacaccccatccaccatcatcctcggcgcatcgtgtcgtgttcgctgcttgtgacgatcactgttctcttcaatcgcttcgacgacggcttaataccagctacctcattctacaagctatgaccatgtgggggaatgacagacgaatggaatttgttagagatgcaaagattctttga

SEQ ID NO: 131863 - DNA, 1406 bp, Zea Mays
acgcacggcttgcccaccaacacacaacacctctgcatctgacctcaggcgcagcggatccgagcacggccacaccacccgcgcggctcatcataaagaggcgggctgctgcccctcccctcctcgcgccgcttgctttgtccgttgtcgcagagcgaggaagcacgcagagagtgagtaaaaaagaaagagagggatgccaatggagaggtcggtgtcgtgcgcggagaggggcagcacgttcggcggcggggcggcggtggacgtccggagctacagcgcctcctacgcgaggccccagccgcggccgccgacgtccagggtgcagcgcgccaggagcgtgagcgcgtggacgcgcccggcgccgccgcccgtgcagcggaccgggagcaccaagagcggcgccgccgcggcccgccccaccccggggctcaacctgcgctcgtacagcgcctcctacgcggcctcctacgggcccagccttgtcggcggcggcggcggcggcggtggcggcggggagctgaagcgctccggcagcgtcaccaactggacctccgccaaccgccgctccgtcaacctcagggggtacacgccgtccttcgccgcgctggacgacaccgccgcggcggtcccggcgcccaggaaggtgcaggcggtgatggacgacgccgagctgcagcggaggaagcgcctggtcgtgtacaagacctacgacgtcgaggggaaggtccgggagtcggtgcgccgcggcgtaaactggatcaaggggaagtgctccagcgtggtgtacggctggtggtgatcgctagctccatcgtcggcccagcccaccccgccaccggccgatctctccgccgttccggtccatcagagtggtactactacctatgagttgagcctttcttggtgcacgcccatcgtacctcctcttgtttcttctcccttgatctttttcccctcttggagttaggattttttttggttttatctttaggagatggatttggtggtatgtagaatgagcagtggagcttctcttggtgatttgtgagggtggggaggttgggtggtggtgacatggctgttgggatgacaaatcccaagagaatgcttcaggctgtggtgtcctactcctttgtacagatgagatatatcatctttccagcatacttgctagtatctggtctatgtaaatataggtgctgcatatatagaataagacttttgtaaattactactccctccgatgtctttccgacaacggcacagtatataaagtatagctttaatcaatatttttctttttaaatataaatacacttttaatatatttatacttcaataaaagtacttattaagatagatcgttacatataaatattaggtttcaaaactaaataataaaa

SEQ ID NO: 131864 - DNA, 1646 bp, Zea Mays
agtggactaatgaactatgacctctcacctgtcaaaagaaaggacgggcaaagagccggagccgcgaccgacgactcatcagacatggcgaagccggcggcggcgaggaagccctctgcggcgtcgaccgtcgcactgacactggttctggccctggcttcggctgtcctcctcttcctcctgctccgcttctctccctcctccccgtcccccaacccgcacccgcaccgccgcctccgcctccgcccccgcgcgcatgcgcaccaccaccagatcccattcgaccctgtcgtcgcggacatagagcgccgcctcgaagaccgcgagtgggagcgcctcgccgctgcagggctgcacgctccgggcatggaggcggcgccagtcccagaggatctcaccgacggtgaggtcgacgccgacgaggactacatcaatgacgctgcgcgcttcaacgtcacgcttcgcgtggaggcgctgttcccaaagatcgacgtcgaccctgccgatggcgccgtcacgggcgctgagctggccgcgtggaacctcgcaaatgcgcggcgggaggtgctacaccgcaccgcccgggagctcgagctgcacgaccgcgatcacgacggccgggtcgcctacggcgaatacgagcggcccagctgggcctggcgtttcgacgatcataactcaaccgatgacggagtgggatggtggaaggaggagcattttagtgctgcagatatggatggtgatggctttctaaatcttactgagtttaatgactttttacatccagctgatactaccaacccaaagctaatacattggttgtgcaaagaagaagtcagggaaagagataaagacaatgatgggaagctcaatttccaagagttcttcaacggattattttactcaattcgacactatgatgatgaaggcttaacagatgacaccggtggctctgatgcaccagctaaaaagtcattttcacaccttgatctggataatgatgggctcttatcagcagatgagctaaagcctgtaattggtaatctccatccatcagaatacttctatgccaagcaacaagccgactatgtaatatctcaggctgacacgaacaaagatggacaattgagcatgaatgagatgatcgagaacccctatgtcttttacaatgctttattcacagaagatgattatggctttcatgacgagctccgttagttcccaattcaacagcacaaagctttatggaatcaccactgtaggaagtcggaagactttgttatgcactgctaagaccatttccgttttctgtctgaaatcatccatcatttgacggtgattccatgtaaaacaagcatgtttttagatgcacctattctagaagctgtgttcttttgtactacccttgagccttttttatagtttgttgtttttttaatcatatatgtacggtgaggatgtgagtgagttttgttctttcaacttcttgaatcttgatacgatacaaaactagcgtcttccagaatcacaatttgtaaaccatacaaacccaggaaagcattactgtaagccatgaattgacgttatctgtaatgattgtgcaaatcatgaaatctgccaaattcatgctttagtccctatacaaa

SEQ ID NO: 131865 - DNA, 1637 bp, Zea Mays
agtggactaatgaactatgacctctcacctgtcaaaagaaaggacgggcaaagagccggagccgcgaccgacgactcatcagacatggcgaagccggcggcggcgaggaagccctctgcggcgtcgaccgtcgcactgacactggttctggccctggcttcggctgtcctcctcttcctcctgctccgcttctctccctcctccccgtcccccaacccgcacccgcaccgccgcctccgcctccgcccccgcgcgcatgcgcaccaccaccagatcccattcgaccctgtcgtcgcggacatagagcgccgcctcgaagaccgcgagtgggagcgcctcgccgctgcagggctgcacgctccgggcatggaggcggcgccagtcccagaggatctcaccgacggtgaggtcgacgccgacgaggactacatcaatgacgctgcgcgcttcaacgtcacgcttcgcgtggaggcgctgttcccaaagatcgacgtcgaccctgccgatggcgccgtcacgggcgctgagctggccgcgtggaacctcgcaaatgcgcggcgggaggtgctacaccgcaccgcccgggagctcgagctgcacgaccgcgatcacgacggccgggtcgcctacggcgaatacgagcggcccagctgggcctggcgtttcgacgatcataactcaaccgatgacggagtgggatggtggaaggaggagcattttagtgctgcagatatggatggtgatggctttctaaatcttactgagtttaatgactttttacatccagctgatactaccaacccaaagctaatacattggttgtgcaaagaagaagtcagggaaagagataaagacaatgatgggaagctcaatttccaagagttcttcaacggattattttactcaattcgacactatgatgatgaaggcttaacagatgacaccggtggctctgatgcaccagctaaaaagtcattttcacaccttgatctggataatgatgggctcttatcagcagatgagctaaagcctgtaattggtaatctccatccatcagaatacttctatgccaagcaacaagccgactatgtaatatctcaggctgacacgaacaaagatggacaattgagcatgaatgagatgatcgagaacccctatgtcttttacaatgctttattcacagaagatgattatggctttcatgacgagctccgttagttcccaattcaacacaaagctttatggaatcaccactgtaggaagtcggaagactttgttatgcactgctaagaccatttccgttttctgtctgaaatcatccatcatttgacggtgattccatgtaaaacaagcatgtttttagatgcacctattctagaagctgtgttcttttgtactacccttgagccttttttatagtttgttgtttttttaatcatatatgtacggtgaggatgtgagtgagttttgttctttcaacttcttgaatcttgatacgatacaaaactagcgtcttccagaatcacaatttgtaaaccatacaaacccaggaaagcattactgtaagccatgaattgacgttatctgtaatgattgtgcaaatcatgaaatctgccaaattcatgctttagtcccta

SEQ ID NO: 131866 - DNA, 648 bp, Zea Mays
atggatggtacctacttgaaccccgagcacctgtactcccaccaccagtaccacctgctccaccataactgccgtatccaccagtgccataaccaccacctggggcgccaccataggcgctgcctccatatgcaccacctccataggcaccacctccataagcaccaccaccgtatgccccatatgcaccatatgcgcctccatacatggatccaccatacccaccaccaaaaccagacgcaaagccagcattgcctccatagccataccctctaccatagccatatcctgctcctgcgccaccatcatatccataactcgctgcagcagatcgataagcatcaccaaacccataaccacccccaccgctgccgctgctgccactaccagctccaccaccaccacggtaagtactgcggtaacctccacccccttggcttgatctcccattaccgatgttatcagatccatgtttctttggttcagccttctttatttcaaccttcagtaagagatgcaggtagcccaccgatgaagatctttcttgtcttagggccatctttggtattcatctcttccctcggaactgtcctcttgacttccaccttcagttgtctcccaagcaacgcctccgacaaaaatcttcct

SEQ ID NO: 131867 - DNA, 3238 bp, Zea Mays
gtgagcaactcatttcggccgtcgtcctcgagacgacagcgaccctagctagctagatctccgccgccggtgccgggtggcacgcgcctcctcgtcgtcgtcggatccagcccaaccgcgcggcgccgaattcgtcgtcgtcgtcgtccctagctcacgctgcttcttgctctcgcgaggagtggagacgggacgggagactagagagcaagcgaagttggacgtaggcgcacccgctttgctgcttcttacctgagctttgaagaagtagcataacataacatggcaggacagcgtgagggcatgcatctggtttcggagatgactgacgcacgtgtttcatcacaagttgtggaagataggggcactgaaaagactatgccagaagaacaactatctgttactttatctgatggaaaggggtgctttgcttgcaatgagagatcacacaacttggagcagtgcaagacaaagtacaaacttgttcctgcagcacatcaatttggctatgctacaaaattcccatttaccgttattcagccttccaatgagatggttgaaaagaagaaatttttccaacactgccttctcatcgaatccaatcttgcaaacttggacgagagtatgctgaaagatgaactcaagaagctttggaaccttcctggcgattgggagttaaggagagaatgcagtacgactttcctggcctccttcagctcggaggatgacctaacaagttgtttaaagaaccctgagatccaaacattactggataacaaggaggtgaaattgactgtaacgaggtggaatgaaagcgacgatggaagccctggcttggttgaagagtggcttttagtgtctggggtcccaagaatgtatagaaactggaaggagctatatgaggttgcttctgcacttggtgtgctgatcgacgtcgatgaggaaagtttgcaagtcggagataaggagcctattaggctgaagctgaagacagcattcaggagttttgatgctgctcccttttcttactactttgcatttggatgttggtcgtcaagactagtaatggtcacagcagtacaagacaaaacacaaggtatggaacataaaattaaggagttagactgcaaggagcataaaaaggaactgaatgtggcaaaaagtataatgctggaagagccgaatagcactgaagaatcaagatcaaatggaaaggccaaagtaaacaaaataagtgctccagcagccacaataacagactctgaggtaatagcagcaatagaaagttcaaaacctgaaggggtgcaatccatagcccaaagtccacgaagcatgactggagaagagaacttcagaggtatacaaaaaccgcctatcaaacatgtattcaaaagaagaggtaagaaacagccagttactactgaagcaataaacaagagcccgtcaaataaaatggataaagaagtggctccacatagccagagtaatgccacaagaactggagcttcaactgggtgtgatatgctggatcaaaaggaatgctcaaaaatggaacccaagagggaactgaatatggaaggaataaccccagcaggggaaagtaaaaaggccgaaaagattggagcatgcagaaattctgaatacagtaaggtagcgtcctctacaatcaagtcaaagaagacacaaatattaggagacacatcaagagctccgagagatgagttgatcactaaatatcccaaaggtgacgggatggatcaaatgggatcaagcgcccaaggtgacgaaaaagaagatgcatccataatagacacagggctacttccaaattccgaggaagttggtgtctatgacagtttcagtgagatgggtcttcaggagaatctactcaagggaatatatcaatatggtctggagaagccttccgcggtccaccaaagaggaatcgtcccactatgcaagggctttgatgtgctccatcgatctctgtctggaacaactgagacgatctgctccggcgtacttcagcgagttgactacggatctgcagaatgccaggctttgatccttgtaccgacacccgacttggcacaagagactctgaaagttcttgaggcacttggtgagttccttggtgttacagctcaaacttgcacaggaggaactagtgcccatgcagaccagcaagccctgctaagtggagctcaggttctagttggcacccctgattgcattcttgacatgttgcaaaagcatgcagtatgcccagaccatgttagaatgcttttcttggatgaagcagatgaactactcacaggaggttccaaggatcagatctataagatcatcgtgcatctcccagacaagattcaggttgggctcttctccgctacctactccaccgaagctatagagagcagccgcagactcatggataagcccgtggcggtcattgtcccgagagacgaagagctaaagaacgtcaagcagtactatctggcagtcgaaaacgaaggactgaagctacgaaaactgttggctcttttcaagaccacagggacggagcagctcgtcatcttcgcgaacacgcgggacaaggtgctgtccctcgcagaagacgtcggcaagcgttacgccgtctcggcaagccatgacggcatggaccagcgcgccagggacgcggccgtccagaagttcaggtctgggtcgtccagcatcctcatcgccactgaccacggaggcaccaccaacgcgatgccgcaggttcccatcatcatcaactatgatcttccgacagagtccatgcggtacgtccgtcgtctccagcagcagaacaggcagttcaggaggtcggtcagtgtggccatcagtttcgtgactcctgctgaccgacgcaccctctccgccatcacgagcttttgcaagtgctacatgggggagctgcccaccgacttgaaatgaccgtacctctttggtgagctatggaatgcagaagtagaactggtcagcatgcatgcatgcacaggttcttctggctgcaaggaagcggcatgcatgttcgtttcctcttgagatactttgcgcttgttgaaatttgaatactcatggaaggtttaacttcctatcactcagaaccttgagttccccagtatcttatctttgatgtaatattgttatttactggatgtggtcgtttgacagttgaatgttatatgatgacttatcttgtttttcaact

SEQ ID NO: 131868 - DNA, 775 bp, Zea Mays
tttaccgatagcttcttggtttctttgggacatttccctatttgcagcttcatagtactggaccctatccgacagccttgcaatctcgaagttctttgcggcaatcacgggttccatctctaattcaacttcagcacgagcaaaatcctgggaaatagcagcggctacaagttgtgaaacagttatttgctggcacaactcagctccaagatcgatgcttgaatcatcagtatcctcagctatacttggagatggaagtgataaggcaacatgtgataggtggtgactcagcttcttccattctttctgccatatctcaagtgcttcttatgcttgcttcctcctctcaatttcggtcaacaggcttaacctcatttcatggaggtcatcatccatggcccatgaagattgagttccaccatcacttgatatttctgagttcggcaaataccattgaagttagcacaaaaacactaaagcaaaaacaagttctgaatacatcgagacatccagaaatttccacacaggcaattttcccagtgaatagaaaaaaatagcagaaactatctccatgcaacatttggggtaaaagaccctagctcatggtgatcagtcattgcagcagaataaacgattgcagtgtatcacacggttcaaaagaagatagattcaaccaaataaagatgactgaggcaaatcggaacaatggctattgtaaaaaatcaaaccttaccaagctaaaggcataactgggagagactacacgtactccaca

SEQ ID NO: 131869 - DNA, 619 bp, Zea Mays
agatgttggtggtttgaggggtacaagaaatacaccattggaagagatagtagcggcattcttacacacactggctcatcatgtgaaaaatagaacaatagggggtttcttcttaaggagtggtgagatagtgagcagaaacttcaatgcatgccgcctagcagtattgaagcttcaccaattgctccttaagaaaccagaacctatacctgagggctgcacagactttggatggaagcacttcaagagttgcttgggtgcattggatggcacacatgtaaaggtgactatcccaactaagctgaaggggagatataggtcaagaaaaggagaaattgtgacaaatgtgttgggtgtttgtgcacctgacatgcagtttatatatgtcttacctggttgggagggttctgcacatgacgggcgtgtgctttgagatgccatcttgaggccggatggattacgtgtccctcaaggttgctattatcttgttgatgctggttacacaaatgcaaatggtttcttagcaccatatcgaggacagaggtatcatctaggaggtttcactactcaaaacccaccacatagtgctgaggagtacttcaacttgtgccatgctaga

SEQ ID NO: 131870 - DNA, 1726 bp, Zea Mays
gcctccataagacggctcgtcggcaacgctagggtttttggctactccgcctccgctctcccccctgctgcgcgctactcgcccgatctcgcggtgctggtagcggtgaaaatatctgagatcgagtgaagctagcttttcatcgatatggcgcttgtactgcatgctggcagtagtaacaaaaatgcattcaaaacactaattgccgcggattacagcggcatcaaggttgagttggtaaaagactttcaaatgggggtttccaacaaaacaccagagttcctcaagatgaaccctattgggaaggttcctgtcctggagacacctgatggtcctgtctttgagagcaatgcaatagcaagatatggtaatttaaatgttgcaacaattggtttgtttagtcttttgtttgcatttatttgattgagcaccgaattctgtcatctccctgaagttactcgcttgaaggctaacaacccactttacggatcttcactgattgattatgcccatattgagcagtggatggactttgctgcgacagaggttgatgccagcattggaaagtggttgtacccacgtatggggttttatccctatgctgctgtgacagaagaatcagccattgctgctttgaagagagcattcggttccctgaacacccatcttgcatcaaacacattccttgttgggcattcagtgacacttgcggatattgtgctgacatgcaatctttatatgggctttagccgtatcttgactaagagttttacctcagagttccctcatattgagaggtacttctggaccatggttaaccagccaaacttcaaaaaggtcattggtgacgtgaagcaggcagaagctgtgccacttcttccaaagaagattgctccggccaaagagcagaagcctaaggaagccaaaaaggaggccccgaagcctaaggaagctgagaaaccagcagaggaagaggaggctccaaagcctaagccaaagaatccccttgatttgcttcctccgagcaagttgattcttgacgattggaagaggctgtattctaacacgaaaaccaacttccgtgaggttgctattaaaggtttctgggacatgtatgacccagagggctactccctgtggttctgtgactacaagtacaatgacgagaacacagtgtcgtttgtgactatgaacaaggttggtggcttcctgcagcggatggatctgtgccgcaaatacgcctttggcaagatgcttgtggttggctctgagccccctttcaaggtcaaggggctctggctcttccgtggccccgaaatccccaagtttgtcatggatgaggtctatgacatggagctctatgagtggaccaaggtcgacctctctgatgaggcccagaaggagcgggtcaatgccatgatcgaggaccaggagccttttgagggcgaggccttgctagatgcaaaatgcttcaagtgagcctcatctctttggagtgctgctcaggaaagagttgtttaggtttttgggtctaattctaaaacagctatgaatgttagttttgatctggggttattttctgtgctgtgttgagacttttggtcatggtaagggaatcggggaaggttttaggcgcgtgcaatattatggattatcgcattggaatcgtgacatgtccatcctttacccttctcataaacgtcccatttatatatttactagctgg

SEQ ID NO: 131871 - DNA, 1639 bp, Zea Mays
gcctccataagacggctcgtcggcaacgctagggtttttggctactccgcctccgctctcccccctgctgcgcgctactcgcccgatctcgcggtgctggtagcggtgaaaatatctgagatcgagtgaagctagcttttcatcgatatggcgcttgtactgcatgctggcagtagtaacaaaaatgcattcaaaacactaattgccgcggattacagcggcatcaaggttgagttggtaaaagactttcaaatgggggtttccaacaaaacaccagagttcctcaagatgaaccctattgggaaggttcctgtcctggagacacctgatggtcctgtctttgagagcaatgcaatagcaagatatgttactcgcttgaaggctaacaacccactttacggatcttcactgattgattatgcccatattgagcagtggatggactttgctgcgacagaggttgatgccagcattggaaagtggttgtacccacgtatggggttttatccctatgctgctgtgacagaagaatcagccattgctgctttgaagagagcattcggttccctgaacacccatcttgcatcaaacacattccttgttgggcattcagtgacacttgcggatattgtgctgacatgcaatctttatatgggctttagccgtatcttgactaagagttttacctcagagttccctcatattgagaggtacttctggaccatggttaaccagccaaacttcaaaaaggtcattggtgacgtgaagcaggcagaagctgtgccacttcttccaaagaagattgctccggccaaagagcagaagcctaaggaagccaaaaaggaggccccgaagcctaaggaagctgagaaaccagcagaggaagaggaggctccaaagcctaagccaaagaatccccttgatttgcttcctccgagcaagttgattcttgacgattggaagaggctgtattctaacacgaaaaccaacttccgtgaggttgctattaaaggtttctgggacatgtatgacccagagggctactccctgtggttctgtgactacaagtacaatgacgagaacacagtgtcgtttgtgactatgaacaaggttggtggcttcctgcagcggatggatctgtgccgcaaatacgcctttggcaagatgcttgtggttggctctgagccccctttcaaggtcaaggggctctggctcttccgtggccccgaaatccccaagtttgtcatggatgaggtctatgacatggagctctatgagtggaccaaggtcgacctctctgatgaggcccagaaggagcgggtcaatgccatgatcgaggaccaggagccttttgagggcgaggccttgctagatgcaaaatgcttcaagtgagcctcatctctttggagtgctgctcaggaaagagttgtttaggtttttgggtctaattctaaaacagctatgaatgttagttttgatctggggttattttctgtgctgtgttgagacttttggtcatggtaagggaatcggggaaggttttaggcgcgtgcaatattatggattatcgcattggaatcgtgacatgtccatcctttacccttctcataaacgtcccatttatatatttactagctgg

SEQ ID NO: 131872 - DNA, 84 bp, Zea Mays
ttagggcttgtgagaggatcacttgtgttctttgttgctcttatcgcttggtttggcctttttgttttcccttctatttctcaa

SEQ ID NO: 131873 - DNA, 2696 bp, Zea Mays
cccacacgtcatcctcccctaaaccctccgccaccttttcccgaaagccctgccctttttatgccagcccgaaccatccgggtccggggcatcggcattcagcacagcagccacctcttaccacgccccacggcaccaccccaacgtgatggcggtgagcaacaacatcacggcatgcgtgacgctgctggcgctgatctgcgcggtgcccgtgatcgcgtcgggggtgtggttcgcgtcggcgcagggcgaggagtgcgcgcgcctggcgcggtggcccgtggccatcctgggcgggctgctcctgctggccgcgctggcgggcttcgtgggcgcgtactggaaccggcgcggcctgcttgccttctacctcttcgccatggcgtcgctcgtcgtgctcctcatcgcgctcctcgccttcgccttcgccgtcacccgcgggtccggcgcctaccccgtgctcggccgcgcctacgacgactaccgcctcgacggcttctccatgtggctccgcgggtacgtctccgacgaccccgggcgctgggacaaggtcagggcctgcctcgccgtctccgacacctgcaagaagctcgcgcgccaggccgccttcaccagcgcagaccagttctatcagtcgcacctctccccgctccagtccgggtgctgcaagccgccgtcggtgtgcgggttcagctacgtgagcccgacggtgtggtccgccccggcggcgcggccggcggcggacgcggactgcgggctgtggagcaacgacccggggcagctgtgctacgggtgcgagtcctgcaaggcgggcctcctggaggcgctccgggaccagtggcacaaggccaacgtcgccctcgtcgtcgccaccgtcgccctcgtcatcctctacctcgtcggctgcagcgcctacaagaacgcgcaggccgccgccatcttcggacgccgcaagtattagctagctagctgccatgttagtttttttttgcgcttttttttctttattgtcatgtgggttgtggattatggattgcgtatgtgtgtcccccctggtggagagaagcatttgtagcggtggcgtggtgtgtgtttccggacttggttcatcatggtagtgtgatacatgtgtaagattagttactttaattactaattgtgctgttttcctctttccctgttcgccgacgagtaatgtatctggtttgaagattagttactttactaatggtttgaagacgactaagggcttgttcgttttgctctcaatccatgtggattgggtgggattggatgggtttcaatcccaaacaagtcaaaatcgttcacaattttttccaatcccatccaatccatatgggataggaataaccgaacaagccctaatagattatagatgtgggttgggcctgtggaaagatcaccgatggccttggtagacggcagtagtaatacacaggggagcaggatgttatttgtttggcaatggaatggagacacgccttgccgtcagtagtgctacacccgttgctcctcgtcccgtgcgtgcttgggcggctggccgtcagcgtcaggcggcgggtggcacctgctgctgaacaccctgaaggcggagacgagtgagagcgcggcgaagcaggccagcgcggcggcgtgcagcgccagcgacaccgtggccttcccgcagaaccggccgaagtaggagcacgcctcgccccacgacacgccccggtcgccgtgccgcgccagctgcagcagctccgccgccgccgaggccgacgtcaccagcaggtatgccgacgcctgcacgcagcacaccgcgcaccagcacatgtcagtactcctgtcctgatcggtggttttgttttgtccatggaaaattgccaacgaactgaatacaggtataagtaactaataaagagcatgtactgtacgtcgaatagagaggaagaggagaagctaagatggtgtgctgggcgggcgagacagagcgacctgatccatgacgagaaccacccagtcgtagcgcgcggcgaggggccgcttgaaggacgacgccaagacggaggctacagcgtaggcggctgtgacggcgttgacgccaaccaaatagctagcaaaacgacatcgatttcttttttttagctgctagcatcatgcatgacgatgcgctctctctcaaggagagaactaataatccaacacaaaaaaaaaattatgctacagattcgagcagggtggagaggaaatcaaacgagagtgctagcagtccaataatgaagggttcagttgtaatgcttactactggaaggccggtctaaataaactacacaccaattgatgccggcggcggcggatcgatgctttgtacagacctgaatccggagagatcggagaacttgacctccccgtaggtgtcgtctgcctgcgcgttggtggccatctcccacagggaggccaaggagagcgggacgacgcagagcctgagcgccatctcggggaccttgaggcccgccgccatgatcctggactcagcgtgtgcgcgtgccgtgctgtggaggaaggggaataagaagaagaagaagacgacgacgaccgagagaggaccagggcttgactggtgcacgcacgcaccaactccataccactagcgtacaaagcgatgaatgcgcatgggctggcccatggaatgtatt

SEQ ID NO: 131874 - DNA, 126 bp, Zea Mays
ctcatacccgccacccatcatagatacaaaattacgccatactcatacccaccatgggtagcgggtacccatcgggtacccatacccactaacattatagtagacatgatcatttaaatcgtaaaa

SEQ ID NO: 131875 - DNA, 2269 bp, Zea Mays
aacaatgacgcctcgcgctcccacctactgacccaccccacgccgcctcctctcccagtgggtcctccgcatctcccatctcccgtctcccctcttcctcctcccctgcgatctccaccgcatcacctccctcgaaccctagacccacccacgcgcccattgccttcggtcgccatgtccgccgctcagcttctccgtcactcgcgcaagctgcggagtttgcaaaatcctgtaggttgtgagaattttagttttgttcggcatttctccagcggttctgggtcctttatcgccagggaaaatggtattggaaaaagaaccagaggtaccagattttcccagcataaccagcctgcaaaacagctcgagacattctcagcaggagtaaatggaagctgcacatggagaatagcatccaacagccttaccccaagtgctgctagctggctcagtggttcattctcatgtggacaggtagtctcagcacggccattctcaagtagtgcagacctgcctccacatcaagaaattgggatgccgtctctttcacctacaatgactgagggaaacattgccaagtggcttaagaaggaaggagacaaggtctcccctggtgaggttctctgcgaagtggaaactgacaaagccactgtggagatggagtgcatggaagagggctatcttgctaagattattcatggagatggtgcgaaggagattaaagttggtgaggtcattgctataactgtagaagaagagggtgacatcgagaagttgaaggattataagccgtcatcttcagctgaacctgtagctcctgctgaaccaaaggctgaaccagaaccctcacagccgaaggcggaggaaaaaaagcctacgcaggctcctgaggcgaagaccccgaagattgaagaagcttctcaatctggagatcgtatatttgccagccctcttgcccgtaaattggctgaagataacaatgtcccactatcaagtgtgaaaggtactggtcctgatggtcgtattttgaaggcagacattgaagattacttggcttctgtagccaagggtgggctgagggagtcttttgcagatccagggttaggttatgttgatattccaaatgcacagataagaaaggttactgcaaatcgcttgctagcatcgaaacagaccattcctcattactacttgacagtagatgcacgtgttgacaaacttgtccagttgcgaggtgaactgaacccactgcaggatgcttctggtggaaagaaaatatcaattaatgatcttgtcatcaaggctgcagctttggcccttcgaaaggtccctcagtgtaacagctcatggatgaatgattttattcggcaataccacaatgtgaacatcaacgtggctgtacagactgaacatggattgtttgttccagtaattagggatgcagacaagaagggactcggtgcaattgctgaggaggtgaagcagttggctcaaaaagcaagagataatagcctaaaaccagcagattacgagggcggcaccttcactgtatcaaatttgggaggtcccttcggaattaaacaattctgcgccatcataaatcctccccagtcagcaattttggccattggttctgctgagaagagggtgatacctggttccgctgatggccagtttgaatttggttcattcatgtcagctacactgagctgtgaccacagggttatagatggcgcaatcggtgcggaatttctgaaagcattcaagggatacatcgagaacccaacttcaatgctgctgtgaagttaggatggatgacctaacacaattttttgtcatgttaaataaccaggccaccaaagagtggcgtctccaaaccaagagcacagagccgtcttctccgttttgatattgccattgctaagtaggatcaacgtatacatgcattattggggtcatttttgggttttgtcctcacggataattgatggaaataaatatgaaagaagccaatcttggaaagtactctgattttgaggtcattgctatgcgtttaaaaaactgcagatccgttgatgctctcctcggtaagcgtgatttgatgttgatgatgatatcttgataggagggaggggtagtcaagaactcggttaatatgttacgatgcatggtcggaagttataatgtaagcagagtggaacgaaggtcgggaacatattttgtgcaatcgtgattgagtggttttgattttgtgcattcgttaaaattc

SEQ ID NO: 131876 - DNA, 211 bp, Zea Mays
ttacggaggggtacggaaaacaatgccaaacactttattctcatcatcatttgacacagacattacttcagcacctgtcttcttttgcttgtaaagaacatcaattgatttgcactcatctatagtctgttcagagaccttttcatatccgagataggtggcatactcatgtacgtcatctgtatctcatttttcttctcaaaaagaggtc

SEQ ID NO: 131877 - DNA, 255 bp, Zea Mays
cagaacgatggcagtggcaccggcacggttcaagccacgcgtgaatcagttgcatcggcttcatctgatgttgcagtcggttcttctataaaggataaagcaattgctgcgctgcccacggaattggctgagatggctaaggatactaagagaaaggctcgatcttcggacccagggtggaaatatggattttggccagacattgcaaaggagatggtccagtgtattttttgccaaaaagttgtaccagcagga

SEQ ID NO: 131878 - DNA, 215 bp, Zea Mays
gagccccgtcgcgacgtcggcggcgatcctgaaacggacgctccatgggatcggcagcgtcttcccccgtctgcagtgcagagccggtcctccaggctcccgtagtccatgtattcgtacaccaggcacccgtactctggtaaggctcccagcagcagaaccatgttcggatgccgcatgcagctcagcacttcgatctgcaaatcgtacgtgat

SEQ ID NO: 131879 - DNA, 1790 bp, Zea Mays
gtgtcaccgagcgccaaaaacagaaaaaacccctgaactccgaagacgggcagggcaggcaccattggcatcagccatgccgccggcgccgccaccgcaacaacctaagaatcgcagccgtgttcccacgccgaccggagagaaccgtcggcctcagcgtcggatggagagccggaacgcgtcggagcgggccgcgttcttcgcgcggcgagaggcagcggcggtgctccggcgcgtgcttcgcggggacgccaccaggcgcgccgccggctccataaaatcccttgtatactccccaaccgtccgcaacaagcgcgccaccttcgctctcgtctgccagaccctcaagtacctaccaattcttaaagaggttttagcatcgagtgaaatactgagcagcaaatggaagaaacaagaggaattggtttatgtgactacctatgacattctctttggtcagggaattgcggtttctgggtcagtcgagcaattaattatgctacaaaaggattctcttaggactactcttgataaagtttgtgcgagaaagagagtccgctgcgttgaagacctattgagcaataaatcagccgtcaaaccaaagccccgatttcttcgtgttaacacactcaaggtcactacagagtctgtcattgaagaattgaacaaaatgcacatggttgacaaagatgaaatggttccagatatgttggtactcccacctggaactgatttgcataaccatccgttggttacagatgggaaagtgtttttacaggggagagctagttgtatggtagcagttgcattgtgccctaagccaggctggaaggttattgatgcatgtgcggctccagggaacaaaacagtccaccttgctgcactcatgaatggagaggggagtattatagcttgtgaacttaacaaagagagggccaagacattgcaacatactgtcagaagatctggagcaaacaatattcgaatagttaatggcgactttctggaagtagatagaaatgatccatcatatgctgaggtccatgctattctattggacccctcgtgctctggttctggaatatctacagagagacttgattatttgcttccctcacattctagagatagtcaggatgatgcgggtacaagctcaagggtcatgaaactctccgcttttcagaagaaagctctctcccatgctctatcatttccgtcagtggagagggtggtctacagtacttgctcaatccaccaggcagagaacgaggatgtcataaactctgtcttgcccttagctacatccctcggatttgagctcgctacaccgttccctcagtggcaccgccgtggccttccagttttccaaggatctgaacatttgcttcggacggatcctgaagatggcctggagggcttcttcattgcattgtttgtcaggaaagcaggccctacttcagaagagcctagcgaagatgccacggtagaagtaagaaccaaacaagtgcgcgggaggcgaaatggggtcagggcgttcagctccttgaggctgtccaggatgatcctctggtgaccaaaggcgttctggatttaatttgatgtatcattgctatttttggtagtcaatgtggtaacaggtaggtttgaatctgttctgaattttggactcatttttttcttctactccagataatatgttgccatactccatgtccatttcagattataagacattttagctaatatatatatatatatatatatatatatttgtcatcgaaggtgatgta

SEQ ID NO: 131880 - DNA, 618 bp, Zea Mays
atggaggacgaggggagcagcggcccgagcctgggcccggacagggaggcctcctcctcgccgctgcagaggccggagagaatgcgcggcgcgtccggcaccatgccactcaccgtgaagcaggttttgagtgatccccagaagagggcggcatacgatcagtatggcaagaaagggctgaaggcctttgcagatatccaggagcgttgtgaggctgaatgggcagaagagcccccttcactgtttcatatgttaaggcataaattgcagtttgctagcagtatattcattgcagatgcaacccctaaatcacttcctccatttcagatgaaggaaatacttggtgattatgatgctattcatagccttcatcctcatctagacagagacaccacacctgagtataacagaaaaagaattgcacaatggattccaccgggtcaaacttcattcattgcattaaatgaaagaactccatgcttcttttccactctgtcagacaggcaacaattcaggtacaagttagcgtactcgtgcaacttgagtagcatgttggagccaattattaaggaaaactatcagttattgacagtctgtaagaacgaacctgcacattga

SEQ ID NO: 131881 - DNA, 214 bp, Zea Mays
accaaaaccaaatccagaactctccctgggaatttggtggccgatttgccgccgcgtgggtgtggtggggcatgcgccgaacgactcctgcgtcggagctcaagcgcctcggggtctccagcaatggtatgaccatcatcggagctcgctgctcgtggatggtggcgaggcaacgtcgccagctccatcctcgtcacacccgcggtgaggccct

SEQ ID NO: 131882 - DNA, 100 bp, Zea Mays
cgcccgatatcaatccgatggttaaaaacacttcgcgcgattatgtgttcgacattcagtatccggtacttcgtacatctaaagtattatgtgaagggaa

SEQ ID NO: 131883 - DNA, 2205 bp, Zea Mays
aaaagtagagctgaaaaagaaaaaattcgggacacgatagtgctcgattttcgtctcactcacatctcccatcgatccagctcgcccccgcccgttttctcctgaaaacaaaacgaaaggctccgccatccggaaaaaaaaaccccacacaaaacccataccccctgcggcggcggcgatggacccgtcctcgtcgggctccggcggcaactccctcccgtccgttggccccgacggacagaagcggcgcgtgtgctactactacgacccggatgtgggcaactactactacgggcagggccatccgatgaagccgcaccgcatccggatgacgcactcgctgctggcgcgctacggcctcctcaaccagatgcatgtgtaccgccccagcctggccagccaacgcgacctctgtcgcttccacgccgacgactacatcaaattcctgcgctccgtcacgcccgacacgcagcaggagcagacccgcctgctcaagcgcttcaacgtcggcgaggactgccccgtcttcgacggcctctacagcttctgccagacctacgcgggcgcctcagtcggcggggccttcaggctcaaccacggccacgacattgcaatcaactggtcgggcggcctgcaccacgccaagaagtccgaggcgtcgggctactgctacgtcaacgacatcgtgctcgccatactcgagctgctcaagtaccacgagagagttctgtatgtcgacatcgatatccatcatggggatggagtggaggaggctttctacacaacagacagggttatgaccgtctcgttccacaagtttggggactatttcccaggaacaggggatatccgtgacattgggcattcaaaggggaagtactactccctgaatgcccctctagatgatgggattgatgatgaaagttaccagtcccttttcaagccaatcatgagcaaagttatggaggttttccgacctggcgcagttgtgcttcagtgtggtgctgattccttatctggggataggttgggctgcttcaacctctcaatcagaggtcatgcagaatgtgttaggtacatgaggtctttcaacgtaccattgttgctccttggtgggggtggatataccataagaaatgttgcacgctgttggtgctatgagacgggagttgctcttggccaagagcttgaagataagatgcctgccaatgagtattatggatactttgctccatattacactcttcatgtcacaccaagtaacatggagaacaaaaatacacgacaccaactggatgatataagatcaaaacttcttgataatcttagaaaacttcaacatgctcctagtgtccagtttcaagagagagttcctgatacagaagtacctgatccagacaaagatcaagatgatccagatgaacggcatgatcctgactctgatacggaagtggatgataacaaggctgtggaagcgtcagcgaggaggagcattctaggtatgaaagttaagagagaatttggtgaaaatgataccaaagtacaggtaggtatggaagttaagagagaatttggtggtgaaaatgataccaaagtacaggtaggtatgaaagttaagagaaaatttggtgaaaatgataccaaagtacaggatggtggcagagttgcatctgaacatagagtactggaacccaaggcagaagacaatggtttctccattcaagctcctcatgtgtgtgccagggcaatggctgtcgatgagccgagcaatgttaagaatgaacctgagggcaactaaactgcaagaccaagcagctgcgcaccacaaaccataactgcggcatcaagacttgctgcccacaaaccataccgtgtttttacaagacaacttcctgcgtgctttggacagcccaaagaccaaagtgaatctgcaaaacgttcctgccatttcaaatttgacttagctatatgttagcactaatgattacatgacggtagtgaagattccaagagagcccacctgggattgcttgcggtttacattgacggtagtctgacccatgtatacatgaagcctatgagttgagttgtacagccattagtcaatgcaaatatgcagtgaacgtgagggtaattctttgcgtgttcttgatgtttttgaccttttttgggcgcaacgcaagcaaagtaggcagttgctgtgcc

SEQ ID NO: 131884 - DNA, 507 bp, Zea Mays
gaaaatgataccaaagtacaggatggtggcagagttgcatctgaacatagagtactggaacccaaggcagaagacaatggtttctccattcaagctcctcatgtgtgtgccagggcaatggctgtcgatgagccgagcaatgttaagaatgaacctgagggcaactaaactgcaagaccaagcagctgcgcaccacaaaccataactgcggcatcaagacttgctgcccacaaaccataccgtgtttttacaagacaacttcctgcgtgctttggacagcccaaagaccaaagtgaatctgcaaaacgttcctgccatttcaaatttgacttagctatatgttagcactaatgattacatgacggtagtgaagattccaagagagcccacctgggattgcttgcggtttacattgacggtagtctgacccatgtatacatgaagcctatgagttgagttgtacagccattagtcaatgcaaatatgcagtgaacgtgagggtaattc

SEQ ID NO: 131885 - DNA, 189 bp, Zea Mays
atggagtggcagcgcgcggagtcggagctgttcgtggacgcggacgacgccccaattgattacagaaagcagctgcgggacgtcaggttcgtgccgcccggcgccgacgatggtgttcgatcgggctgggcagcatggtacatgcagaaaaacatgcagaaaggacaggacaaaggaattaaggaatga

SEQ ID NO: 131886 - DNA, 2460 bp, Zea Mays
atgggtgccaactgcctcgcgcagaccaacgcactcttcaggaagaatcttgtgatccagaggcgcaaccacaggtcgaactgctgcctcatctgcttcccgctcgtcgtatgcctgctgctcggaggggtgcagctgatcgtggcgatagcgtacgccagttcggcggcgcacaggccccgggtcgactgcggtggctgcaccgctagcaccaccagcagctccagcgcggacacggtcgtaggaggaccggtttgtccgacccagtgccccctgccgaccgcgccgaaatggccgccggtgctgcagctgccgccggcgccggaagacatggaggagatcggttcctcgacgtcgaccgatgatcttaccggcgcttcgaccgcacggccgaacccacccgcggcgacgttcctcgtcactggaacaaacaggtcgtttgcagaaggtgtcatgagtaacatgttctccaagcatgacgagttgagctctgcagccaacatctccgccgttgctgatttcgcactgggtacaaatgagatgcgcttcatctctaatggcgcagaggaacttggttcagattttgaccgccgcaaccaccttttctttcttcagacaagctgcactccgaacgcgacactttcttttccagtccaacaaggtcgcagcaacttcaccaaagcatatgatctcacaagctcagacctcagcaagtttaacttgattgtctcatacaactcaacatacaagggtgctattgaattgtcattatcggtagcttcattttcgttttcaccaatcttgcttcgagttccacgattactgaatctggtctcaaatgcataccttcaattgaggggcagtgatactaagatgcagtttgagtttattaaagacatgcctagagttgctcaacaagaatttcctattgatatatccttcttagtgggaaaattggttttcgtatggatgataatgctttactttcctgtcatcctgagcaatttagtctatgagaaggaacagaagctaagaactataatgaagatgcatggcctaggagatatggcatactggattatatcatactgctattttcttcttctatcgctactgtatatgctcttcttagtttcttttggctctattttcggtataaagttatttagattgagtgactacagggtacaattcgtggtttacttcgcctacataaacttgcaagtttcatttgcttttcttatggcaacattcttttcaaattgcagaactgctagtggaagctggagtacactcatggagttgttcccaccattttgtttgtaccgcataatctatgagttctctccacctccatcacctttgtatcgtacagacttttctggagtacactgggaagacttaagtgatcacaagaatggaatgttagacattctcatcataatggcagtcgagtgggccacattccttttgttaacattctttgtggatgaatttggtaccttccgaaacggaattagaaaaacggtttcaattttccgctcaaacacagatcagagctctcacacttgtcagatgcagactattcagcttgaagaattcctaccctcagttgaaacagacaggactgatgtttcgagagagagagaaacagttcaacaactcttacgagaatcagatagcaatttttcagtaatatgcgacaatcttaagaaagtgtaccatggaaaagatggaaatgcagagaaaattgctgtcgcagggttatcactttctgtgcaacgtgggcagtgttttggaattcttggtccgaatggtgctggaaaaacctctctcattagcatggtaagtacaaacagtcttagatgcataaaacttgcttgtattcacatacctgaccataattcaggaaaatatatagggtgcatttcttgtacaatcgttattcgaaagagtgtggtgagctttctgtaggttgtttacatggacgagccgagttccggattggacccggcatcaaggagggcactgtggaatgctgtgatgtctgccaaagagaacagggccatagtcctcacaacgcattcgatggaagaggctgaagctctgtgcgacaggatagggatcatggtaaacgggagcctgcagtgcattggaaactccaaagagctgaaagccaggtacggaggcacgtacatgctcaccgtaacagctgcggcgggcgaggaggcggcggtggagcagcttgtccggtcgctctgccccgcggcgaacggagtgtaccgcatctccgggacgcagaagttcgagatgccgaagcaggggctgaggatcagcgaggtgttccaggccatggagcgtgccaagagctggctgaacatcgctgcctggggcctgtccgatgcaacgctggaagataccttcatcaaagtcgcaagcgggagtgacgcgtcctccgtg

SEQ ID NO: 131887 - DNA, 144 bp, Zea Mays
atggggagaggaggagataggggcgagttgcaggtggaggagagcgcggctgtgagggagagcgctgggagacggagcttgggcgagctccatgcctgggagctgagggcgagtgcaagcaggcagggagagagagcgatgtga

SEQ ID NO: 131888 - DNA, 429 bp, Zea Mays
atgggtgactcatacccacatgggtatgggtatggggcgcattcgatggaagaggctgacgttttgtgcgaccggatcgggatcatcgcgaatggtagcttgcagtgcattggaagctctaaggagctgaaagacaggtacggaggctcatgcctgctcacagtaacaactccggccggcggccaggaggaggaggaggtcgagaggctggtgcagtccatctcgccggcggcgaacagggtgtaccgcgtctcgggaacacagaagttcgagatgccgaagcgggggatgaagatctccgcggttttccaggccatggagcaggcgaagagcagcctggacatcgtcgcctggggcctggctgacaccacgctggaagacgtcttcgttcgagtggccaagcagactgacatgtccactgtgacctga

SEQ ID NO: 131889 - DNA, 1804 bp, Zea Mays
gtgattcggcccattgtagccccgagacagcgtccgcctacggcctatccgcgtcagcccgccggcgagtcgcgcacgagacctgcgaggcgcgatggcaggccgcggcggcgccggccggcggcctcgcgccgtcttcatggccttcggcactcagggcgacgtcttccccatagcagcgcttgctgcagcttttgcgtgtgaccaacaggagtatgctgtggtgttcatcactcattcagcgcaccggagtttgtcagcacatctagcagccagcagtgttagatacatgcctgtgtcaagcccgcctgtcctcgctgccgaacagttagagaatatctcaagtgattctattcaatcaaaccatgagcgtgagtccttttcaatgcggaaaaaagccattcaagcggagcacaggaaagaatgcttgtcttttgtggaagaagtttttggaaacgacccaagcatcagtggggattttattgtgatcaatttcttcgctttggaaggttggcaccttgcagaactattccaagtaaagtgcgtcattgctgctccctattttgttccatatagtgctcctacatcattcaaacgccaatttaaacaaacttttcctctactttacaagtactttcaagaagctcctgcaaatacggtctgctggactgacattatccattggatgtgggcactcttcatggaaagttggggatcatggagaaatgattgtctgaatcttagccccattcctttcacagatccagtaaccaatcttcctttgtggcatgtgcgagaggagtcacctttattactgtatggtttcagcaaagaaattgtggagtgcccaggatattggccgttcaatgctcatgcttgtggcttttggtttctacctatggattggcaattttcttgtgacaaatgcatggagttgtctggaaatatcaattcttcatttggtggtatgttgtgtgcaaaccattcttccctggaacacttcctcacaaggaatgcttattcatcaagacctatatttgtaggattaagttccattggtagaatgggctttcttagaaatcctaaagcatttttaatggtgcttaaggctgccatagagtcaacggattatatgttcatccttttctcatctggatacaagccattggattctgcaattcaatctattgcttcatcagtaaatgaatcaagaggggtggattcaccttctcttggtggtgacagcgctctcctttttaatggccgccttttctgctttttaggatcaataccgtacagttggctttttcctaggtgtgcagccgctattcaccatgctggcagtggatcaacagctgcagcactacttgctggtatccctcaggtaacatgccctttcatgatggaccaattttactggtcagagaggctacagtggttgggagtggcgcctgaacccctacaaagacaaaatctagtcccagataatgatgacgccttgagcatccacaatgctgcagatgtgctagttggagctatcaggtcagctttatcgccggaaaccaaagctcaggcggccagaattgctgataggctttcttctgaggatggaattggagaagccctcaggatattgaaggcgagagtgttgactcagaacaaaatcatcagctcattcatcgcaagtaaataattagtactgatatgatatgaggcattgatttaaaccactaaatttaagaaatggacttctaatgcaccgccccatgtaagatagagtaatttctcaaaccaatcaacttta

SEQ ID NO: 131890 - DNA, 498 bp, Zea Mays
atgtccaccaccccggaagcgtcccgcggcgccgcctcaagcccgtacatgcccgtcgcagcacacgagctcaggaggcagatgtccatgccgcccgccctcgcggccaccttcgcgtcatgcggctccggaggcggcggccacggatggccaagaaacctagcggggggcggcggcaacggcgagctcggctggcgcgcgccccggccagcagcaggcggcgtgggggcggtggtccgcgcgctgtgggcgtggatcgctaggggcaggaggaaggtggtcatcagccggaccggatcgtcggtgaaggagcagcagtacgggcacgaggagtacgcgcagaacttcgacgagggcggcgcggcgagggagcccgagaacctgtcgcgctccttctccgcgcggtacgcaaggcaagcggcgccgtgggacggggctcgccgtcgccggcgtggatgaaatcagctgttttcaccagtacacagaaggcttctggtt

SEQ ID NO: 131891 - DNA, 321 bp, Zea Mays
atcaagcaagagataaacctcatatttcagataacattcgagaacatctaaaaacattggactacttttagcactcttgctcccctcagcttcacttttgttagagaagtctttcagttcattctatcagaagtccggctgatttacaaacaaaacggggaaacatattaatggatattgatatccaaaatataaaaatgaaatattatgaatggtcaccagttaccaggttacactctggaaagtaaagtttcattgtgtgacttagttgtggtcactccaagtattcacaaacaagtgcagtcagtaaccaacctgcaa

SEQ ID NO: 131892 - DNA, 104 bp, Zea Mays
ctggactcaaagataaaatcgtgcttcgcaagttatgtagtgtgaaaatgaaactccttcctacaaaacttggaacatgagaatatgttaatcacttcgaatat

SEQ ID NO: 131893 - DNA, 82 bp, Zea Mays
attttggatgcttgaccatgatctgttgcttcattttaaaatgattttgttgctaacccgagcatttttgcatttgtatata

SEQ ID NO: 131894 - DNA, 171 bp, Zea Mays
atgaagatgccttccagctctgctggacgagtggccgagcaggctgaccggcgacgtgggcaacaggaagcgggaggtcttggttctgggcagcaagaagcgggaactgaagattgggatgattgcttcccgccttttcttgctaaaacggttgatggaggcccattttag

SEQ ID NO: 131895 - DNA, 1264 bp, Zea Mays
gatctgacactgctttccaacggactcatttgcatgagcatatttgacactggacaaaacttattgcaggatatctttactgcactatatccaccatcaactcaaatgatgcctggctggcagagagctccccattttggaatgggatacgccatgcaatatccacctggagtgggattgcaatcatatcttcacggagcatttcctcagcctacatatcagcaacctgtatattcacaacatgcatattcccacccccaacctgtgaaagcttcaaacccttttgatcttgggaatgagtcagctcatattcaagctcacatgcccccatctgggccacctggagcatcagcaggctcagctccccaaaccttaattggtaactctagttttggtgttcctccacagcagcctcaccagctctatcagtcagaagcgcatctaagtagttgcatatctcgccctcacaatctttctctttagtacctcctttttgcgcactgtgctaattattgcttcaatcaggccattttatgatgcagcaagttccgaacagcatgcccatgcctgaacaacaacctaatagcatgcttgcaacgcaacaaggtttgggttccttcaacatgggttttgatcaggaagctcctctcggatacccccaggcaaacacctcaccttcctacggctccgttggtggtggtagtaatccatttggctgaaagaagtgtggaaatacctgatcgttcatcactagacgaagggtctgcagcactcagggggacagacatgcatcgaagccctggagagattgtgtttcatacaacaaggtggtgtatcttgtcggccgtagtctgttgtacaacttgtttccaaaggcttaatgatcgaatataactctgttttggagggcctaagctgatttcagcctcattccatgtacattgtgtctggcgttctgcttggattgcacagtatgtatattgtgtttcttcgttgttgtcatggacagtgtcagctcctgttttagtacaagttgtttctagtgcacttgattattcgatttaatgtggatgattagtacactatagatcagatgtagaatcgtgatcgatcaattttgtggtttctttttacttgctatcttagtaccacttaattttgtggtgatcttttgtaagggttattttcttgtggaactcattacttgttatctacattttgtaatgcaattcaaggtatgttcaacttaactaatttctccctc

SEQ ID NO: 131896 - DNA, 2811 bp, Zea Mays
acacgcgcagcgaagcaacgcagcagcaacaaaccttttcgctcgcagctgccaccacctcgtcgtctcgcctccccctcggcctccgcacgcgcgcgcgggatctcgccctcgcccgcctcgccgctcgcgcgcgcgcaccgaggaagggcgcacccacccgcaggcttcctggcgggccgatacggcggcgatggcgagccgggtcaaggaggacgagaggcacgagaagatccttcgcggcctgctcaagctgcccgccaacaagcgctgcatcaactgtaacaatttggtgagcctctcgtctcgagttctcttgctgaatctgccacaatgctctgttgccatgaatggcgcacacacggcatattgggagggaccacaatatgcctgcacaaatttctggaccttcgtttgtaccaattgcagtggagcacatcgggagttcacgcatcgagtaaaatcggtttccatggccaaatttactgcacaagaagttactgcccttcaagaaggggggaatgagcgtgctagagaagtatttttcaaggagtgggatcctcaacgaaatggataccctgacagcagtaatgctgacaaattgagaaatttcattaagcatgtgtatgtggaacggagatacacaggagaaagaagtactgataagccaccaagggcaaaggatgacaaggatgagtatagtgaaaataggagatctgatggaaattggggtggttcaagaagtccgccagatggaagttactctgatcgtcggagttatagtggacggagtgatgacagaaattccagatattcctatggggaccgtagtcctggctatgaccaaaatgactataagaaaagtcctcgctactttgaggttgtcgatgatagatctggaaaaacaactccagttcaaaggtttgaagaccgttggtcttcggagcccagaaaaccagatagtggatctccagatttccagaaagaagctgatggttctagtcctgttgtacgaccagttagggatatattgggtgacaatactcctcaacttcgggttggtgaaccgtcaaagccagctactgaacctccaaagccaagcgtagtcagaccaattgatcctccaaagccgagtgtagtcagaccaattggtcctccaaagccaaatggaaccagggcaattgatcctccaccactgacaaagacaatatctagtgccagcagcattggttcttcagaaggcacatcagaacagacaaaggtggcaagtgctgtaagtttaattgattttagtgcagatcctgaacctgcgtccacagcaccaccacaacccacccctatgccacaacaacctccatttaacgcagcagcaccacagcctattcttgaacaagggaaaagtgatccttctgtcagtggtggtgactgggcatcttttgattcttttggccaacaacaaacaccacaaacaagcagcagtgtaaatcctcttgagtctgcacttgcacagctgtcattctctgaagcaccctctgcaccaaatgcgtcagcttatcctgtttctcttgatcccactttgaaagcaaatgatggaggacattcatctgtgctagaccagtcacattccttgtttgatgcgccctttggaatctcaggcaaccaggcctcaacagtaatgtccggccaaggatcatcagttcaacaatctcctctagctgccccaacagctggacctccatctcaagctactgcaaatccacaaggaaccagtggtattcaaggagcagcctcttctactgacagtaaattcagtagcaggaaagaacttccagtggatatctttactgcactatatccaccatcaactcaaatgatgcctggctggcagagagctccccattttggaatgggatacgccatgcaatatccacctggagtgggattgcaatcatatcttcacggagcatttcctcagcctacatatcagcaacctgtatattcacaacatgcatattcccacccccaacctgtgaaagcttcaaacccttttgatcttgggaatgagtcagctcatattcaagctcacatgcccccatctgggccacctggagcatcagcaggctcagctccccaaaccttaattggtaactctagttttggtgttcctccacagcagcctcaccagctctatcagtcagaagcgcatctaagccattttatgatgcagcaagttccgaacagcatgcccatgcctgaacaacaacctaatagcatgcttgcaacgcaacaaggtttgggttccttcaacatgggttttgatcaggaagctcctctcggatacccccaggcaaacacctcaccttcctacggctccgttggtggtggtagtaatccatttggctgaaagaagtgtggaaatacctgatcgttcatcactagacgaagggtctgcagcactcagggggacagacatgcatcgaagccctggagagattgtgtttcatacaacaaggtggtgtatcttgtcggccgtagtctgttgtacaacttgtttccaaaggcttaatgatcgaatataactctgttttggagggcctaagctgatttcagcctcattccatgtacattgtgtctggcgttctgcttggattgcacagtatgtatattgtgtttcttcgttgttgtcatggacagtgtcagctcctgttttagtacaagttgtttctagtgcacttgattattcgatttaatgtggatgattagtacactatagatcagatgtagaatcgtgatcgatcaattttgtggttt

SEQ ID NO: 131897 - DNA, 2545 bp, Zea Mays
ttcttttccccctcccctgttaaacacgcgcagcgaagcaacgcagcagcaacaaaccttttcgctcgcagctgccaccacctcgtcgtctcgcctccccctcggcctccgcacgcgcgcgcgggatctcgccctcgcccgcctcgccgctcgcgcgcgcgcaccgaggaagggcgcacccacccgcaggcttcctggcgggccgatacggcggcgatggcgagccgggtcaaggaggacgagaggcacgagaagatccttcgcggcctgctcaagctgcccgccaacaagcgctgcatcaactgtaacaatttgggaccacaatatgcctgcacaaatttctggaccttcgtttgtaccaattgcagtggagcacatcgggagttcacgcatcgagtaaaatcggtttccatggccaaatttactgcacaagaagttactgcccttcaagaaggggggaatgagcgtgctagagaagtatttttcaaggagtgggatcctcaacgaaatggataccctgacagcagtaatgctgacaaattgagaaatttcattaagcatgtgtatgtggaacggagatacacaggagaaagaagtactgataagccaccaagggcaaaggatgacaaggatgagtatagtgaaaataggagatctgatggaaattggggtggttcaagaagtccgccagatggaagttactctgatcgtcggagttatagtggacggagtgatgacagaaattccagatattcctatggggaccgtagtcctggctatgaccaaaatgactataagaaaagtcctcgctactttgaggttgtcgatgatagatctggaaaaacaactccagttcaaaggtttgaagaccgttggtcttcggagcccagaaaaccagatagtggatctccagatttccagaaagaagctgatggttctagtcctgttgtacgaccagttagggatatattgggtgacaatactcctcaacttcgggttggtgaaccgtcaaagccagctactgaacctccaaagccaagcgtagtcagaccaattgatcctccaaagccgagtgtagtcagaccaattggtcctccaaagccaaatggaaccagggcaattgatcctccaccactgacaaagacaatatctagtgccagcagcattggttcttcagaaggcacatcagaacagacaaaggtggcaagtgctgtaagtttaattgattttagtgcagatcctgaacctgcgtccacagcaccaccacaacccacccctatgccacaacaacctccatttaacgcagcagcaccacagcctattcttgaacaagggaaaagtgatccttctgtcagtggtggtgactgggcatcttttgattcttttggccaacaacaaacaccacaaacaagcagcagtgtaaatcctcttgagtctgcacttgcacagctgtcattctctgaagcaccctctgcaccaaatgcgtcagcttatcctgtttctcttgatcccactttgaaagcaaatgatggaggacattcatctgtgctagaccagtcacattccttgtttgatgcgccctttggaatctcaggcaaccaggtagttgtgttttcataaatttttaagctttatgcacctgagccttttttcctaaaaaatagttttcactggattccttccccaggcctcaacagtaatgtccggccaaggatcatcagttcaacaatctcctctagctgccccaacagctggacctccatctcaagctactgcaaatccacaaggaaccagtggtattcaaggagcagcctcttctactgacagtaaattcagtagcaggaaagaacttccagtggatatctttactgcactatatccaccatcaactcaaatgatgcctggctggcagagagctccccattttggaatgggatacgccatgcaatatccacctggagtgggattgcaatcatatcttcacggagcatttcctcagcctacatatcagcaacctgtatattcacaacatgcatattcccacccccaacctgtgaaagcttcaaacccttttgatcttgggaatgagtcagctcatattcaagctcacatggtataactaaaatgtctactgtagactttgttgtcatgcatattctgcattcctattttgtcaacatgctcattacttctccaataacatcagtttgttttatctatgagcagcccccatctgggccacctggagcatcagcaggctcagctccccaaaccttaattggtaactctagttttggtgttcctccacagcagcctcaccagctctatcagtcagaagcgcatctaagtagttgcatatctcgccctcacaatctttctctttagtacctcctttttgcgcactgtgctaattattgcttcaatcaggccattttatgatgcagcaagttccgaacagcatgcccatgcctgaacaacaacctaatagcatgcttgcaacgtgagtaaatgttgtatttactatatcttccaaagttaaaacatg

SEQ ID NO: 131898 - DNA, 1428 bp, Zea Mays
agagtattcatagggtcctagaagatatgaactgttgtttcagattagctgttggttatctatttcgtcaatttaactacccgctaactattttgatagataacggagctgtgttggaaggagggttcatcggaaagtggccgccaaaatatcttgcagactatcgatgcatatatttcagatgagagagtaggattagctgagcctgcagaaggaatagagctgtacctgtgccctcctcatgggaaaaccgtggaaatcctctcacggcacttgccaaaggagcaccaagagagccttgctgtggcgggatcatccttcatcggagttgtggtatggcggaggcccagcatttccagggcacccacctcccaccacaacaacaggcatgatggttccaagaggcagtcgatcctagggaaaccacaggttacaaatccggccgcaaggccctccctacctcccaactcatacggcgcaccaccaggctttaccagccagcgcgaagaggaagatgtaactgatgacgcccctccaggctttggacccggtgttgctagggatgaggatgatcttcctgaatttaattttgttaaatcgtcacaccatgccgcaaatgtaactgcgcatgcatacaagggcccgtggccacatgtaccaccaccctctgctcgcccagcagagcaaatgagggaactggttcagaagtatggtaaaagatcatctgttcaagaagccccccgtgcctgggatgacgacgacgatgacataccggagtggaaccccacccaccagacgattaagcagcctccactgccgcacgccccacagcaactgccgttgcctccgcctcccgtccagcagatgaacgccgcctaccagcagcagtaccacatcccaagtgctgtgcagcctcaggttcccatcacttcgcttccccatgcctatctccggacccagcagcctcagcctgggcaggcatggcagcagccgagcaatgcttggtggccagcgcagggcgttgctgcccctgccgcacagcaaccccagtatggggtagtgcctggcagcagtggcgtccagggctacgactctagcaacgcgggtggtatggcatggaggccgagatagagcattgtaaaattcagctggttttctattgtagctgtggtcaacctgacgagcgtccgttgtagggtgtctttttttttttattatggttggctgttcatgtaagtataaatggtgtacaaccgtacaaaggatgtaatcttgatagactagatagatagttgctggttgtacccgttcatccgttaggacttgctgcaatcgttttgaacagcagtcgctcttcacttaatgctcttattaggcactgccaacaatagcaataatgtaccgcaaagtttctaaatcattttatgc

SEQ ID NO: 131899 - DNA, 3883 bp, Zea Mays
cacgctgtttgcgcgcagcacctagcaggatgcggatgcacagacctgctcgcgcgtctcatccgcacgcacgcacccacccacaagcaaatggaaaaataaaatcaacgagacctgctctcacatcgctaaccctaaacccccaaatcgcccaccttccgatcgccatcttcgccgccgccgccaccaccacggggcttaccggctggtgccgctgagcgctgtgctcgccgcgggccaccgcccagccccacggcttccctcgagatatctgcatttgaagttgcagtaaacaacactgctatttgtgccaagaattttgggagttattggcataatggagttttcaaagcaagggcaggcacccgtgccaaacaacatcggatcacaaccgctgccctcttcaaatgtccaatctaatcaaacagagcgtccatcaatgttttatccatcatcattgcctggtgactggagttcgcagcagatgttctccatgggaacctcagtaccagttagctcatattgtattgtccccatgaatcagcaaccagtccagctaggtgcttccaggccagagatttcacgtcctttggggccacaacctttgctaagtagggtatcattgaggccaccccagcaggtgctaaatattcatacatctttgccaggaatggctggatcgcaacactcaccatctatggcaggcaggagatcacaacagacaattggttctccaaaggttcaaatgctgaaatctccatcattccagtcatctaataagcgatctgcacagaaggagccaccgtcaaaggttcagcatcagcaacttgaatctgtgaggtccaagttcagggagtcacttgttgctgccctgagtttggattctgatcagcagaataagattcagtctgataatgtgcagtctgctgggtctatagataatttcaaaccaggagcaggagatgcggtacaggatttagtggcaaccacatcaaaagatgtgtgcacaaccaattcaggtgtagacacaactgtagctcccagtagatgtgaggaaaatgagaagttaagcagtgatttagctttagagatgaccacaagcataaatgatggcatgcagcaacagtcaattcaggtttcctcagaagatgacttattgggtcagtgtatggttgcagatgaacttttgcaaggtcatgggcttagttgggtttctgatcttgatgctgggatttctgaacttaacgcagaacctaatgctctaaaaaggccgcggacttctaatgtggagtctgagtcaaaaagaataaagtctgccaatgagttagcaatggagaaggagaaatttaatcaaagagctgaaattctggcgtttagaattgaagaggagctgttcaagttgtttggtggagtaaataagaagtacaaggaaaagggcagatctcttctgtttaatttgaaagacaaaagcaaccctgagttaagagagagggtcttgtctggagatattgtgcctgaacgactttgttcaatgactgcagaagaacttgcctccaaagaactctcagagtggcggctggctaaagctgaggagtttgcacagatggttgtccttccgactatggaggttgaccctaggcgtttggttagaaaaactcacaaaggagagttccaagttgaagttgaagagccagatggtttctcagtggaggttgaacttgggagtaatgttactaatattccatcaaaagctgttgaagatcagacaaagtctaatggaacagctggtaaagtagatgttcaagaaaaggacaaagcatctgatagcgcttcacacgatgaggatggcagaacaggcaacaatggtataccaggtgatgtagaatgtatcgataatgagaaagctgatctcatgcaggaacttatcttggatgatgtgaaggacactgtaaacctcccaccaattccttcgttagatgaattcatgcagggcttagattctgagccaccttttgttgatatctcagttgggactcctcaagaagatgtcaatgactctgacgaacttgacaccaccatggagccttcggatcttccagagacagaagataatgcatctgcaccagaaaaaactgaatctaaatctgataagtcatctgcacaggttaacagcgagcacaggttagagtcaccaggacatatagcggttcaaaattcggatcttactgaaccacgtgatggagagctgagcaaatcctccccatcccctgacaaagatgaagcaaagaaaacaactgttgataatgcctctaattccgattctgttcatcacaatcaggcagccagtctccctatgatacgtgagagcatttgggagggtgcaattcagctgaccgtatcttcgctctgtaatgttgttgctattttcaaaagtggtgaaaagccgtcattaaaagattggcgtagctttattgagataaagggaagagttaaacttagtgcttttcaagagtttgtcgatcagcttcccaaatctaaaagccgcgctataatgataacggagctgtgttggaaggagggttcatcggaaagtggccgccaaaatatcttgcagactatcgatgcatatatttcagatgagagagtaggattagctgagcctgcagaaggaatagagctgtacctgtgccctcctcatgggaaaaccgtggaaatcctctcacggcacttgccaaaggagcaccaagagagccttgctgtggcgggatcatccttcatcggagttgtggtatggcggaggcccagcatttccagggcacccacctcccaccacaacaacaggcatgatggttccaagaggcagtcgatcctagggaaaccacaggttacaaatccggccgcaaggccctccctacctcccaactcatacggcgcaccaccaggctttaccagccagcgcgaagaggaagatgtaactgatgacgcccctccaggctttggacccggtgttgctagggatgaggatgatcttcctgaatttaattttgttaaatcgtcacaccatgccgcaaatgtaactgcgcatgcatacaagggcccgtggccacatgtaccaccaccctctgctcgcccagcagagcaaatgagggaactggttcagaagtatggtaaaagatcatctgttcaagaagccccccgtgcctgggatgacgacgacgatgacataccggagtggaaccccacccaccagacgattaagcagcctccactgccgcacgccccacagcaactgccgttgcctccgcctcccgtccagcagatgaacgccgcctaccagcagcagtaccacatcccaagtgctgtgcagcctcaggttcccatcacttcgcttccccatgcctatctccggacccagcagcctcagcctgggcaggcatggcagcagccgagcaatgcttggtggccagcgcagggcgttgctgcccctgccgcacagcaaccccagtatggggtagtgcctggcagcagtggcgtccagggctacgactctagcaacgcgggtggtatggcatggaggccgagatagagcattgtaaaattcagctggttttctattgtagctgtggtcaacctgacgagcgtccgttgtagggtgtctttttttttttattatggttggctgttcatgtaagtataaatggtgtacaaccgtacaaaggatgtaatcttgatagactagatagatagttgctggttgtacccgttcatccgttaggacttgctgcaatcgttttgaacagcagtcgctcttcacttaatgctcttattaggcactgccaacaatagcaataatgtaccgcaaagtttctaaatcattttatgc

SEQ ID NO: 131900 - DNA, 746 bp, Zea Mays
catttgcaccgttagtatatgagatagccaccgtttggccatctcttagtctcagttgggacgatgagttctgatgataagtcaaatgaaacatttttcgtgtcaaactgcagaaactagaggatgaactggttgccgcacggaaagtatcttcagaacgacagttggcggttacagacctgtacaaacatttcctccaacttcaggactacaatgatagggtcaaaacagctgaacagaggctgcagtctctcgttgatgctgccttggtcgagctcgacatggccgaagatgctactaccagagatggctcgatgtacgagaacggcgtgctttgaacacccaactgccatgggtttgtgtggttgctgatttgttagatttgtagtttgcgtctgccatgtaatagaactgcattgtaactagaaacaggaaaaatgttgtgtaagggtcggagaatctgctgtcgtggtccctgagcccggatttctctttcgaagttggattcattaaccggcctgattattcctgataccaataacataagaaaaaaaaagaagctagtaactatggtcttgattggatgactgcatgtctgtaatcaggctcgcggctcgtcccatcctggctgtccggatacggttgtttcgagggtacgagtggatacaatcaaaatgatttaaaatgacatattttgtatccgtttatccagtctacgtctctcatgtgcagccaaccaaataaaa

SEQ ID NO: 131901 - DNA, 1393 bp, Zea Mays
agatccgacaactcgccctcccgtctttccctctctctcctcccaccacacccggtcgtcgttgtcgcggcgtgagcgagcgagaggggaaaacccaaaaccctagcacccccgccccgtcgccgacggccgccggagtagagagatggcggtggacgaggtgaactcggtctacgtcggcggccttccctacgaggccaacgaggagatgcttcgcgacgccttcgggtactacggcaccatcgtctccgtcaaggtgattaatgatcatgctgtcaaaggcaagtgttatggttttgttactttcactcaccccagagctgctgagcaagcaattgcgggcatggacggcaagaaattaggcaaccgtattgttcgagtaaatgaagtgcgtacaagaggcccccgcgattttggccgagatggtttcagacgagatccaagaaggtatggtagagatccatactgggacagaagggacagggaacggagctatgatcgtgaaagagatccctaccatgacagggatagtgatagatcccgtgagcatgatagagaaagagattatgaacatggtggatttaatagagaaattgactatcccatggaccgagatcgtgaaggagatgagagacgtcctagagaacatgatcgtacagcagaaatgcataatgtggattcagataatgacaaagataaggaacatgtatcaagaaaaaggttcagccgcccaaaaggtcgtgatagcagagatttatcaagttccagtgatggtcttcaaaatgatggaaaacatcagttggataaaactattcagatgcgcgaggaccttgaaaatgaggttaaccagattaaggataaaatatctgggaaagaacagcacattgcagatttgcagaagaaagctcagaaactagaggatgaactggttgccgcacggaaagtatcttcagaacgacagttggcggttacagacctgtacaaacatttcctccaacttcaggactacaatgatagggtcaaaacagctgaacagaggctgcagtctctcgttgatgctgccttggtcgagctcgacatggccgaagatgctactaccagagatggctcgatgtacgagaacggcgtgctttgaacacccaactgccatgggtttgtgtggttgctgatttgttagatttgtagtttgcgtctgccatgtaatagaactgcattgtaactagaaacaggaaaaatgttgtgtaagggtcggagaatctgctgtcgtggtccctgagcccggatttctctttcgaagttggattcattaaccggcctgattattcctgataccgtatgttttgagcgtgatacttgatatgtcaagcacgagcgcgagcagcccttcccccac

SEQ ID NO: 131902 - DNA, 1392 bp, Zea Mays
agatcagatccgacaactcgccctcccgtctttccctctctctcctcccaccacacccggtcgtcgttgtcgcggcgtgagcgagcgagaggggaaaacccaaaaccctagcacccccgccccgtcgccgacggccgccggagtagagagatggcggtggacgaggtgaactcggtctacgtcggcggccttccctacgaggccaacgaggagatgcttcgcgacgccttcgggtactacggcaccatcgtctccgtcaaggtgattaatgatcatgctgtcaaaggcaagtgttatggttttgttactttcactcaccccagagctgctgagcaagcaattgcgggcatggacggcaagaaattaggcaaccgtattgttcgagtaaatgaagtgcgtacaagaggcccccgcgattttggccgagatggtttcagacgagatccaagaaggtatggtagagatccatactgggacagaagggacagggaacggagctatgatcgtgaaagagatccctaccatgacagggatagtgatagatcccgtgagcatgatagagaaagagattatgaacatggtggatttaatagagaaattgactatcccatggaccgagatcgtgaaggagatgagagacgtcctagagaacatgatcgtacagcagaaatgcataatgtggattcagataatgacaaagataaggaacatgtatcaagaaaaagccgcccaaaaggtcgtgatagcagagatttatcaagttccagtgatggtcttcaaaatgatggaaaacatcagttggataaaactattcagatgcgcgaggaccttgaaaatgaggttaaccagattaaggataaaatatctgggaaagaacagcacattgcagatttgcagaagaaagctcagaaactagaggatgaactggttgccgcacggaaagtatcttcagaacgacagttggcggttacagacctgtacaaacatttcctccaacttcaggactacaatgatagggtcaaaacagctgaacagaggctgcagtctctcgttgatgctgccttggtcgagctcgacatggccgaagatgctactaccagagatggctcgatgtacgagaacggcgtgctttgaacacccaactgccatgggtttgtgtggttgctgatttgttagatttgtagtttgcgtctgccatgtaatagaactgcattgtaactagaaacaggaaaaatgttgtgtaagggtcggagaatctgctgtcgtggtccctgagcccggatttctctttcgaagttggattcattaaccggcctgattattcctgataccgtatgttttgagcgtgatacttgatatgtcaagcacgagcgcgagcagcccttcccccac

SEQ ID NO: 131903 - DNA, 2182 bp, Zea Mays
gggcgcctgaccttatctcctcctccaccccgagatatttccacgtctcctccgccaccatggagtccggcctcgttgcaagccaccgcctccgcgtcccgcccccctccgcctccgccgggcaccaccacctcatccgccactgcctcccgcccctccgcgccgcctccgccgccgccgccgcagtcccagcgcccggggacgacgcgtcgcccaagttcctgggcgtggagacgaagacaatcaagaagatcgtgcccctggggctcatgttcttctgcatcctcttcaactacaccatcctgcgggataccaaggacgtgctcgtcgtcaccgccaagggcagcagcgccgagatcatcccgttcctcaagacctgggtcaacctgcccatggcagtcggcttcatgctcctctacaccaagctcgccgatgtcctctccaaggaggcgctcttctacgccgtcatcttcccgttcatcgccttcttcggcgccttcgcctacgtgctctaccccatgcgcgacgccatccaccccactgcgctcgccgatcgcctcctcgcctcgctcgggcccagcttcctcggacccgttgccatcctccgcgtctggagcttctgcctcttctacgtcatggccgagctctggggcagtgtcgtcatatccgtccttttctgggggtttgcaaatcagattactacagttgaagaggccaaagagttctacccgctgtttgggcttggggccaatgtggccctcatcttctctgggcgcacggtgaaatatttctcaaacatgaggaagaatttgggtcctggagtggatggttgggcaatttcgttgaaggccatgatgagcatagtggttgtactgggtcttgtcatcaccggtatctattggggagtgaacaagtttgttattgataactcatctgtgcccgtggttgagcggaaaaagaaggacaagccaaagctcagcatgggtgagagcatgaaggttctgttgtcatctcggtatgtgagggatcttgctacattggttgttgcttatggaataagcattaaccttgtcgaggtgacatggaaatcaaaattgaaagcacagttcccaagcccgaatgaatattcttcattcatgggcgatttctcaactgccaccggcatagctacatttacaatgatgttgttaggaagagtgatcctcagaaagtttgggtggggagttgcagctacgatcacgcctgcagtgttactcctcacaggagttgggttcttctcactgattttgtttggtgagccattgactcctcttatgaccaagtttgggatgacacctttgcttgcggcagtctatgttggagcaatgcagaacattttcagtaagagtgcaaaatacagtctgtttgatccttgcaaagagatggcatacattcctttggatgaggatatgaaggtgaaaggtaaagcggctattgatgttgtgtgcaaccccttggggaaatctggaggtgctctgatccagcagttcatgatcctgtcatttggttctctcgcgaactcgacaccctaccttggcggaatactcctggtgattgtccttgcatggctgggtgctgtaaggtccctcgacctgcagttctcttccctggcgaagcaagagctcggcagagagaagctgctgaaaacgcaggccgtcgaaacggtcgccgaagtagtcggcactggaaacggttctctccaagaaactctagctagcgagccgtctgcaaatggcgcggccaccaaacagtcgcaagaacctgagagcacagcctcagagaaatcaggccagcagtctcaataagttctcccccccaagaaatttagctagcacgagcctttggaggaaccggaagtttcttatctggagctactgaagaaggcaggaatcatgccagaaataagaaggcctgttcttcttctgttgttgtagtgtttttgtttttaaacttcgccgtatctgtagctgtttgtttcattccataggtatgaactgtttatgttcgttattaaaattttgggaggtctgcttcatcgtaatcttcattagcagctggtccttgttgtgaaaaaaaaatattttgcatggttttgatagtcatgggtaccatatatccaatttattcatattcctactactaa

SEQ ID NO: 131904 - DNA, 2356 bp, Zea Mays
ctaatctctgcgccaccgctccatccaccaccatcctggagtataagacagcggcctccccttcccaagcccgctgcttgccgggcgcctgaccttatctcctcctccaccccgagatatttccacgtctcctccgccaccatggagtccggcctcgttgcaagccaccgcctccgcgtcccgcccccctccgcctccgccgggcaccaccacctcatccgccaccgccacgcccacgccccggtggccgctgcgcccctccgcctcagtctcccgcgccacctcccccggtccaccccgctccgcctgcccgccgcgctcccgctccgccactgcctcccgcccctccgcgccgcctccgccgccgccgccgcagtcccagcgcccggggacgacgcgtcgcccaagttcctgggcgtggagacgaagacaatcaagaagatcgtgcccctggggctcatgttcttctgcatcctcttcaactacaccatcctgcgggataccaaggacgtgctcgtcgtcaccgccaagggcagcagcgccgagatcatcccgttcctcaagacctgggtcaacctgcccatggcagtcggcttcatgctcctctacaccaagctcgccgatgtcctctccaaggaggcgctcttctacgccgtcatcttcccgttcatcgccttcttcggcgccttcgcctacgtgctctaccccatgcgcgacgccatccaccccactgcgctcgccgatcgcctcctcgcctcgctcgggcccagcttcctcggacccgttgccatcctccgcgtctggagcttctgcctcttctacgtcatggccgagctctggggcagtgtcgtcatatccgtccttttctgggggtttgcaaatcagattactacagttgaagaggccaaagagttctacccgctgtttgggcttggggccaatgtggccctcatcttctctgggcgcacggtgaaatatttctcaaacatgaggaagaatttgggtcctggagtggatggttgggcaatttcgttgaaggccatgatgagcatagtggttgtactgggtcttgtcatcaccggtatctattggggagtgaacaagtttgttattgataactcatctgtgcccgtggttgagcggaaaaagaaggacaagccaaagctcagcatgggtgagagcatgaaggttctgttgtcatctcggtatgtgagggatcttgctacattggttgttgcttatggaataagcattaaccttgtcgaggtgacatggaaatcaaaattgaaagcacagttcccaagcccgaatgaatattcttcattcatgggcgatttctcaactgccaccggcatagctacatttacaatgatgttgttaggaagagtgatcctcagaaagtttgggtggggagttgcagctacgatcacgcctgcagtgttactcctcacaggagttgggttcttctcactgattttgtttggtgagccattgactcctcttatgaccaagtttgggatgacacctttgcttgcggcagtctatgttggagcaatgcagaacattttcagtaagagtgcaaaatacagtctgtttgatccttgcaaagagatggcatacattcctttggatgaggatatgaaggtgaaaggtaaagcggctattgatgttgtgtgcaaccccttggggaaatctggaggtgctctgatccagcagttcatgatcctgtcatttggttctctcgcgaactcgacaccctaccttggcggaatactcctggtgattgtccttgcatggctgggtgctgtaaggtccctcgacctgcagttctcttccctggcgaagcaagagctcggcagagagaagctgctgaaaacgcaggccgtcgaaacggtcgccgaagtagtcggcactggaaacggttctctccaagaaactctagctagcgagccgtctgcaaatggcgcggccaccaaacagtcgcaagaacctgagagcacagcctcagagaaatcaggccagcagtctcaataagttctcccccccaagaaatttagctagcacgagcctttggaggaaccggaagtttcttatctggagctactgaagaaggcaggaatcatgccagaaataagaaggcctgttcttcttctgttgttgtagtgtttttgtttttaaacttcgccgtatctgtagctgtttgtttcattccataggtatgaactgtttatgttcgttattaaaattttgggaggtctgcttcatcgtaatcttcattagcagctggtccttgttgtgaaaaaaaaatattttgcatggttttgatagtcatgggtaccatatatccaatttattc

SEQ ID NO: 131905 - DNA, 1645 bp, Zea Mays
gctgcttgccgggcgcctgaccttatctcctcctccaccccgagatatttccacgtctcctccgccaccatggagtccggcctcgttgcaagccaccgcctccgcgtcccgcccccctccgcctccgccgggcaccaccacctcatccgccaccgccacgcccacgccccggtggccgctgcgcccctccgcctcagtctcccgcgccacctcccccggtccaccccgctccgcctgcccgccgcgctcccgctccgccactgcctcccgcccctccgcgccgcctccgccgccgccgccgcagtcccagcgcccggggacgacgcgtcgcccaagttcctgggcgtggagacgaagacaatcaagaagatcgtgcccctggggctcatgttcttctgcatcctcttcaactacaccatcctgcgggataccaaggacgtgctcgtcgtcaccgccaagggcagcagcgccgagatcatcccgttcctcaagacctgggtcaacctgcccatggcagtcggcttcatgctcctctacaccaagctcgccgatgtcctctccaaggaggcgctcttctacgccgtcatcttcccgttcatcgccttcttcggcgccttcgcctacgtgctctaccccatgcgcgacgccatccaccccactgcgctcgccgatcgcctcctcgcctcgctcgggcccagcttcctcggacccgttgccatcctccgcgtctggagcttctgcctcttctacgtcatggccgagctctggggcagtgtcgtcatatccgtccttttctgggggtttgcaaatcagattactacagttgaagaggccaaagagttctacccgctgtttgggcttggggccaatgtggccctcatcttctctgggcgcacggtgaaatatttctcaaacatgaggaagaatttgggtcctggagtggatggttgggcaatttcgttgaaggccatgatgagcatagtggttgtactgggtcttgtcatcaccggtatctattggggagtgaacaagtttgttattgataactcatctgtgtgcaaccccttggggaaatctggaggtgctctgatccagcagttcatgatcctgtcatttggttctctcgcgaactcgacaccctaccttggcggaatactcctggtgattgtccttgcatggctgggtgctgtaaggtccctcgacctgcagttctcttccctggcgaagcaagagctcggcagagagaagctgctgaaaacgcaggccgtcgaaacggtcgccgaagtagtcggcactggaaacggttctctccaagaaactctagctagcgagccgtctgcaaatggcgcggccaccaaacagtcgcaagaacctgagagcacagcctcagagaaatcaggccagcagtctcaataagttctcccccccaagaaatttagctagcacgagcctttggaggaaccggaagtttcttatctggagctactgaagaaggcaggaatcatgccagaaataagaaggcctgttcttcttctgttgttgtagtgtttttgtttttaaacttcgccgtatctgtagctgtttgtttcattccataggtatgaactgtttatgttcgttattaaaattttgggaggtctgcttc

SEQ ID NO: 131906 - DNA, 488 bp, Zea Mays
cattttgtccttcatataaatgcatgtcttatttgtcagatggtatatgctttcgcctagaagcaggctttttaaatggacttttagaggctggtgccagtgccacagaaagttcaggtttttccaattgtcaactaggaaatgacgtctcttcagaataacaacaattgatattctggagaagatgttccttccataaagtggtccatggcatgcgaataatgagtttgtttctgctgctctcaaaaagttgccagaaaatgaacacagcaggcaattgcaccgtgctaccaatgatgtgttatccaagcttcacgtggtgatgcgtgcagtagataatcttcacttgaaacacatgcagttagcagggaactataaaaaacaaagagattcgagtgcctagaacagagctgaacagaaacgtctgaaagaggagttgactagtgttgttgccaagttggaagaaagcaaacaaaaactggcagtat

SEQ ID NO: 131907 - DNA, 741 bp, Zea Mays
atggcccactttgcccccctctcggtccgcccctgggcgcatgcacaaggaggagaaggcgcagaacccgtcgaacgagaagcgcggcacgccgagctccctcggcaccccgccggtccacgggtggcaggcgtcggagacgacgcagctcggcggtggggcgtcgccctccctatccctgaggagcgcaacgagcgtcccgcggagcatggcacaagcgtcgttgaagttgcggaggaggccgaggcccgggagcgcgtcgaggctcttgcagccctcggggaggccttcctcggcgcaggggaagcggagcggcaggaagcggatggggagcgcgtcgtcgctaggggcgcggccgaggcggggcaggttgaggggcgtcatgacgaacgtgacgagcgtgcctcgcccggagagggtgcgggccatgtcgagcatcaggccagcgtggcccgcgaccatcatcgggaccagcacgaagtgcggcgccggattctcgccaagaagggagtagtagtattacctgatatctatgctaattcaggtggcgtggtcgttagctacttcgagtgggtacagaacattcaaggcttcatgtgggctgaggagaaagtgaacgatgaactagaaaagtacatgagcagtgcttttcaacacatgaaggccatgtgcaaatctttggtgctgccgaagtgtgccatgacattggaattgcggggtctaaaaaaacaagctcattag

SEQ ID NO: 131908 - DNA, 469 bp, Zea Mays
gatcccgaggcttctggccgcgccggccgcccacgggttgcaccagtcggagacgatgcagctcggccgcggcgcctgcgctcgcaggtacgcttccagcgggccggcgagcttctgcagagcgtcgaacagggggacgaagtggccgttgtccgtgacctggtccatgttctcgatgcccgggggcaggccgtcgacgtccgtcgggaacgggagctccacgatctcgaggggcagcttggcgcgcgcggcctgctcggcgacgccacgcagccgtgccccgttcagcggtgtcgtcaccaggctcgcgcgcgcgccgcgctccgccaggaggagggcgaggtcgaccatggggagtgtggccctgcgccacgagggggacgataacgaagtgaggtggcggcggtggtggcgctggcgtatcagcagccgattcctccgtgggcgccatggacgacgtgcgtgctaa

SEQ ID NO: 131909 - DNA, 532 bp, Zea Mays
atgcagaagtgctcgaacgccagtttgaaatccgggatgtacggcttcaccttcttcatcttgagcagcttcttggcgaccagcgtcgccatgaacagcagctgctccgacagcggcagcaccagcgggcccagcgttgttatgttcgtcttgagcgcgtcgcccgccaccgccatcaggtccctcgacagcgacacgcccacgacgccctcgccgtcctcctcctgcgtcacgcagccgaagcaccggtcgtccgcgcccttgtgcgtgcgcaccgtgtgcaccagctcgtacttggcccgccgccggtcggaccgccgattcgagagcagcaccgcggcgccgcccatccggaacaggcagttggacaccagcttggagcggtcgttccccgagtaccagttgagcgtgatgttctccgtgctgatgaccagcgcgtacgaccccgggtgcgtctgcagcaggtccttggcgaggtccacggacagcagcccggcgctgcaccccatcccgccgaggttgtagctcacca

SEQ ID NO: 131910 - DNA, 255 bp, Zea Mays
atggagggcgttgtcctcgtgccttctgcattttcagccacctgtggtgtctgcataagcaaatccatccattacctcaagggcatcaaacttctaccctttgaaaatgaccataaaattagcaatgatggcgagtgcaaaattttagacgaaaatgtgctctgcaaagcatacaagaggcaactccatcaaggaaaccactttgttggttctatgtcaaaagatcagaaccaacactcacatcctctaaggtag

SEQ ID NO: 131911 - DNA, 1568 bp, Zea Mays
ctttttcatagctaaacgaaatgcacctcagtggtctgtaggcaggcaggcaggcatcgacgtgcccacctcgttccgctctgacgtctgagatcgcgagatcgggaacccctgcccgtctgctccggaatctcgcccgcacgaaacttccccgacccatcgaccacaccagccccatcccctccgtcgctcccaagtcccaactgccgccacctctccgcgagccgacgccgacgcctacggtcaccaggacagagggacggctgctaccgcgggagtatgggggtggactactacaaggtgctgcaggtggggcgcggcgcctctgacgacgagctcaagaaggcttaccggaagctggccatgaagtggcacccggacaagaaccccagcaacaagaaagaagcggaggccaagttcaaacagatctcagaggcatatgaggtgctaagtgattcccaaaagcgggcaatctatgatcaggccggcgaagaggggcttaaggctcaggtcccacctactggagcaggtggtcccagtgggtcttccttctatggagggaatgcatcgacattccagttcaaccctcgcagtgcagatgatatttttgctgagttttttgggttctcaagcccattctcaaccatgggtggcatgggcggaggtgctgagagaggcatgaggggctccaggtttgggatgttcggcgatgacatatttgggtcccaccctcagtttcctggtgaggcatcaatgcatgttccacagcggtctcagaaggttcctccaattgagaatcggttgccatgcaaccttgctgatttgtacaaaggtaccaccaagaaaatgaagatttcacgagaggttttagatgccagcgggagaactttggttgttgaggagatcttaacgatagatataaaacctggatggaagaaagggacaaaaataacatttcctgaaaagggtaatgaggctcctcatataattcctgcagatattgttttcataattgatgagaaaccccatgatgtattcacaagagatggtaatgatctggttatgactcagaagattactttggctgaagccttgacagaatgtactgttaatataacaacattagatggtcggaatctgacagtgcagataaataatatcatctaccctggctatgaggaggttgttccccgagagggaatgccgattcagaaggattcttcaaagaagggaaatcttaggatcaaatttagcattaaattcccctcgaggctgacctcggagcagaaagcagaaatcaagaggctactaggttcataaggagcatgcacaaccttttttttttctggtgacgcaatgctgtatccagtgtacattcagatgttaaatgtgaataccagcaaagtctcggtttccttaaactgtgccagttcctttggcatatggatgttttgagatgcaaagttgaattgtttcatttatcggggaataattctaaattctactagatacttctgtgtgattttgctgtgaggatgtccattatgcacctaacaaaagctttattt

SEQ ID NO: 131912 - DNA, 658 bp, Zea Mays
atctcaggattatttaacatgagaaaaactgcacatttcagatattgtattcaaaagaatataacatttgatacttgcataatctattaaaatcatgacaacataatttgttcatatgctgtagaagtcccgctatgtctaaaatttccctccgttttatatggtcctacgccagcaaataaatggagaaagtaagatgcagtcctgctgcaaaatcaaacctactttaggtgttcacctgacacctagtgaatccaacaaaaatcgcggaaaatactagaaattagcggcgagctccaatcgcgtcaagtggggaatggagatcaaagaaagaagcgtcgccacgatgcagcccaatcccaggacaaatttttccccgctggaacagtcaccagctgaagaaatgcggcatttctctgctctggatgaagaaacgacgacgaaagataccgtgatgggatgccggggcggcgtgctggcgctgcgcgcgctgcagcgcaaactgccgcttggcggccgtgagacgcgagatccagaggtcggaatccatggtggctgcaggctttcctctcctggcctctccctcttccccctccgcacggtagatgccaggcaccaccaaccgaaaagcggattaaaaatatttcgtttctattcg

SEQ ID NO: 131913 - DNA, 733 bp, Zea Mays
ggcaaatgtaaaacagaaaaatctagtggtatataattaacagtaaaagcaatgaacaattataggccagcacaacagttttgacaaatttaaaacatccaattggactacaaaggaagcactatccaggctctatcttggcaaatgtaaaacagaaaaatctagtggtatataattaaaagtaaacaaaaggtggtatagacagcaaaacactacagacagattaaattgaatagtcaccaagccccaaacatctatgaactcaaccatgacagataacataccccaaatatattggatccaacggttctccagtagaggttacatggtgctcattatgtgtttggttcggtgtcaacgagggatgggacgggatcaatcctgggttgacctcgtcccttattttttgagggatggccccatccactatttttgaagaatattctttgaccctgactctggacctccaaaccaaacatgggtcaagttagaatgatcccaccttatctctcttcatccttcctcatccatccatccaaacactaccttaatggcatcatcacacatgatcttatgatatgcttctttgtttcttgacatttgctcagtaatgctatgtacctttgacaatccttcagccagacactatctataaaccttttccagccatttgacaacaaacattgtcgaagattgaactgcctcttccaattatagcaattagtacttcatt

SEQ ID NO: 131914 - DNA, 597 bp, Zea Mays
atggaggtcctcgaccaggaccatctcgacgttgcgctaaggaaggaattcgacagcactccaggcctaccatccacaagttatacaagcaagattgctgatatgttcaagcagaaggagaaggccaatgggggggaggaagaggccaaggagatggtaagggaagctggaggtgtacctaggatatatcattcatggctccacctcctggtcgtcaacgccgaacatggtgaggggtggcgggccctgcggcttctcctagggcatggaggaggtagcaacgtgcctgtctgtgggggtagcgggcaggggaggagggacaggcgaaggctaggaaggagagacgtccagcggccaggaggaggtagcgaccgtgtcaccagtctggttggcacctttattctcagctgcaagaaaacatggcatcagagaattgagtgcatacaaaatagattaggcagttttaacggcatcatgctttattctaactctgatatgatgaaagaagattgcagtagaacaagaaacaaagggtcatcatgcagcgtgccaccttatatgttagatttaatttacacctacttagtaactaactga

SEQ ID NO: 131915 - DNA, 1585 bp, Zea Mays
acagattcataaaaaaacatatatctttgatgaggggtgactggtgagtgagagcgagaggaggtgggcggccagccggccaccaccacggcaccacctcgtctctcctccacgcgtctctgccgcccgggcgcaggcgacgtcgccacgatgacgacggttccatcgcgtttgtgcaggggagatgagcgagctggtgcgggcggcggctccggcagctgcggaggaggagaagaaggccgtcgcggctgtgactgtggtggcgaaaggaaaagagaaggcggaggtgacgccgaccgtggaggcctcatcggtcggcgacagggggaggttcgtggcctacccgtcgcgggtggcggagcacacggacgtggtggcggacgccgcgcgcttcagggcggcgctcgaggggctgcacacgcacatgggcaccaggctcaaggtgccgatcattggagggaaagatttggatcttcatcagctatataaggaggtcacatcacggggcggtattgacaaggtgaaggcagagaatagatggagagaagtgactgcatcatttattttccctgccactgcgacaaatgcttcttttatgctgaagaaatactatatgtcactcttatatcattttgagcagctatacttctttagagtgcaaggctggcatcaacaagaaatagattccagaatgaattcttccattgaaattaaaaccgaaggccaagcttaccacaaaagaaaaaggggcatcaacacatcttcagatccagcttcgtcttcagataatgttgacgtagatgtgatagttgatggcaaatttgaacatggctacatagtgactgttattatgggatcgaaatccactaaagcaatcctctataattgcactgaagaacctgctttgccaactccggagccacctgttgcaaataacagcactggtttgaagggtgtacgtcgccgaagacgacgtaggaagaagctaagtacaacggatcccaggcaccccaaaccaaacaggagtggctataatttcttcttccaggatcaacatagaattcttaagccacaatatcctgcacaagacagactgatcagtaaaatgattggtgaacgatggaacaatctaagtcctgaagataaagctgtatatcagcaaagaggtgtagaggataaggagcgataccggacccagttggctgcttataaagaactgaggacaggccaacctatcagcaatgctgtgcctatccaacagaggctccctctgacagaagtgacgattgatgaagtagactccaaggtgagccaagatgatatgctgctgtcaaaccaagggtacagcagtagtgatgaaagtgaccattcaggagagaaaaatgtagaagacgagctcaacactgaaacatcccctgaggtgagcatggaaacaactggttctcctggacaccctgatccctctcgagatggggaccactttgagttgcggcggagagaaaaccccaaggcagatgagaaagataatgcaccacctgattcatgacttttcgctttgaatggtatgtattcgaagatccgaaag

SEQ ID NO: 131916 - DNA, 1847 bp, Zea Mays
cttctcttcgtcgccgctcatcacaagcctgtcgtcgtcgtaaacacagagagggagctcgtccatgtcctcctgattcctcttggcgatcgagggagtggccgaccggcgataatctagctatagccagcctcgccatgcctcgccagaggaccctcacctccgaggcggccggcgggcggctgctgctcgtggtggtcgcggtcctgctatgcctgtccgtgcctctggggcgtgcggcacccccgggcgcggaggtcgcggagttccctgggttcacgggcaaactcccctccaagcactacgccgggtacgtaacagttggtcaacatgagcaacgaaagagacacctgtactactaccttgccgtctctgaaaggaacccaagcttggatcctgtggtcatctggataaatggcggtccagcatgttcagggtttagtgcatttctgcattcatttggaccttttcgaatggagggctcccaagttcatatcaacgacggtccacgagtagccgtgaacccttactcatggacaaagatggctagcctcctcttggtcgactcgccagcaggtgtgggctactcgtacgctgatcatgaagatgactacaccacagatgacacaagcagggtagcggacctgtatgactttctgtcaaagtggttcgctgaatacgcagaatttctgtcgaatcctttctacgtagctggatgctcgtacagtggagtgatagtacctgtacttgcacacgaaattataaagagtaatgaagaatccggtggggtcaagatcaacttcaagggatattcactatgtaatcccgctattgatgttgacatagagaacaatgcacatgttccatatgcatttcgaatgggtttgatttcagatgaattgtttcagagtttagttactacatgtaatggaaagtattggaataactccaatccatcatgccaagagaacatggagcaattttatactcaaatcaaaggtattaacatggagcatattctatgtccgccgtgtcgatacaagatggggataaccaatcaattcattgaatatgattctggtcaaatgtttgagagcctttcgaaaacctccaagcatggtttagaatgcaatgatcaagagttggcccttgagaaactctttgatacaagatcaggtagagaaaaattgcatgccaaaaaggttgaagtatcaggaccatggaagaggtgccccaagcgtgttctgtacacgagggatattctaacattgatagagtatcacttgaacataacatccaaaggatatagagtgtttatttacagtggagaccattccttgcttgttccttttacttcaactttggagtggctaaagaaactaaactacaaggaaatcgagaaatggcacccttggtacttggagaatcagattgctgggtactcaattaggtacgagaacaatatattgtttgcgacaataaagggggctggccatgttccatcggactatctgccatttgaagtatttgctgcctatcaaaggtggatagacggggctgcttctctctgatagcgcttgtcgtactcttgtgctgcaaaatctttgcataataattaataaatccgaatagagtaccgaggccaactgggagatcacctctgttgttgacattgaaaaccaatgtaagagtggttaatggctactccttctattctagattattacaagtcatttcaacttccttcgagaggtttaagtatctcaaatttgactaaaactacagagaaaactataaagatttaggacatcggatatatgtgctatgaaaatttaattaattagtaa

SEQ ID NO: 131917 - DNA, 1977 bp, Zea Mays
cttctcttcgtcgccgctcatcacaagcctgtcgtcgtcgtaaacacagagagggagctcgtccatgtcctcctgattcctcttggcgatcgagggagtggccgaccggcgataatctagctatagccagcctcgccatgcctcgccagaggaccctcacctccgaggcggccggcgggcggctgctgctcgtggtggtcgcggtcctgctatgcctgtccgtgcctctggggcgtgcggcacccccgggcgcggaggtcgcggagttccctgggttcacgggcaaactcccctccaagcactacgccgggtacgtaacagttggtcaacatgagcaacgaaagagacacctgtactactaccttgccgtctctgaaaggaacccaagcttggatcctgtggtcatctggataaatggcggtccagcatgttcagggtttagtgcatttctgcattcatttggaccttttcgaatggagggctcccaagttcatatcaacgacggtccacgagtagccgtgaacccttactcatggacaaagatggctagcctcctcttggtcgactcgccagcaggtgtgggctactcgtacgctgatcatgaagatgactacaccacagatgacacaagcagggtagcggacctgtatgactttctgtcaaagtggttcgctgaatacgcagaatttctgtcgaatcctttctacgtagctggatgctcgtacagtggagtgatagtacctgtacttgcacacgaaattataaagagaaatgaagaatccggtggggtcaagatcaacttcaagggatattcactatgtaatcccgctattgatgttgacatagagaacaatgcacatgttccatatgcatttcgaatgggtttgatttcagatgaattgtttcagagtttagttactacatgtaatggaaagtattggaataactccaatccatcatgccaagagaacatggagcaattttatactgtaaattagatctcttaatttatccatctatctataagttctatttgaccacatctaacaattcaaaatgtgagatgcagcaaatcaaaggtattaacatggagcatattctatgtccgccgtgtcgatacaagatggggataaccaatcaattcattgaatatgattctggtcaaatgtttgagagcctttcgaaaacctccaagcatggtttagaatgcaatgtcagtatttgatctactaatggactctatttcactaattttttagtcatgatcaagagttggcccttgagaaactctttgatacaagatcaggtagagaaaaattgcatgccaaaaaggttgaagtatcaggaccatggaagaggtgccccaagcgtgttctgtacacgagggatattctaacattgatagagtatcacttgaacataacatccaaaggatatagagtgtttatttacagtggagaccattccttgcttgttccttttacttcaactttggagtggctaaagaaactaaactacaaggaaatcgagaaatggcacccttggtacttggagaatcagattgctgggtactcaattaggtacgagaacaatatattgtttgcgacaataaagggggctggccatgttccatcggactatctgccatttgaagtatttgctgcctatcaaaggtggatagacggggctgcttctctctgatagcgcttgtcgtactcttgtgctgcaaaatctttgcataataattaataaatccgaatagagtaccgaggccaactgggagatcacctctgttgttgacattgaaaaccaatgtaagagtggttaatggctactccttctattctagattattacaagtcatttcaacttccttcgagaggtttaagtatctcaaatttgactaaaactacagagaaaactataaagatttaggacatcggatatatgtgctatgaaaatttaattaattagtaa

SEQ ID NO: 131918 - DNA, 264 bp, Zea Mays
atgacggtgaccactgggtctgggaagtccctgttgatatccgcgtggcgtggcggaccactgggtctgggaagtccctgttggcgcaagaacgcgacggccggcgatgcgatagactggtggtgcgaggtggcgcaggaacgctggagcgcgatcaccacggagaggagaaataagaaggcttccattgctgatgtcttatctgatgtcatccctaatctgcccttccgcggatcattagagagggtaaaattagttaagtga

SEQ ID NO: 131919 - DNA, 656 bp, Zea Mays
ttcgtgtggaaggtcatccagtactggctcacgacgacgttccaggtgatgaggcccactgccaagacatatctggtgcacatattaaatcatcactactcattttagatctaacgtctctagttgattattcaatttataaataacacctcccaccactacacaccaccacgttgaagggtgtccttagtaaaatagaccaaacaactagagacgttagatctaaaatgagtggtgatgatttaatatgttcaccatgtgcaccaatgttctatgtgcactagatatgttcccactgccaagggtgccacgaagactcttaagctcaacatggtgctcgtgctcttctccatatgccgcaacactcacatggttgcgctcctcctgtgctattttcttcgttcgatgaggagaggaactacgatcgtgttcgagtggcgaggctgaggggaggaagtggcacgcgaggggatggaggaaggaagaagagggggaggcaggcgccatctgtggtgcggaggaggtgcctaggtttccatagttggctagctccgccactattagtcgttgagaagaaagagatcggtcgtgtaaagttcccaaaaaccttatttaccctctctcggtgcaggatctcaaaggtgatgggttctgta

SEQ ID NO: 131920 - DNA, 520 bp, Zea Mays
taagagactgtcagcaatgccagatcaccaatgcatgcatgctcatcaagccccagaaaatctgctaaagaaggcagaacctcgaaggaggtcttgtccacctgttttacaaaaaatctccaagcaagaaatccaataaagttgtctaccctagacgaagaattagatcaaagcctttttaggtgaaatgccactatgatgaggtcttgtagattacagagaacataataagcttagcaaagcagttcgatgtcagcgttatggattgtccaaagcctccgggtggcaactcaacctttgttccaccaagcaaagctgctgcaacagcaagtcagaaggtacagataaaacagaaagaaaatccataccaataatccatctaattctacaattttcatgcctaccccaatagttattgggaataaaacactctacgcacgattcagtcaaggaagcaaaatccacatagatctaggcactaagcgaaatgaatgcaccaaccaccaatttttaagaaaac

SEQ ID NO: 131921 - DNA, 1474 bp, Zea Mays
atgtcaactccacaagacagtagcagtcgtcgcagtggcataggagcagctcctgctgatgctggtagctctagagatcccactccatctgatgcagcaacccaagggacaaggaatgatgttgttgaaatagatgatgctgcacaggttgggtgtaagaggaagttgaagtctaaagtatgggaggattttgttagagttactgtatcagctcaagatcaatatttttttactgggtccgaccctgaattgcaggattcaactgtatcagctcaagatcaatatttttttaaatgagtaagcttgcaaatatgttctcggctctttgtctggatgctgaaagcaatgaagatgttggccgagctgaagtaccacaggcgtcttccagcacagacaaaactgctgcaagcaaacctgataaaaatgagcagaatgacacaactgcagtaaactatgaggaggcagcacttgtatcatcatctagtgattacaggatgcctttggtgtggatagacttggaaatgaccggtttggatataacaaaagatcggattttggagattgcttgtatcataacggatggcaaacttacaaaacaaatagagggtcctgacttagttataagccagagcaaagattgtttagataatatggatgaatggtgcaaaactcatcatgcagctagtggtttgacggaaagagtactgcagagtgaactttctgagcatgatgcagaggcaaaagttttagactttgttaggaagcacataaattcaggcactccattattagctgggaattctgtttatgtggattttctatttctgaagaagtacatgccacagcttgcagccgtcttctctcatgtaattgtcgatgtgagcagtataatggctttatgcatacgatggtaccccaaagaaaggaaacaaactccaagaaagcaaaaaacccacagggcaatggatgatattaaagaaagcatcgccgaactgaagtattacaagcacaacattttcaaaccacagaaatcaaagcggtagctgcacgtcgagtagttgaatcgactgatagctaaccagaattggagatgggttttcaggtcaaagccgcatgccttgctttggggttatgttctgtgcaagtgtgcatccattagtgcttgggtttataccgatctcaatggggttttatgaaagtttcatgaacactaaataatttgatgtggcatagtatttattgataaagggagatgataaaagtttcgtataaaagagtttaatggaagataaaacttatctatactgtttccaatacatgagggatttggaaacagtgatatgaaactcctattgagatttgagatcatatcacgacactagtacttcatgattttctgaagccttcctggatgtgtctcatagttgctacatcacatgcacacatagtaacggttaattaaagggattgaaaa

SEQ ID NO: 131922 - DNA, 1631 bp, Zea Mays
aaagttccctaaccggctaaccctaatttcacggccgcccacccgccagcgccctgcgcccagccggcaccctaagttcccacttcccagttcccacccgccagccgccaaccgcccagcccgctgccccgctcccgccccgagctgcgcggctgcgcccccaagctgcgcgcctgcgccgtccccgaggcccgagctgtgcctgcgtcgtccgtcgtggcccgagctgcgcctgcgccgtccccgaggcccgagctgcgcggctgcgcccccgagctgcgccgtccgtcggcccccactcgtcgttcctcccgtcgcgcggcgcagcgctcacgcaaggccctcggaccagcagatcgacggcttcaccgcggatcgaccagcagatcaacgccgcccttcagaccctcaggattcaactgtatcagctcaagatcaatatttttttaaatgagtaagcttgcaaatatgttctcggctctttgtctggatgctgaaagcaatgaagatgttggccgagctgaagtaccacaggcgtcttccagcacagacaaaactgctgcaagcaaacctgataaaaatgagcagaatgacacaactgcagtaaactatgaggaggcagcacttgtatcatcatctagtgattacaggatgcctttggtgtggatagacttggaaatgaccggtttggatataacaaaagatcggattttggagattgcttgtatcataacggatggcaaacttacaaaacaaatagagggtcctgacttagttataagccagagcaaagattgtttagataatatggatgaatggtgcaaaactcatcatgcagctagtggtttgacggaaagagtactgcagagtgaactttctgagcatgatgcagaggcaaaagttttagactttgttaggaagcacataaattcaggcactccattattagctgggaattctgtttatgtggattttctatttctgaagaagtacatgccacagcttgcagccgtcttctctcatgtaattgtcgatgtgagcagtataatggctttatgcatacgatggtaccccaaagaaaggaaacaaactccaagaaagcaaaaaacccacagggcaatggatgatattaaagaaagcatcgccgaactgaagtattacaagcacaacattttcaaaccacagaaatcaaagcggtagctgcacgtcgagtagttgaatcgactgatagctaaccagaattggagatgggttttcaggtcaaagccgcatgccttgctttggggttatgttctgtgcaagtgtgcatccattagtgcttgggtttataccgatctcaatggggttttatgaaagtttcatgaacactaaataatttgatgtggcatagtatttattgataaagggagatgataaaagtttcgtataaaagagtttaatggaagataaaacttatctatactgtttccaatacatgagggatttggaaacagtgatatgaaactcctattgagatttgagatcatatcacgacactagtacttcatgattttctgaagccttcctggatgtgtctcatagttgctacatcacatgcacacatagtaacggttaattaaagggattgaaaa

SEQ ID NO: 131923 - DNA, 865 bp, Zea Mays
aaagttccctaaccggctaaccctaatttcacggccgcccacccgccagcgccctgcgcccagccggcaccctaagttcccacttcccagttcccacccgccagccgccaaccgcccagcccgctgccccgctcccgccccgagctgcgcggctgcgcccccaagctgcgcgcctgcgccgtccccgaggcccgagctgtgcctgcgtcgtccgtcgtggcccgagctgcgcctgcgccgtccccgaggcccgagctgcgcggctgcgcccccgagctgcgccgtccgtcggcccccactcgtcgttcctcccgtcgcgcggcgcagcgctcacgcaaggccctcggaccagcagatcgacggcttcaccgcggatcgaccagcagatcaacgccgcccttcagaccctcaggattcaactgtatcagctcaagatcaatatttttttaaatgagtaagcttgcaaatatgttctcggctctttgtctggatgctgaaagcaatgaagatgttggccgagctgaagtaccacaggcgtcttccagcacagacaaaactgctgcaagcaaacctgataaaaatgagcagaatgacacaactgcagtaaactatgaggaggcagcacttgtatcatcatctagtgattacaggatgcctttggtgtggatagacttggaaatgaccggtttggatataacaaaagatcggattttggagattgcttgtatcataacggatggcaaacttacaaaacaaatagaggttgtcgtcgaaacgaagtgcttttgttggtttgttctatagagcttttgtaaaatgtgatgatgttgtgctgaatcactttaatatttcctatgaaacatcc

SEQ ID NO: 131924 - DNA, 624 bp, Zea Mays
agttcatgggagtcgagtattttttatgttgggcagataattgttatgggtgctccatctatcattttcattgatgaaaatgattcaattgcacccaagagagaaaagaccaatggagaagtagaacgtcgtattgtttcacagctactggctcttatggatggactcaaatctcgttcccatgttattgttatgggtgctacaaaccggccaaacaacatcgatcctgctcttagaagatttggaaggtttgaccaagtaattgacattggagttcctgatgaagttggccggcttgaggttaatttggaactcatttcaaaggatacccatggatacgttggtgctgatcttgctgccctttgcactgaggctgctcttcattgaattcgtgagaagatggacatcatagatcttgaggatgatacaatagatgcagagatattgaactcgatggttgttacaaaatgaccatttcaagactgcgctggaacaagcaacccatctgctctccgtgaaacttttgatttctggatccaggttgttgaagtcccaaatgtctcttgggatagaataaaaaattgtggttgggaaggttatagtagcaaaagccattggaattaa

SEQ ID NO: 131925 - DNA, 645 bp, Zea Mays
atggggaaaaagctgcagctggccgacgacgaagagaactgctggtatggcgtcggcggcgctgaggcggagtgcggcgtcgatgacgagttcagggcgacggatctgcgccctctatcactgctgtcgccgcacacgcaggcgttccaccttgcctggctctccctcttcgtctgcttcttcgcggcctttgccgccccgcccatcctccctgcgctgcgaccggcactcgtgctcatgccctcggacgcccccgccgccgcagtgggctccctctccgccacgctgctcgtcatgccgctcgcgtacgagctcgtcctccgtctcggcgtgcccatcaccgtcgcctggcgcgtcacctacctcctcccctgcacgctcctcatcaccacgggcctcgccgtcctcgccttccccaacgaccacccgcgcggcgtcggcgccggagccaagaccggcaatagcttgtggaaggtggtgcccggaggggtcggcaactaccgcgcgtgggtgctcgcgctcacctacggctactgctatggcgtcgagctcatcatggagaacgtggccgccaacttcttccggaaacgtttccacctcccatggaggttgcgggcgccgcggcggcgtgcttcggcgcgatga

SEQ ID NO: 131926 - DNA, 680 bp, Zea Mays
atggcgagtggggaattgcatattgtgtcaagggtgggtccagaaaaagagctaaaagcaatacagtacttggagagaagagagtgtgagtacgaccagaaaatatccattgatttctacaaggaaggagatcccttgaaaccagctgtgacgggcgtcttagtgttcgtttccactccagatccaattggcaacaagtactatcttggccctgctcctctgcaggatatggcaaggcaaattgctacagccaatggccctactggctataatagggattacctgttctcaatggagaaggcattagccagcattagccacgaagatgattcgatcatagagcttgcaaacgaggtgaggaaggtgctcaacagaacaaaggagaccaagatcactggtgccaatgcttccatgaaatcacatgcccctcttgtgcacctgtccgcgcttccagaaggcaccgttgtggactcgagatagcgacctctactcggaatttactttcagctcttgcatgtttgtggttgtggccatcatgtactgattttcccttttcaacagttgtcgtgaggctgtatcgtctggagtaaaaaaaaaaaaagctaaaagccggcactaataatgatattaacttgaaaaagctatcggcgatccttgaacttggaggacccccccccccc

SEQ ID NO: 131927 - DNA, 699 bp, Zea Mays
gtctagattcattgcacctgctggtcgtttgaactttgaaccgagcggcaagcaaccctttctccgagccgcccaaatccgtacagcgcccatgcccttctcacgtgcatgcccccctccccaaaaccgcacacacgagaggaaaaaaaggggggctcattttcctacgagatcccgtggaaaacggccgggtgcggcaggagaggccggggtgccatcacgtgccggtgaccaccgtcctgatcctcatcccctcgctcgctgcgcctggcctgacgtgtccccccggtccgtgtgtacgctggcgtccggcgggatataaaggcggtcccgcacccacctctttcttcctcctttttttctctcatccgaattcccaggcaggcaggtcggcgaggagggcaggaagaccgaagaccgagccgtgcgggggctcgggacgggaacgggacaggaccccaaaatctcagatccttcctgcccgcccgcccgtgcccgtcgacgcgtcgttcttgccggccgcgccccacctccgccctctcctcctccagggggatcggatacgccacaggctgcgcgatggtgctgtgggtcttcggctacggctccctcatctggaaccccggcttcgacttcgacgacaaaatcctcggcttcatcaagggctacaagcgcacctttaatctcggtatggatgct

SEQ ID NO: 131928 - DNA, 765 bp, Zea Mays
gtctagattcattgcacctgctggtcgtttgaactttgaaccgagcggcaagcaaccctttctccgagccgcccaaatccgtacagcgcccatgcccttctcacgtgcatgcccccctccccaaaaccgcacacacgagaggaaaaaaaggggggctcattttcctacgagatcccgtggaaaacggccgggtgcggcaggagaggccggggtgccatcacgtgccggtgaccaccgtcctgatcctcatcccctcgctcgctgcgcctggcctgacgtgtccccccggtccgtgtgtacgctggcgtccggcgggatataaaggcggtcccgcacccacctctttcttcctcctttttttctctcatccgaattcccaggcaggcaggtcggcgaggagggcaggaagaccgaagaccgagccgtgcgggggctcgggacgggaacgggacaggaccccaaaatctcagatccttcctgcccgcccgcccgtgcccgtcgacgcgtcgttcttgccggccgcgccccacctccgccctctcctcctccaggtaggtgaatggtgattgctgcaaccgaccgtcttcgatggacggggattcttcggtggggttggattgggggatcggatacgccacaggctgcgcgatggtgctgtgggtcttcggctacggctccctcatctggaaccccggcttcgacttcgacgacaaaatcctcggcttcatcaagggctacaagcgcacctttaatctcggtatggat

SEQ ID NO: 131929 - DNA, 2508 bp, Zea Mays
cgcgaagtctcgccgactccgacaaccttgcgttcctgtctctgcgtctcgtcgcctcagattcacccccaccacttcctccctccccttggatggaggcaggcagattcccgttccattccagactcgcagtacagtacacacagcaaaagcaccacccgggccggcttcctctagactagattagtgttgctaagagcctttttaactacgggattacgcaagtctcgtatactcatccagagagagacacggaggacctgggtttggttgcgctgcttgactcgctccgtgttccaagcgccttttgagcattcaggcagatataaaattcctctttttacactacaatccccgctgaatcagcagcagcaactctctccctctccgttcttggtggtccgagacccttggccgtacgctctgcctcactcctccgtctcttgcttcccttgccgccggcggcgcgcggcgccgggcgcggatcggcggcgggtgcatggtggaggccgccgccgggcgccggacaggcaccagccgtcggcggcctagcggcagcggaggggagcaccggcacctggtcgcgctcgccgtcgccgcgcgcgtcgccatggtcaccacccggtccgtgggtccagcagcagtagcggaaggtgatggagcgggagctgctgtaacagatgccggcgccgctggcggtggcggacgatgcatggaggacttcttcgactgcctcctcggcttgctcggcgcgttaggcatgacatgggctgcggcgcggccccagcggcagccgcgcccgccgctgcctcgcggggctgcgggggcggggcctgcgccaactgactcccggcgtttcgcggcggagctcagggccacccccggccggatcgccggcaatggcgcctgcgccgtcgcgtcactgtacacgctgcagggcaagaagggcgtcaaccaggatgctatgatcttctgggagaacttctgttcaagagatgataccatcttttgtggtgtgtttgacggccatggaccttatggccatttggttgccaagagagtaagagatctgctgcctctaaagttaggagaaggtttgacgacggaagatggtagagtaacatccactggcaacattaagctcaacacacatgatgtagcttcaccagaacacatagacaaaggaagtactgccatttcctctgaagctcagcagaatggagagtatccagagaccttcccagcattgagaacttcattcttgaaggcattccgtgtaatggatagggatctcaaattacataaaagcattgactgctttttcagtgggactacagcggtggcagtgatcaagcaggaacacaatcttataattggcaatttgggggattcaagagctgtcttaggcaccagagatgaaaataaccagcttattgctgttcaattgacagttgatctcaaacctaacattccaagcgaagcacagagaatcaggcaacgcaggggcagaatattcgcgcttcccgaggagccggaggttgctcgtgtttggcttccaaagtacaactctcctggactggccatggctagggcatttggagacttctgtctgaaggaccatggtgtaatttctacgcctgacgtctcctatcaccacatcacggagaaagacgaatttgtggtgctggctactgacggggtgagcagattgtcaacctacgcaccgtttattccgagtgtttttaggtccttctgacctcctctctttgcaactaggtctgggacgtgctatcaaacgatgaggttgttagcactgtctgccgagccacatctcaggcctctgcagcccggtttctcgtcgagtcggctcaccgcgcttggcggactcggttccccacttctaagatcgatgactgcgctgttgtctgcctgttcctgaacacagacaaagcgagcgaatcgtcgagttctttggccaagaacttggcagatgctgtagaagctagcagtgctgggcgcgccacaactgtccaggtgagcgctggtgcatctacagatgttgccgccctggtaccagtaccagatgggaacgaggtgtctattgctgaaaccatcacaaagctggtcacgctcatggatttgcccaaggatggttgaggctcctgtgattgggacctgaacgaagatataccacatcggtgggtttctgcttgcagttttttttcctgaacgcaagtgtggctagaatttgcagttttgcttcgtgtaaagtaccgcgtcagtttagcgtgatttgttccagtttttgtaatatttcaattcatgttagtattgatgcgtccgtgcgtcgtcgagatcgtagtattctgtaggaaggaggctactgagtttttgtgcttcctgtaaatatattcatcattctatctctggtgtctgatctatatcatcattgctttgggggtcggtcttattaatataaataaggattatataatcatatcggacgaa

SEQ ID NO: 131930 - DNA, 2178 bp, Zea Mays
atactcatccagagagagacacggaggacctgggtttggttgcgctgcttgactcgctccgtgttccaagcgccttttgagcattcaggcagatataaaattcctctttttacactacaatccccgctgaatcagcagcagcaactctctccctctccgttcttggtggtccgagacccttggccgtacgctctgcctcactcctccgtctcttgcttcccttgccgccggcggcgcgcggcgccgggcgcggatcggcggcgggtgcatggtggaggccgccgccgggcgccggacaggcaccagccgtcggcggcctagcggcagcggaggggagcaccggcacctggtcgcgctcgccgtcgccgcgcgcgtcgccatggtcaccacccggtccgtgggtccagcagcagtagcggaaggtgatggagcgggagctgctgtaacagatgccggcgccgctggcggtggcggacgatgcatggaggacttcttcgactgcctcctcggcttgctcggcgcgttaggcatgacatgggctgcggcgcggccccagcggcagccgcgcccgccgctgcctcgcggggctgcgggggcggggcctgcgccaactgactcccggcgtttcgcggcggagctcagggccacccccggccggatcgccggcaatggcgcctgcgccgtcgcgtcactgtacacgctgcagggcaagaagggcgtcaaccaggatgctatgatcttctgggagaacttctgttcaagagatgataccatcttttgtggtgtgtttgacggccatggaccttatggccatttggttgccaagagagtaagagatctgctgcctctaaagttaggagaaggtttgacgacggaagatggtagagtaacatccactggcaacattaagctcaacacacatgatgtagcttcaccagaacacatagacaaaggaagtactgccatttcctctgaagctcagcagaatggagagtatccagagaccttcccagcattgagaacttcattcttgaaggcattccgtgtaatggatagggatctcaaattacataaaagcattgactgctttttcagtgggactacagcggtggcagtgatcaagcaggaacacaatcttataattggcaatttgggggattcaagagctgtcttaggcaccagagatgaaaataaccagcttattgctgttcaattgacagttgatctcaaacctaacattccaagcgaagcacagagaatcaggcaacgcaggggcagaatattcgcgcttcccgaggagccggaggttgctcgtgtttggcttccaaagtacaactctcctggactggccatggctagggcatttggagacttctgtctgaaggaccatggtgtaatttctacgcctgacgtctcctatcaccacatcacggagaaagacgaatttgtggtgctggctactgacggggtctgggacgtgctatcaaacgatgaggttgttagcactgtctgccgagccacatctcaggcctctgcagcccggtttctcgtcgagtcggctcaccgcgcttggcggactcggttccccacttctaagatcgatgactgcgctgttgtctgcctgttcctgaacacagacaaagcgagcgaatcgtcgagttctttggccaagaacttggcagatgctgtagaagctagcagtgctgggcgcgccacaactgtccaggtgagcgctggtgcatctacagatgttgccgccctggtaccagtaccagatgggaacgaggtgtctattgctgaaaccatcacaaagctggtcacgctcatggatttgcccaaggatggttgaggctcctgtgattgggacctgaacgaagatataccacatcggtgggtttctgcttgcagttttttttcctgaacgcaagtgtggctagaatttgcagttttgcttcgtgtaaagtaccgcgtcagtttagcgtgatttgttccagtttttgtaatatttcaattcatgttagtattgatgcgtccgtgcgtcgtcgagatcgtagtattctgtaggaaggaggctactgagtttttgtgcttcctgtaaatatattcatcattctatctctggtgtctgatctatatcatcattgctttgggggtcggtcttattaatataaataagga

SEQ ID NO: 131931 - DNA, 2352 bp, Zea Mays
catgccgctgcctcagccgctgctcggcggcgcctcgcccgctccggcgcgagcggcctcatccttcctccacccccttctccacacgcgccaccgcgtctccactgcacctgccgctgcctcctccttcgtgcctgcatctcactcctcccacgcgaacgacgccatgctcctccgccgtgccgccgacgtggccgaccgttctgcgggactcacctccccgcacccgaacttcgggtgcgtcatcgcacggccccagcttaataccgacagcgctgattcctgggtggtcggcgaagggttcctctatgcgcaggggacgccctgcgccgagctcctcgcctcacaggaggccggtgagcacgcgcgcggcggcacggcatacctcaatctcgagcctggggactgctttggtgacaacacagccgtcggatccctcgtccaggcaggaattacaagagttgtggtgggtcttagacatcccttgaagcacttgagagggaaggcaattcaagcattacgaaatgaaggcattcaagttgatgttgtgggggaggatctgcagagtaaattgttcaaggaagctctgaagtcatgcctcactgtaaatgctccattgctttacagagctgcctttcatgtccctttttcggtcctgaagtatgctatgacagcagatggaaaaatagcagcaagtagtggacatgcttcttggataagtggcaaagcatcaagagggcgtgtatttgaattgcgtggcagaagtgacgctgttattgttggtggaaatacagtgcgttttgacgatcctcgattaactgcaaggcatgttaaaggacatgttccagtgcgtatagtgatgtcacagtctcttaaccttccagaggaagcaaatttatggaatcttaacgatgcctatacgattgttgcgactcagagaggtgctcggcgagattttcaaaggaagcttgctatgaagggtgttgaagtagtagagtttgacatgctgaatccaagagctgttatgtcatattgttatgatcgtggttatcttgctgtattatgggaatgtggtggaacactagctgcttctgctatatctgcgagtgttatccataaggtctatgcattctgggctccgaaaataattgggggattaaatgcacctacgccagttggtgaactggggatgagtcaaatgactcaggcaataaatttaattgatgtctcgtacgagcagattgacagggacatgctcatgagtggattcatcgaacccattcctgatctttcacctgttataccatccgtggaagaaataccttccattgatccagaagtatctccatatgaaacaaatattatttccttttacaagacttgggatatttttggggctttctcaaacttttctcctcattcaattcaaatgcctgatgaaaatggagattatttcacatggccaacagtggaacactattaccaggctcataagtttgttggtgttgacaatcctcaagcaagagacattgttcaagaaataaagctagcaaagagtcctgaagaggctgctagaataggaaggacccgacaaaaagggttccctgaactggtaagaacagattgggagagtacaaaaatagatgtgatgtatagagctatcaaatgcaagttttcaacttatccccatctgactaatatgttgctgtcaactgctggctctgttctcgttgaggcatcgcctcacgatttattttggggcggtgggagggagggagaaggcctgaattacttgggtaggttgttgatgcagttgagatcagagattctggggacagtcccagcaagcgctgaagtaggggaggcagattgatcctgaagcgagcaaatcttgtttagcaggagtgttgattgcaagaccagacgttaaggtgtggctgggtcccgattgctacagtggatggtgctagtgaaacgaagcgcaaatgagattggttaaattatctgtatgcctgtgaagaacaaacataccatgggtcttgctcttttgtcgaacaatttcatctggccctcggggtataggaattatgaaatacaaaggaggaacaccaacagtcatgcatagaatgtggtagtcctggtagatgaatgtgtttgataaggtgataaggactaatacattggaccagaagtagaagacgtgcttgttcagtaatggttgtttagtaaaaaggagggcgaattatttaataaaattaaatgcatcattgcaccatgaagtcttttgcctttgtttcacttaggcccatcaacagggagagtaggtttttgggtacatgtttgatgcatctc

SEQ ID NO: 131932 - DNA, 2054 bp, Zea Mays
aattttcacttggcctcctcatcttttcctccttttcggccggcgtcatcgccgaacgcggatacaccgatacacataccccggctagctgtctggactctggagtgtcctccgggctaagcaaacccatagcccgatcagatcgatggcaccggcgccccgcgcttccagcttcttctcggtgctcctcgtcctcctctttgcgctgtcggtggggtgcgcgtccgccaccggcgtcttccaggtgcgccgcaagttcccgcgccacggaggacggggtgtggcggagcacctcgcggcgctgcggaggcatgacgccaaccgccacggccggctccttggcgccgtcgacttggccctcggcggcgtcgggctccccacagataccggcctgtactacacccggatcgagatcggctcgccgcccaagggctactacgtgcaggtggacaccggcagcgatatcctctgggtcaactgcatccgctgcgatggctgccccaccagaagcggacttgggatagagctgacgcagtacgatccggctgggagcgggaccacggtggggtgcgagcaggagttctgcgttgccaacagcgcgggcggcgtgccccccacgtgcccctcgacgtcgtcgccgtgccagttcaggatcacctacggagatgggagcacaaccaccggcttctacgtcacagacttcgtgcagtacaaccaggtgtccggcaacggccagaccaccacgtccaatgccagcatcacctttgggtgtggtgctcagcttggtggggatttgggatcctcgaaccaggcccttgatgggattcttgggttcggccagtcggattcgtcgatgctatcgcagttggctgctgctcgtagagtgaggaagatttttgctcactgcttggacactgtgcgtggtggtggcatcttcgctatcgggaatgtggtacagcccaaagtaaagacgacgccgttggtgcccaacgtgacacactacaatgtcaatctgcaaggaatttctgttggtggtgctacacttcagcttccaacaagtacttttgattctggtgacagtaaaggcactatcattgacagtgggacaacactggcatatcttccgagggaagtttataggactttgttggctgcggtctttgataagtaccaagatttgcccttacataattatcaagacttcgtgtgttttcaattttctggaagtatagatgatggatttcccgtaatcacctttagttttgagggagaccttacactgaatgtttacccagatgattaccttttccagaacaggaatgatttatactgtatgggattcctggatggtggtgtacagactaaagatgggaaagatatgctcctcttaggagacctggtcctctcaaacaaactagtagtttatgacttggaaaaagaagttattggatggacagactacaactgctcctcgagcattaaaattgaggatgacaagactggctcagtgtacactgtcgacgcacaaaacatctccgctgggtggagatttcaatggcacaactccttaattctgttgatattaataaggacaatctggagctgtttggttatagcctaacgctggatctaggactaaagccccgtttgtttccttccaagattatataatccagctcgtggattatataagcacctattgacctgcttatagattatcataatctagatatccggattatataattcacctaataatctatattgtttgtttaactctcaatttatttaagctagattatataatatagatggtaaacaaacaaggcctaaaacatattttctgtaacaaaaaatagttgagttcagaagttcaacaaagagtacagaatattatatagattgtcccttgtgttttagacgtaaactgtagcaacatatcaagctactaaaatgactttagttgatgtcaggctgttttgcaccttctgcgtttctatcagatatatcatcaggtgtacgtgttactgtgcaatgtaccgtctgttcaggaa

SEQ ID NO: 131933 - DNA, 1107 bp, Zea Mays
aattttcacttggcctcctcatcttttcctccttttcggccggcgtcatcgccgaacgcggatacaccgatacacataccccggctagctgtctggactctggagtgtcctccgggctaagcaaacccatagcccgatcagatcgatggcaccggcgccccgcgcttccagcttcttctcggtgctcctcgtcctcctctttgcgctgtcggtggggtgcgcgtccgccaccggcgtcttccaggtgcgccgcaagttcccgcgccacggaggacggggtgtggcggagcacctcgcggcgctgcggaggcatgacgccaaccgccacggccggctccttggcgccgtcgacttggccctcggcggcgtcgggctccccacagataccggcctgtactacacccggatcgagatcggctcgccgcccaagggctactacgtgcaggtggacaccggcagcgatatcctctgggtcaactgcatccgctgcgatggctgccccaccagaagcggacttgggatagagctgacgcagtacgatccggctgggagcgggaccacggtggggtgcgagcaggagttctgcgttgccaacagcgcgggcggcgtgccccccacgtgcccctcgacgtcgtcgccgtgccagttcaggatcacctacggagatgggagcacaaccaccggcttctacgtcacagacttcgtgcagtacaaccaggtgtccggcaacggccagaccaccacgtccaatgccagcatcacctttgggtgtggtgctcagcttggtggggatttgggatcctcgaaccaggcccttgatgggattcttgggttcggccagtcggattcgtcgatgctatcgcagttggctgctgctcgtagagtgaggaagatttttgctcactgcttggacactgtgcgtggtggtggcatcttcgctatcgggaatgtggtacagcccaaagtaaagacgacgccgttggtgcccaacgtgtatgtggtctctgttctgttttcccccgtttacatcatcgtcatatctattttcttcgtctcatgtctactttgtgcgaatgttccttcagctgctctcttggcagtctttgt

SEQ ID NO: 131934 - DNA, 106 bp, Zea Mays
gcgaaaaacaaagtattaccccaataatatatatacatcttcctctcgttggtcatgttctagatctcgtgaccttttcatgagaatgtcaaacatactcttctcc

SEQ ID NO: 131935 - DNA, 699 bp, Zea Mays
gagaaatcagctgataatcaggtatcagaccatcacccgaagcagctcgcagtaggccagcaggaacaagctcagtacattcagcagagttcaacttcagaccacaccttgaggggcaaccccgggtgtgcggtcggacccaaaacaccgacagtgaacgccttgaagaaggaaggggtcagctttgggtccttcgacatcttatctgacgaggaagttaggcaaggtttgaagacgtactccaactggcctaccttcccccagctctactacaaatcggagctgattgggggatgtgatatcgttcttgagatggagaagagcggagagttgaagtcgaccctgtcagagtagacacctagctagcattcttgcttcgctggcgtttttaccatattgcctgcattggatcactctactctggtattcatgccattgtattcatagatccacgttggtacttgtctgcagtaccacattgctagaattgtgacacatctgcagaaggaataactcacgcttgttcggtactgattgcattgttcttatatcaccagttctattgaacggatggaagcttttttgttcaggtattgtcacgatctatagacggatgaagtaaaatatttctagagtatgtgtgttcgtgtaattgtgtatttaagtcatgccattgttcttgggaaggcacatgtgaaa

SEQ ID NO: 131936 - DNA, 677 bp, Zea Mays
gggtggagcgcacgagtgatatttgggtggagcaggaaattcatgaattttggggtgcttaacacgaccttcgttactcttattccaaagaaagaaggggtgatgaggtgaaggattttaggccaattagcatagttcataactttgccaagattttagctaagcttttggctatttggttggctagcatactacacgacatggtccaacaaaatctcactatctacatcagcaaaaacagttacgtgtgcttctcagacttgatatttctgatgtgttcgattcaatctcttggccttttctcattgaagtcttgtaagggtttggactttggacagatttagagggatttgaatcagtggtcttctttagacttcatcgactaggttctccttaacggctcccaaggacagcccatttgcaccggcgagggctcggacgggaggatccgctctcttcaatgtcgttcatcttggttatggactttcttgggttttttgctacaaaggcaggaaattaaggatttcttcaacctcttgaggctaggatggtgcagcaccatatctctattatgtggatgatgtggtcattttcctttgaccaattacgattcttcatctttttgggctgcttttggtttgcgtaccaatatgaataaaagtagtatctttcccatt

SEQ ID NO: 131937 - DNA, 281 bp, Zea Mays
cataatttatatggagcgcatccagttttaattgatgcctgactttagcaatcactccatattttgatctatcttttttataagtttgacttcatgggacttattttagaaacttgagctcacaaactttgtcttatttggtctctgtatgatggaattatgtcactttataatctctgttcattcagtgagtcgttgtgaactcttttctaatcgctcacttcattggacttgttgtaccaagacatattgtatggagtaaacaataacatcagttagcc

SEQ ID NO: 131938 - DNA, 689 bp, Zea Mays
tcttgattccacaactgtccactgccaattcttggcaataaatcctttattgatgcaacaccaccgccttacaatttcattgcaacacatcaacctttttataataatccttccaataataatatggtgagctcatctcaaccacctactgttccattgcaataacatcagcatactgcaccaaaaattaagattgtttgtcgtgcatgacttgaccatctcagtgcgcacgacgccacttatcatttgacctctccatcatgaatttgcatcaacatgtaagatgtaacctatgaaatatactatgatattgtacattggtctgactactatctgtattccactcaactgtctatatatatactctgtattccacttcaaacgactcaataaccacagtatatataaccacaataaatgccttcattatttacagaagtttctattagtatatatggtgtcactaataacttctattccctcgttgcagaaatggatcattgagaacatatgaaggccgataaaatggaaaaagaaaacttatttgaaaaaaaatcatatgtagaaatttcttactgtcatatttcatgttatctctgatgtcttaattcatatacggtgcagagaaatcaaattgcaagtcacacatcttaccactcatgcatggctcagtgtcagtgaggttcaca

SEQ ID NO: 131939 - DNA, 216 bp, Zea Mays
atggaactcgaagacttctatggtgactcttccacatttgatgatggaaattttgtagaagaggatgatcacaaggaggagatagagctcgaagatgatgatcacattgatgacaaggaggtcattgatgggtgctccacctcaagtgagaactcaagcgatgatgataaatctaccacaagttcacttgagttgatggaagatgatgattgttga

SEQ ID NO: 131940 - DNA, 2648 bp, Zea Mays
ggtgatttgtggtctgggtctgaggggggagcaatcaaagtatggtatgcagaactgattcagaagtcacttgtttcacaaacagaagaaaaacataagacccttttagttgaaagatcatctattgatcttagggacatggtcagtgatggaggggcctgtcctttgcctgctgtagatgtaaaacttctgttgtctgacaattctagatcaaaagtatggagtgctggttacctctcatttgcactctgggattctcgcactaaaggccttctaaaagtggtaaacattgatggccaagttgatacccgtttcgacatcttatctgctcaggattcatatagctatgagacaaagcaaactctgttctctccgaggaaagagaaagctcgcagtcctgttggtttcttgcagagatcacggaatgctttgttgggagcagctgatgcagtccggagagttgctgttaaagcaggttttggtgatgacactcgtagaattgaagcatttacaatgtcaacggatgggatgatctggacaggatcggcaaatggctctcttgcccaatgggatggcagtggtaatcgtttgcaagagttcctgcatcattcgtcatctgtccaatgcatttacaattttggaacaagaatatgggtgggttacatggatggcaacatccagctgttggaccttgaaggcaacttgttaggaggatggattgcacatagtagtccaattctgagtatggctgttggaggttcatatatctttacactggctggtcatggaggaatccgtggatggaacttggcatcaccagggcctcttgacaacattttgcgctcagagttgatggagaaagattcatcatacaaaagttttgaatacatgaaagtattagtgggttcttggaatgttgggcaagaaaaggcatcctacgagtctttaagagcttggctaaaactcccatcgccagaagttgggttggttgtacttggattgcaggaggtggacatgggtgctggttttcttgcaatgtctgcagccaaagaaacggtaggactagagggaagtacaaatggagagtggtggttggatgtaattggccagattttaaaggttcattcctttgtgcgtgttggttcaagacagatggctggattactcattgctgtatgggtgagaataaatcttaagcagttcattggagacattgagaatgcggcagtgccatgtggattagggcgagcaatcggcaataagggtgcagtaggcttgagaatgagaatacatggtagaaacatttgctttgtaaattgtcatttttctgcacatatggaagctgtgagcagacggaatgaagactttgaccatgtctttagatcaatgacattttcttctccttcaaatggattattgacaacatcagtttctggttctgctgctcagcttcttcgaggaacaaatggatcaagactgcctgagttgtcagatactgacttgatcgtgtttcttggtgacttcaattaccggctttataacatttctttcgatgaggcaatgggcttggtttcccggcgatgctttgactggttgagagagaatgatcagctgcgagcagaaatgaaatctgggagagtcttccagggattacgtgaaggagaatttaagttcccccctacttataaatttgagaagcacatagcaggcttatctggttatgataatagtgagaaaaggcgcattccagcctggtgtgacagagttctatatcgagacagccgaactagttcacagattgagtgttctttggaatgtcctgtagtctgttcgatatcactgtacgactcttgtatggaagcaacagacagtgatcataaacctgtcaaatgtgtgttcaatttagatattgctcatgtggacaaacaaacaatgaggcagaagtatggagaaataatgggttcaaataaggaagtgcttgactcacttcagggcttggaggctttgcctgaagtagatatcagcacgaatgacatcattctgcaagatcaaaacccttttgttgtgaaactgcacaacagaagtacaaaagagttggcttgttttgagatcattggtcagacaccaaagtcatctggcacacctttctcaggtttcccttcttggctgaaggtttctccggcagtcggtataatttctcccagacaatctgttgaagtgacgttgcaacatggacaaatacgaagtcaagattatcttactgggacttcaggggacagttctggagctgcgcaagagaaggttgcaacgctattggttacagtaaccagagtggactcgacagctgggagacggcacaaaatacaagtacagcaccggtgccgcagggagacgtattcgtcaagaggttataacttggcggatcgattctttgcttgaaccagagaattcagaagtgctgggccaacgatgttgatgtcccagtgtgcatagagatttgcatgttgtagaacaaaaatcctgtgatgagagtggcataaaaacgcggatttggagagttcaaatttattaatagtgtcggaaagagcactggacgagtacagagtacagacgtaccgcgataaagactgcaaagctgatattttctg

SEQ ID NO: 131941 - DNA, 2664 bp, Zea Mays
ggtgatttgtggtctgggtctgaggggggagcaatcaaagtatggtatgcagaactgattcagaagtcacttgtttcacaaacagaagaaaaacataagacccttttagttgaaagatcatctattgatcttagggacatggtcagtgatggaggggcctgtcctttgcctgctgtagatgtaaaacttctgttgtctgacaattctagatcaaaagtatggagtgctggttacctctcatttgcactctgggattctcgcactaaaggccttctaaaagtggtaaacattgatggccaagttgatacccgtttcgacatcttatctgctcaggattcatatagctatgagacaaagcaaactctgttctctccgaggaaagagaaagctcgcagtcctgttggtttcttgcagagatcacggaatgctttgttgggagcagctgatgcagtccggagagttgctgttaaagcaggttttggtgatgacactcgtagaattgaagcatttacaatgtcaacggatgggatgatctggacaggatcggcaaatggctctcttgcccaatgggatggcagtggtaatcgtttgcaagagttcctgcatcattcgtcatctgtccaatgcatttacaattttggaacaagaatatgggtgggttacatggatggcaacatccagctgttggaccttgaaggcaacttgttaggaggatggattgcacatagtagtccaattctgagtatggctgttggaggttcatatatctttacactggctggtcatggaggaatccgtggatggaacttggcatcaccagggcctcttgacaacattttgcgctcagagttgatggagaaagattcatcatacaaaagttttgaatacatgaaagtattagtgggttcttggaatgttgggcaagaaaaggcatcctacgagtctttaagagcttggctaaaactcccatcgccagaagttgggttggttgtacttggattgcaggaggtggacatgggtgctggttttcttgcaatgtctgcagccaaagaaacggtaggactagagggaagtacaaatggagagtggtggttggatgtaattggccagattttaaaggttcattcctttgtgcgtgttggttcaagacagatggctggattactcattgctgtatgggtgagaataaatcttaagcagttcattggagacattgagaatgcggcagtgccatgtggattagggcgagcaatcggcaataagggtgcagtaggcttgagaatgagaatacatggtagaaacatttgctttgtaaattgtcatttttctgcacatatggaagctgtgagcagacggaatgaagactttgaccatgtctttagatcaatgacattttcttctccttcaaatggattattgacaacatcagtttctggttctgctgctcagcttcttcgaggaacaaatggatcaagactgcctgagttgtcagatactgacttgatcgtgtttcttggtgacttcaattaccggctttataacatttctttcgatgaggcaatgggcttggtttcccggcgatgctttgactggttgagagagaatgatcagctgcgagcagaaatgaaatctgggagagtcttccagggattacgtgaaggagaatttaagttcccccctacttataaatttgagaagcacatagcaggcttatctggttatgataatagtgagaaaaggcgcattccagcctggtgtgacagagttctatatcgagacagccgaactagttcacagattgagtgttctttggaatgtcctgtagtctgttcgatatcactgtaagtagttcgttgtttgcttatcttatataatgcttttaattaatttgcaatggctgttattccatttttttaggtacgactcttgtatggaagcaacagacagtgatcataaacctgtcaaatgtgtgttcaatttagatattgctcatgtggacaaacaaacaatgaggcagaagtatggagaaataatgggttcaaataaggaagtgcttgactcacttcagggcttggaggctttgcctgaagtagatatcagcacgaatgacatcattctgcaagatcaaaacccttttgttgtgaaactgcacaacagaagtacaaaagagttggcttgttttgagatcattggtcagacaccaaagtcatctggcacacctttctcaggtttcccttcttggctgaaggtttctccggcagtcggtataatttctcccagacaatctgttgaagtgacgttgcaacatggacaaatacgaagtcaagattatcttactgggacttcaggggacagttctggagctgcgcaagagaaggttgcaacgctattggttacagtaaccagagtggactcgacagctgggagacggcacaaaatacaagtacagcaccggtgccgcagggagacgtattcgtcaagaggttataacttggcggatcgattctttgcttgaaccagagaattcagaagtgctgggccaacgatgttgatgtcccagtgtgcatagagatttgcatgttgtagaacaaaaatcctgtgatgagagtggcataaaaacgcggatttggagagttcaaatttattaatagtgtcggaaagagc

SEQ ID NO: 131942 - DNA, 3236 bp, Zea Mays
atggcgaatcccggcggcaccaaccccttcgcttcccccgccgacgccgcctcatcgccgtgggacgacctccccgacgacttcttcctctccacttccatcacctccccgtccccgtccccaccccctatcccgccccccatcccatccacctcgccccgtcacgccacgccccaccgatccacctccctcccgcccgcctccactccctccgctgctacctccgcctccgtctccgtctccgcttccttctccgacccgcgcccccgcgccgctccggcatcgcatcagcatcagcatcagccccagctcctccatcccagccactcactccccgccttccccgccgcggcctcccgctccccggccgccgcagcacaagtatggccaccgcccccggggccccaccactcgggctcaatcccggagttcgccgccgctccggcctccagcgcacacctcccgcccgcgcgcaccgcggtgcgcgccgaccgcccgcccccgctcgatctgcgcccgcgcccgcccagggagtcccaggccggtgcggcgcttcgcgttctcgcctgctgctgcgatgcttcccggtccgaggccggcgccgccgcccgtctctgggcagcgggcgaggccggcgtcagggcatgggacctcgcagacgccttccggtcgccgtctcagcagcgttggggcgacgagtcgtctgcgccctttagggagtcgcgcaggacgcccccggcgctctgcctcgcggcggaccccgctcgcagcgtggtgtggagcggccatgcggacggccggatcatgggatggaccgcggatcctggaccggaggcgggggagtgcctctcgtgggaggcacaccgtgggccagtgttcgcgttggccgtctcttcctatgggattctcgcactaaaggccttctaaaagtggtaaacattgatggccaagttgatacccgtttcgacatcttatctgctcaggattcatatagctatgagacaaagcaaactctgttctctccgaggaaagagaaagctcgcagtcctgttggtttcttgcagagatcacggaatgctttgttgggagcagctgatgcagtccggagagttgctgttaaagcaggttttggtgatgacactcgtagaattgaagcatttacaatgtcaacggatgggatgatctggacaggatcggcaaatggctctcttgcccaatgggatggcagtggtaatcgtttgcaagagttcctgcatcattcgtcatctgtccaatgcatttacaattttggaacaagaatatgggtgggttacatggatggcaacatccagctgttggaccttgaaggcaacttgttaggaggatggattgcacatagtagtccaattctgagtatggctgttggaggttcatatatctttacactggctggtcatggaggaatccgtggatggaacttggcatcaccagggcctcttgacaacattttgcgctcagagttgatggagaaagattcatcatacaaaagttttgaatacatgaaagtattagtgggttcttggaatgttgggcaagaaaaggcatcctacgagtctttaagagcttggctaaaactcccatcgccagaagttgggttggttgtacttggattgcaggaggtggacatgggtgctggttttcttgcaatgtctgcagccaaagaaacggtaggactagagggaagtacaaatggagagtggtggttggatgtaattggccagattttaaaggttcattcctttgtgcgtgttggttcaagacagatggctggattactcattgctgtatgggtgagaataaatcttaagcagttcattggagacattgagaatgcggcagtgccatgtggattagggcgagcaatcggcaataagggtgcagtaggcttgagaatgagaatacatggtagaaacatttgctttgtaaattgtcatttttctgcacatatggaagctgtgagcagacggaatgaagactttgaccatgtctttagatcaatgacattttcttctccttcaaatggattattgacaacatcagtttctggttctgctgctcagcttcttcgaggaacaaatggatcaagactgcctgagttgtcagatactgacttgatcgtgtttcttggtgacttcaattaccggctttataacatttctttcgatgaggcaatgggcttggtttcccggcgatgctttgactggttgagagagaatgatcagctgcgagcagaaatgaaatctgggagagtcttccagggattacgtgaaggagaatttaagttcccccctacttataaatttgagaagcacatagcaggcttatctggttatgataatagtgagaaaaggcgcattccagcctggtgtgacagagttctatatcgagacagccgaactagttcacagattgagtgttctttggaatgtcctgtagtctgttcgatatcactgtacgactcttgtatggaagcaacagacagtgatcataaacctgtcaaatgtgtgttcaatttagatattgctcatgtggacaaacaaacaatgaggcagaagtatggagaaataatgggttcaaataaggaagtgcttgactcacttcagggcttggaggctttgcctgaagtagatatcagcacgaatgacatcattctgcaagatcaaaacccttttgttgtgaaactgcacaacagaagtacaaaagagttggcttgttttgagatcattggtcagacaccaaagtcatctggcacacctttctcaggtttcccttcttggctgaaggtttctccggcagtcggtataatttctcccagacaatctgttgaagtgacgttgcaacatggacaaatacgaagtcaagattatcttactgggacttcaggggacagttctggagctgcgcaagagaaggttgcaacgctattggttacagtaaccagagtggactcgacagctgggagacggcacaaaatacaagtacagcaccggtgccgcagggagacgtattcgtcaagaggttataacttggcggatcgattctttgcttgaaccagagaattcagaagtgctgggccaacgatgttgatgtcccagtgtgcatagagatttgcatgttgtagaacaaaaatcctgtgatgagagtggcataaaaacgcggatttggagagttcaaatttattaatagtgtcggaaaga

SEQ ID NO: 131943 - DNA, 978 bp, Zea Mays
gagcgaacagagtggttgtcccctcattcgagatgtaaagtcggccctctcctccttacctcaatgtattgctcgtaagttttataactcagaagaatcatgctaaatagcccaatgatgatacatgtaaactattttcttgtcgtgaaccttgaagccaggatggaaagacctcttcgaattataaatctcaacctaatttgagcttgagtctgatgacatgttttgcaccgcaggattatctcctaaaatctgcatttttattttctaacaatatgttaagtcttgagcacttaaattcatttaatctgaattagttaggtctacacaagatgtgaagtttatacaattccaactaacggtcaacgtcgtagctctgataatcaatgtagttgctgctgtcagttctggaaacgtgctgttgaatgttgttcaggtttgagttcagctctgagatctattggtagttgcattatttatcatcatttaacttgtaaaagctgcaatttcttcagttttgtgcatgtccagacaatatttctaaaaaatgtgtttggtggaattctaatttttgctcccttggctgacagttgctgtgggttaacctaattatggatactttgggtgcccttgcattagcaacagaaccacctacaaaccatcttatggagagacccccagtagggagaagttgatctgattgttcaacacatccgtacaaaacttggtcagcatgacttgtgcaaaatctatccaaatgttcatgttgttcaatcaacttttcagatccgaggaatgcatactcttatccgtgatagggacatcaccacacctgactttgtattttattcagatcgattgatccgtttggtagtggagcatggccttggacatttgccatttacagaaaagcaggttattaccccaacaggtattttgcaagtggcaccttatatcttgtagctgcttagctgtgca

SEQ ID NO: 131944 - DNA, 623 bp, Zea Mays
cctgcagggagaaaggagcaggcattggcaacattcgtccgccaccgccgcttccgtctctagcgatctcgagacctcccgcgccaccaccgacaccgagctccacatcgacgggcttccccattccgagcacagctgatttgctccccatgtcctctttctcaccaccactgtcgtccccaggtcctccgcaagtgagttgaaccggcgtcggtgccggtgcctgggtccctcgcttcagcttccgcttccggctccggcctcactgttgttcctccctgcagtccgcggagttgagcaggttcatcgacaagtctgggactcatgtcatcgacggggtcaagatgggaggcaaggacgtggtgtgtgcgtgaagcatctcaagggctctagccttatgtagagcgacgtgtagccctgctcaaggagctcgccggcgacaggttcttggaggattccacgacaaaatggcaagttctgatattcctcctctgaaatcccaagccccagttgatgacagtaaaaacagtcaaattttaacatctaagagttgttgtacaaaacaatttcccatgcacatgaaaattcaatcaaccaaggataagttgtaaaatcaattaaag

SEQ ID NO: 131945 - DNA, 1117 bp, Zea Mays
tcttcctcgccgcattgacctattcacttcctccataataactagtgctactaggtcccccacggccgaggaggaattagaaaacaaaattaaatctcaagtctagggcggagatgaacgttgcggaggaggaggtgagcatggagagggaggagaagggcggcaatgttcgcgatggcgaggtgaggacgacggcggcggcggcggcagctgtgagcctggagacgctgcggaagcggatggcggacttcgcgacggagcgggactgggagcagttccactcccctaggaacctccttctcgccctggtaggggaggtgggggagctgtctgagatattccaatggaaaggggaggtgcccaaggggctgccaggctgggacgatgccgagaaggagcacttgggcgaggagctcgccgacgtgctcctctatctggtgcgcctgtcggacatgtgcggcgtcgacctcggcaaggctgccctgcgcaagatggagatcaacgcccgcaaatacccagttggacagtgcaagggttcatccaagaagcacactcactacggctccactaacaatgttggcgacagcgacaaagctaatgccgcgaacaaggagcagcatagctgtggtgtctaaaatgactcggagctccttgaatggtaatttggatggtcgggcatgatctaggttacgtgtgctgatgaaacagggatgctctattttggtgggaaagggacaagttgcgtgggttcaagttcccctatatattagatggctaatgaaccaagtgttaaccacaaagcttcgtaggctgtagctcccctatgtctaatgtgtactggggcattctgattctgctggttcagttatgcagcttcatatgatgcgaaagcaaagctgactattgcagtagtactaatgagtactgacagtactttatgatgcaaaagctttctgacagtgcaaagttgtcagtgtagtctttgagctggtgttggactgtcggtgattggtgaatgtcattgacgctctagtccttatttcagtacaatgaacaaagattattatggggcctttatgaacgtcatggtaagtggacccgagtcctgactatggac

SEQ ID NO: 131946 - DNA, 451 bp, Zea Mays
gatgacaaaaatgtatgatgaaataaaatggattcgcatgtatggaaataaaaaaatgtatttaatgatttatttactccataaatataggataactccaacaaccatgcaactagactcgttagaaccagtttatgatatatacttatacaaattatgttacacgttgtaggtatttattcaatgctatacactgcgtaaaaaatctggcatgtggttcactggtggacgcatctccaggttcgagcgtaaaaatcttaagttttgagcataaaacccctcggttataagcgtaataccgagtcaatgtgagagattgatatttctgctggattgtattcacgatcctatttttatggcagttccgaaaaacatgggagtcacatccatggggtttctatttttatgcagatccaaaaattatggcagatcgttggagtttccattgtat

SEQ ID NO: 131947 - DNA, 2468 bp, Zea Mays
ggatttccttccgccttccgacagcggctgtctcggcgacccaaccccagcctgaccccacctcccgccgccgccgccgccgccgccgccgcgccttcgtcgtcaggagcagggtcccggtggctgcgtctctctcccctgcccccctgctccacactcggttcacgcgtcggctcgctaccgcaggccctcgactcgtacgcccgtccccggcggcgatccggccggcaccgtaaccctaggactccgacggagcaggaatgatgagtcatgaacagcaaattgtccctcctagtaagggttctgtgaatggattcccccatagaaaactggataaggagggcagtggaacgcaaagtagaataaatttggtgaggtcatcctctggtggttttactaattcagaaaatggcatcaaactagggcatggaagccattccagggaccggctaatctatgttctaacacaacttattgggcatcatgtggacgtgcatgtgaataacggctctataatctctggaattttccatgcaacaaaccctgacaaagactttggcgtcgtcttaaaaatggctcaggtcataaaggatggttctgccagaggacaaagatatcctgctgttcttgtaaagaaacctgagactatgataataccggcaagggagcttgtacaagtttttgccaaggacatagaacttggcggcgagctgccaaaagttcctggcaatgacaaaaggaaggacttgctgattgattctgctattacccgctatcattatctcgaagagagggaacttgagcgctgggcaccagatggaggagattcagagtgtattgaactggagaagtatgaccggaagggaaataggagctgggaccagtttgaaaccaatgcagcattatttggggtaaagagtactttcaatgaagaaatttataccacaaagcttgagagaggtcctcacatgagagagcttgaaaagcatgcttcgagaatagctagagaaatagagggagaagataccagagatattcaccttgcagaggagagaggcttattcctgggtgatgacctggaccatgatgaagagataaaatattcagcagtgcgtagagacaccgataacagcaagtacaagccaccatttactaaggtcccaagcagtacatgccatgttgattcgtttaacaggacagtcaatattgatccgaatgattcactggcatgttcatcaacaatggacaaagaatcatcatcccacatatttgatgacactgatgcatctgccactatccatacaaatagcgttagccagccaacatctgattatctgtcagatagacccttgtccaatgatgaaaacaggttggacagaaagctgaacaaagagagtaatgaaaacatggataacagaaagttgcaacatgaggataatttacctgatggtgccagacctcttatttcggaagcgttggatgggcgatcctcaagttcacatgcatatgaaccgtctttttctggtcaaggattcaaatctccagaaacacccgattcgacagtgcctgtcaagcatccttctgcgatggaacctgtgacttcctctcaaagacctggcagctcaacatcgtcaacatcagagcgcattggtgcaaactcagccgcgggtgctcctggcttgtcaccaagctcttcaataggatctcttaccgctgaaaaatcgactttgaaccctaatgctaaggaattcaagctaaatcctaatgccaagagtttcactccgtcagcatctctgaggccaccacaccctacatcatctgatgcatcatattactatcctaataacatgccggcgatgccacttggacccggtttgcctgtgggcatggggttcccaccggcatatggcgcccagcctgtcatgtacaatactcaacctggagcatcaccgcacggttacatgcatcctgctggtccacagtatgggcaacaaatgacgattggggggcagactcgtccagtttattattatgcgcctgagatgcaacaatacagaggaagaaacttttagatataccattctgaactgctcttagatggaagtcgctgcaatccccacaagtgggattttgaccagcaaaaaccgctattacaatggaaaaaactggtcctgttgtgttgctcggattggttggacaaaaaagcgcaccgactttgtgttgctcggattgcctggtcaaaatgctcttcattgtcctgtatcagtgttgctcggaagcaggttcactggaatttcatattatttttgtcagactattgatgttgtaaattgaattgcgggtcatctgttcgacccggaaatgacattcataaatgtgtgaggttgccccatgtaacatttatgtgttccttaacgttgttctgatgtaagatttggacgaaatggatcaaattgctgacctatctg

SEQ ID NO: 131948 - DNA, 1127 bp, Zea Mays
atgcacactccctcccacgcgtgcgtggggtgggggcagctggagcacattattagggagcaaaatatattggctgcctacgagattttagagcttttcggtgaatttgtcctggcaaaagtccctactgttgagtatggaaaggagtttgttgttggcgctgtggaattgcgccctgacagcagtgtcaaccgcacaaattcagaattgtttgctcacaaaagtgaagatctctttcatacagataatcgaaaagctctcggtgaatgctccatcaaatggatcaaagctgaagtcatgaaggctattgcccaagagtacaattttgaatgggattcatctaatactgaagcagaattcagcaagaaatttgaagatctactggtagcatttgctaacagattacttattccctgattattggacatgaatgcatatgaaaggtgtttcatgtgatatcttcaaagcaggtgtttgcattactgctttctaatgcttgaggaactgcacgtttatgtttccgtgcttgggcttaacttaggccatttgatgttccagttgaacgaattcagtgtacatgtatgctcatcctaagaaaccattagctcacaagatattgttttctctatctaatattcagctattatgtgtccctatatttctaatccagtttatagatagattctcccccttttttggactggtggatttggtcaaatcttatgtccttaccacaattagcatgtctgtggattgattttggttgttgcacaacacaatgagaactgcaaaaacaatgtggtactgtagaaggtttgttcgttgtttactaagaatcagggactaatgaatttgtaaacatgatgcagttgattaaggaatttagaagagaataagcaccaactaacagcaagaacgtatatgcctccataactccatggagaacgaaatttttagcaaagtctgaaatgagagcaatctagaaatcacttcatttaccatgtgctggtatgcagaatggctcaggatcttcggtccaccaggtccagccacctaccattgagggctcaatgagctcacctgttgcttctgctccaagagataagccgtcagcattaaattcacct

SEQ ID NO: 131949 - DNA, 738 bp, Zea Mays
ttaagcattccttggattcttgcaataaccaacaaattctctgttagtgcgcatgagcagaacacattggtcagctcatctgtggaagcatatcaagcttctcctgagatgaccaaagttgtcgattgcagcggatcagatcagctgctgggaagttgggaaacaaggatactgcaaacggatctgctcatcttcctgtgaactttgcaatgtcactatttcagaggaaggacttcgtcaacttgtacagttgtacatcaagcactcctcaacaatgaagaaccagcatttgaggagcttgctcgtgagagattgttgcaggaactggcgagagagaaagcagcgtccctgcaagtgaagcagaagcccacgaaaacagatggctctgtttacagctgctgctgtaggtgcatatccgggtgcgggccttggaattgtgatggctgtggtaatgggggcagcatcagcccttcgaaagccgtgattcatgtcttcttttgattcttgatttatttcttcattttagtttgtctgaacaaaaagcataagtgtaggcaagaaaaaaaaaatgaaaatttagggcagattccaccatgctgataccgtagtgtcacattttggctgtgtatagaatgcaggctaggccttttttttgctgatctgaagtttgttgtgttactagagtggggcgtggcttggatatgatcaactttacgttttaatttcattagcatatct

SEQ ID NO: 131950 - DNA, 1797 bp, Zea Mays
catccgccagccctcctggccccattcctctctctcccctccctcctctccaccgccaccgcttcatccccttcatctccacctcctacgaggcggccgccgcctccatgctcggccgcgaccgcagggcctcagctctagcagcgttcaatactgtaggctagcggagaggtgggggatggcgaagccgacgccggtggcctcggcagaggaggcggcggcgatgcggcgccggctgaggcgcctggtggccgcggtggcggccgggagcgccgacgccgaggccttcgacgaggctgcagaggcgctcgccaagctcagggacgccgagcttggcccccgcaaggacaggaccggcgacggccgggagaacaagcgcagcacggaggccgccgtgccggagcacttcctttgccccatctcctcagagatcatgagggatcccgtcgtcctcgcctccggccagacgtatgatcgtcgtttcattcaagaatggttaagcgctggaaaccggacatgcccacagactcaacaagtcctttcgaacacaattatcaccccgaaccaccttgtgagaagcatgatctcacagtggtgcacagacaacgggatcactctgccaccggttgagaaccaagatgaagatctggttacaaacaatgagcgggagacatttcgtaaactgtttgagaggatcgtatcgtcgtcgtcagacctgtctgagcagagggaagccattaaagagctcaggctgcggactaagtgcaacagttcactaagagcagcgataggagagagaccggattcaatctcgcagatgatttccgtagcgtccagcccagagctagaaaacagtgcagaagttgtggaggatacggtgacagctatccttaatctctctatccacgagagcaacaagaagatcattggagacgacccactggcagtcccgttcctgatcaaggccttacagtcaggaaccatggaggcccggagcaacgccgccgccgccatcttcagcctatccgcgctggacggcaacaaggcgaggatcggcgagctcggcgcgatgaggccgctggtggagctcctcgagcacggcagcacggcagcgaggaaagacgcggcctcggccatcttcaacctgtgcacgctgcacgagaacaagtcgcgggccaccaagagcggggccgtcgacgtgacgctgagggccgtcgcctgcgccggggacggctctggctccggctcgctggtggacgagtctctggccgtcctcgcgctgctgtcgggcgaccacgaggcggtggaggaggtcggcgagacgggcggcgtggcctccatgctccacgtcgtgaaggacgacccgtgcaagcgcaacaaggagaacgcggcggccgtgctcttcgcggtctgcgtgtacgaccgcaccaggctgcgggaggtcgccgagcacgagaagctgaacgggtccctgggctggctcgcgcggaacggcacgtcgagggcgcggcgcaaggccgccgggatcctcgacaagatgaagaggtccatgcaccacccgcactactcctgctagtgctgccgccgtggctgtgtgtgatcagggggggaataagggtggtgtgtgttgtgttggactgctcgttgctttcgcgctgtatatatatatatatatatatatatatatatttcagcctgcgtatatagctctatactcttggtctctgtggtttggtacatatatgagggtacattttttttccgtctcgcggagtaagtggtggtggtttccccctc

SEQ ID NO: 131951 - DNA, 744 bp, Zea Mays
aacccaccagcacacccatccgccagccctcctggccccattcctctctctcccctccctcctctccaccgccaccgcttcatccccttcatctccacctcctacgaggcggccgccgcctccatgctcggccgcgaccgcagggcctcagctctagcagcgttcaatactgtaggctagcggagaggtgggggatggcgaagccgacgccggtggcctcggcagaggaggcggcggcgatgcggcgccggctgaggcgcctggtggccgcggtggcggccgggagcgccgacgccgaggccttcgacgaggctgcagaggcgctcgccaagctcagggacgccgagcttggcccccgcaaggacaggaccggcgacggccgggagaacaagcgcagcacggaggccgccgtgccggagcacttcctttgccccatctcctcagagatcatgagggatcccgtcgtcctcgcctccggccaggtagtccacaaatcataggcatagagggtataatagcaaagtgtcaacacttgggtggcgagattgcaaatatttccgccacatcgccttcccttgccttctccgtggcttggtccttgctttttgctcgctgggtttttttattttaccagcgtgaaattgccgtttctcagcctgttggtaactgcgacgtttgtggaagcacaagctgagttttagcctgcctattagtacgattttttaagaacataattgaagtgcg

SEQ ID NO: 131952 - DNA, 1620 bp, Zea Mays
aactatctccatcttctctcttcactccgaggatcggagtgaaaggagcactagctactggcagtatggtgagtctgtgtctgcaggcgaagaggcctcgggtgggggcggcgccacgggttgtggcgaaccagatgggggcgttcgaggtgctgccccaggagctgatcctctccgtgctcaccgccctgtcgtcggccgcggacaagcccgccgacctcttcaacgtcatgcttgtgtgccaggagttctgcaggctggtgactaacccgcaggtgatccgggcggcgtcggcggcgtgcgtgtccgtgctcccgcgcaggtggtgcgcagccgccgaccgtttcctccgcttctgcggcgacaacggcaacgcggacgccaactttttcctcggcatggtgcgtcgtcccggcccgtgtgtctcattcccgtctcccgagtactataagtggtcctgcgtgcttgtctttagtagtctactacgcggacaacgaacgcacatcacataaactgaagtgaatacatactgatcgattgatggatgcatccatgtccatcgatcggggatctttcggcttctctctgtctgcacgcacccgatcgacacacacagatccagttctactgcttggggctccagacccatgggtggtcccgcatgctgatggcggtgcggtcgggccacgcgcacgccgccttcgccgcggccgtcgtctactacaacggcagctgcatcgaccacaaccagaggcagccgctggcggccgcgaacctgttcgcgctggcggcgtgccgcggccacatgggcgcgctgcgcgacctggccttctgcgtcagcaacgggctgggcgtgcggcaggacgccgaggccggccgccgcctcaccttcacggccaacctgcgggagttccgcgccacgtacccgaccgcggcggagcaggcggtggcgtacgcccacgtggtcggcaaccccgggtgcctcaccagcgagctcggctgcttcaccaccgtgccggccagcctgcgggggtgggcgcacccggccaaccggttcctgtgcgactggttctcggcgaacccgctgccgttcccgccgcggcgcctgctgctcatgtgctccatgcccacctgcggccgcccggagacgcggggcctcgagtaccgccgctgccccgtctgcggcatcgcgcgctactgctcccgctcctgccagtcgctgcactggaggatgggccacacgcgggagtgcgtccccacgcaccagtggctcatggaagccattgccaaccacgccgtcgtcaatgccgacgacggcgccaatgctgctgctatgcccgctgtcaacaataatagcgccactcaccacaacaatctcggtggtgctgctgctgatgctcctgctcctaagtagacatgcgtcgacgagccggcccgctagctattcaccagcgctagctactacacctctcctatcctatgttctcagttaactttctgtcagacagtagttttgttttccttcgtgtaatcgcctagatatatatatttccatttctaaaatatatacctgtgagttttctatatatgctactagttttagtttattatgcttggaca

SEQ ID NO: 131953 - DNA, 1394 bp, Zea Mays
aactatctccatcttctctcttcactccgaggatcggagtgaaaggagcactagctactggcagtatggtgagtctgtgtctgcaggcgaagaggcctcgggtgggggcggcgccacgggttgtggcgaaccagatgggggcgttcgaggtgctgccccaggagctgatcctctccgtgctcaccgccctgtcgtcggccgcggacaagcccgccgacctcttcaacgtcatgcttgtgtgccaggagttctgcaggctggtgactaacccgcaggtgatccgggcggcgtcggcggcgtgcgtgtccgtgctcccgcgcaggtggtgcgcagccgccgaccgtttcctccgcttctgcggcgacaacggcaacgcggacgccaactttttcctcggcatgatccagttctactgcttggggctccagacccatgggtggtcccgcatgctgatggcggtgcggtcgggccacgcgcacgccgccttcgccgcggccgtcgtctactacaacggcagctgcatcgaccacaaccagaggcagccgctggcggccgcgaacctgttcgcgctggcggcgtgccgcggccacatgggcgcgctgcgcgacctggccttctgcgtcagcaacgggctgggcgtgcggcaggacgccgaggccggccgccgcctcaccttcacggccaacctgcgggagttccgcgccacgtacccgaccgcggcggagcaggcggtggcgtacgcccacgtggtcggcaaccccgggtgcctcaccagcgagctcggctgcttcaccaccgtgccggccagcctgcgggggtgggcgcacccggccaaccggttcctgtgcgactggttctcggcgaacccgctgccgttcccgccgcggcgcctgctgctcatgtgctccatgcccacctgcggccgcccggagacgcggggcctcgagtaccgccgctgccccgtctgcggcatcgcgcgctactgctcccgctcctgccagtcgctgcactggaggatgggccacacgcgggagtgcgtccccacgcaccagtggctcatggaagccattgccaaccacgccgtcgtcaatgccgacgacggcgccaatgctgctgctatgcccgctgtcaacaataatagcgccactcaccacaacaatctcggtggtgctgctgctgatgctcctgctcctaagtagacatgcgtcgacgagccggcccgctagctattcaccagcgctagctactacacctctcctatcctatgttctcagttaactttctgtcagacagtagttttgttttccttcgtgtaatcgcctagatatatatatttccatttctaaaatatatacctgtgagttttctatatatgctactagttttagtttatt

SEQ ID NO: 131954 - DNA, 2506 bp, Zea Mays
aagcttaagccatctttcgctgatgcatatcttaatcaagggaatgtttataaggctttgggaatgcctcaagatgccattatgtgttatcaacgtgcactgcaggcacgtcctgactatgctatggcttatggtaatcttgctactatttactatgagcaaggccagcttgatatggcaattcgttgttacaatcaagctatagtctacgacccacagtttattgaagcatacaacaacatgggcaacgcacttaaagatgctggaagagtagaagaagcaatcaactgctacagatcctgccttgcactgcaagcaaaccacccgcaagcccttactaatttaggaaacatatacatggagtggaacatgataagcgctgctacttcattttacaaagcagctatatctgtgacatctggattatcttccccacttaacaacttggctgtgatatacaagcaacagggaaactatgctgatgctatcacatgttacactgaagtactccgtatagatcctacagcagctgatgcactagttaatagagggaacacattcaaagagattggcagagttaatgaagcaattcaggattatgttcaggcagcaacaatcaggccaaacatgccagaagcccatgccaacttggcctcagcatacaaggacagtgggcatgtagaaacggctataattagctacaagcaggctctccggctgcgtcctgattttcctgaggcaacctgtaatctcctgcatactctacagtgtgtctgtgactgggaaaacagagatggcatgtttcgagatgttgaagaaattattagaaggcaaataaagatgtcagtacttccaagtgttcaacctttccatgccattgcttatcctattgatccattgcttgctttggaaataagccgtaaatatgcggcccactgttccttgattgcctctcgttttgggctgccgccttttgtgcatccacctcctgttcctgtaaaagcagagggtaaacactgccgactgaaagtaggatatgtgagtagtgattttggtaatcaccccctttcccatctcatgggatcagtatttggaatgcatgatcgtgccaatatcgaggtcttttgctatgcactcagtcaaaacgatggtactgagtggaggcagcgtattcagtctgaggcagaacattttgtcgatgtttctgccatgacttccgataatatcgccaagcttatcaatcaagacaaaatacaaattttgataaatcttaatggctacacaaagggtgccaggaacgaaatttttgcaatgcagccagcacctatccaagtttcgtacatggggttccctggaacaacgggtgctgcatacatagattacttggtcacagatgagtttgtttctccatctagctatgcacatatatattcagaaaagctcgtccatttgcctcattgctattttgtcaatgactacaagcagaaaaatcgagactgtctcactccagtatgtccacacaaaagatctgattatggattacctgaggataaatttatttttgcttgcttcaatcagctttacaaaatggaccctgagatatttgacacatggtgcaatattctcaaacgtgttcccaacagcgcattatggcttttaagattcccggcagctggtgaaactagagtgagagcatatgctgctgccagaggagtaagatcagatcaaattgtattcacagacgttgccatgaaaaatgagcatatacgacgcagtgccctggcagaccttttcctggacactcccctctgcaatgcacacacaacaggcactgacatactgtgggctggtctgccaatgatcacccttccactagagaaaatggcaaccagagtagctggttccctctgcgtagctactgggcttggggaggagatgattgttagcagcatgaagaagtatgaagatagagcagtagaactagcgctgaatccggtgaagcttcaagcgctgactaacaagctcaaggaagttcgtatgacctgcccgttgtttgatacagctcgatgggtgcgcaaccttgaaagggcatactacaagatgtggaacctttactgctccagtcgccacccggagccattcaaggtggtagaggatgacaatgagtccccatttgaccgctaacgagatctcatcagcagcccggctctgtaaataaggcgagagttgtagaatatttagcatcgtgaccgctgttgctccaggtgcttgtttgccgccccctttcctgccgtgcacatcacctctgtggaggctaacttcgtagtatgtatgtactacactgcaaaagaagtcctagggttagcctattgttatcactatttagtttgctatattgtatcgcggtcgtggtttctaaaataaactgcaacctttaggagtgttgatgtgaaatctcattcttaatagcttctgtccaaaaatgagcaaaaaggacttgagtgtg

SEQ ID NO: 131955 - DNA, 124 bp, Zea Mays
tgagattttgccggggaatgggcccctgaggcctcgttcggctgtttgggaattttttccattctggtttatttcttcacatggattgggtgaatccaaacctttcacccaattctttgtggaa

SEQ ID NO: 131956 - DNA, 137 bp, Zea Mays
ttttttttattttggtcaccaaactttttgtggtatgttcctacactatgtagacctacatgtaccattttgggacaattataacagtgttttcaatagctagtagatttagttcgagcactcggcaaagaaccaag

SEQ ID NO: 131957 - DNA, 663 bp, Zea Mays
cacgcctcaccagtcaccacacctctcgtctcgtctcatcatccagaaacgaaccatttaggcaggcaacacagcatgtcgagggccctcctgatggtagcagccctggccgccgtccacgggctgacgctcaccggcgtcgacgcgaccgtggtggcgacatgcctggcggcgtccaacagcgacggacgcgtcaactacgacttctgcgtgtcggagctgaacaagcatcgcgacagcccgggcgccgacaccgcgggcctggccaaggtggcggccaacgtcggcctgaacagcgccggcggcgcggtgaacgagatcgaggccctgctcgccgcgaagccgccgccgccggacgcccggaccagcgccgcgctgcggctgtgcgagcggctctactacgacatggagctcgccttcgcgggggcctacgacgagatcaacgcgctcaactacactgcggggaagcagatggccgccgacgccgactcgctggtgcgccggtgcaccggcggcttcgcccaggctgggctcctgccgccagagcccgtcgcgcggcgaggcgcgtacgccatgcagatcgccatcgtgtgcacggccattaccaacctcatcatcagtccgtgatttaagatatacgtcatatgatgcgtccagaatata

SEQ ID NO: 131958 - DNA, 1944 bp, Zea Mays
cacaaaccaagaacctaccaggccaccaccacctcctcattcgcctcgacttagcagggcaagagtcctagaaggacaggcgccatgtcttccccgaggctttcgtccaaagaggaggagttgctccgctccgtggagagggcgatagagaggagctacgcggccaagcaagccaccaatgtaccgctgtggaggcggctgctcgggaatgcgtccaagaagagcaagaatgactccgctgccttgacgaccgctcccccgtcgcctggagttctggtaggcacgcagcgagaagagcaggagcgcgctaaggagggtgccgacgtcgcgagttccgcgcccaggcatccgtcggaagcaggtgccgagggagacgacgtgcagcccgcggctcaggacaggtctgtccatgcggcgaccatgatgaagtccgcgttggcgagaatccagggaggccagaacagcggggcgtttgttgatatggagcttgctatgaagggcctcatggatgtctccttcaaagggagggagagagtccccgtgttgcctgccgagttcaggtccaaatggcctcatggtaatatatcacaactggagagagatattattgctgatccgctcatcctgacgtctggacataccattgacagattctcctaccagtggtcctctctgggggctgcaaaacgtttcctcacggttccaaatcacctcctccgtgacatcataacagcgtggtgccttgaccacgaaattcctcttccatcctctacgtctacttcagttgccagtgaagaggctcctccgcctacagaggaagagatgcagctgctccttgagaagctctccatgcattcggcagcgcagaaggaggctctgcacaggatccagcttctatcaacatcctccaagggcgtccatccctgccttgaccggtggcaggatctgcttcctaagctgatgtgtctacacaaggagtggaggtcaacatgggccaggcaatgggaggaggagaggctaacagtaatgctgaacctgtccctccacagggtgaaccgggacatccttgctaggcaagagcgactcccacacgcgttgaaagaaaccagtgcaagggcagggaggcacggatacccgttaacagtaatgctcaaggtatcttctctagtcaccatcctgtcagagtcagagtacagcactttcaggagaaagtttgttgagatagatggaatcgaggagcttcatgtgctgctctgcaacagggattgtctggtaaggaatgaggccagcgctgcaatcctcgcgctctgcagagatgatgctgcagcactgacgcgtgttcccgatgcctcattggtggagtgcctttcagatggcatggtgaccgatgagtgcttgcttctgcttgagtgtacttcggatcgtgaatctgttcgagatcggatagcctttagtgtcgagcttctgatggaagccatcatggccactgagaatggacaggggtatcttagctccaggggcactcgaactgcacttgccctgatttacaattgcattaaggaggctgatggcaggggcaggctgaggacgacagtgatattgcagggttttgttgaggctttgagaatcttggagaggaaagaaacgccactaaggacagtctttcagattgaggagattcacagcatagtctcacaagcccttgcggaattaactcagtggaacattaggagctagttgccctgagatcgatagtgcaatcagaactcttttcagttcggctagctttgctccaatgtggtagacgatcatgcagtgctgggagacaggtcagcactaatgcaacagtttttttttttttgcgtaggttggaatactgcagacacggtgattataacagaatacacatcattagaaaatttgtccgatacaaaatatcacaat

SEQ ID NO: 131959 - DNA, 1877 bp, Zea Mays
cactatggtgaaatggtgcatgattctgaagtaaacgatattgttactccctataggacaagttataaagggatgggatttgggcatcaagaccatgaaaaaaggcgaaaatgctgtgttcaccatcccaccagagcttgcatatggtgaagatggctcaccaccagtcatccctccaaatgccacactgcaatttgatgttgagcttctgtcatgggtgtgtatcaaggacatttccaaggatggaggcatcttaaaaaaggtagtagccaagggcgataagtgggagaaccccagagatcctgatgaagttgttgttaagtatgaagcaaggcttgaggatggaacagttgtatcgaaatctgatggtgttgagttcactgtgagagatggcgtattctgccctgccatatcaaaggctgtcaagactatgaagaaaaacgagaaggcccacctcactgtcatgccacaatatggctttggtgtgaaaggtagacaggcatctggagaagaagcttctgtgcctcctaacgcgacattgcacattgatcttcaagtggtgtcctggaggacagtcactgagttaggcagtgacaaaaagatccttaagaagatccttaaggagggcgaaggctatgattgtcccaatgattgtgcagttgtccgagtgaaacttattgggaagttggaggatggtaccttgtttgtcaagaaaggtcatgatggtgaggagccatttgagttcaagactgatgaggatcaagtgattgaagggcttgacaaagcagtactcagcatgaagaaaggagaagtatccttggtcactattcctccacatcatgcctttggaactaatgaaacaactaaagatctggctacagttccaccaaactcatatgtttactacgaaatggagcttgtctcatttgataaggagaaagattcatgggacttgaagaacgttgctgagaagattgaagcagctgctaagaagaaagaagaagggaatgtgtggtttaaaattggcaagtatgccagggcttctaagagatatgaaaaggctttgagctttgtcgagtacgatagctccttcactgaagaagagaagcagctatcgaaaccacttcagataagctgcaagctcaacaatgccgcatgtaaactaagacttaatgattacaaggaagcaaaggaactgtgtaccgaggtcctggaatctgacaacacaaacgtgaaggccttgtacagaagggcacaggcacacatgcatcttgttgatcttgatttggcagaggcagatatcaagaaagctctagaaatagatcctgacaacagggatgtgaagatggggtacaagaggctaaaggagaaggtcaaggagtacaaaagaagggatgccaaattatatggcaacatgatttccaagttgagcaagcttgaagacacggaagataatggccaaatgagtcaggcagtaaacaagaagcgtgagctcttatggccactggcggaaatgcttaggagattcttcactgccgatggtagcaagggttccacgctgtggcttgtgctgaggctattgatcccggtaatagtattggttgcagtttgtgtgggttacttcatgcacagcagtgttgaagagatagactgcatcaactgttagttgagcagggtatctgtgctcaccttctgtcctttttcaggtgagtgtttatcgttgtatagatctgatgagtactacacgtatttgttggttgtgtgggttgaggacttgagggcgaagtattcacgtgtactgtactgttaaacttgacttgtctaatagttgcttccactgtctcaaaaagaaagataatcttgttttttcagttgtc

SEQ ID NO: 131960 - DNA, 663 bp, Zea Mays
atgaagtgtgctagagtaccagaagtggtttcaaaggagatgcacacctatctgagaaggaacatgagggttatgattactgctgatggtgatgaaggtgaagaggaaggggagcagattgatgtatgtcccctaccaagttctgggacaaaaaccaagcaagcaaaaaagcaaattgctcaagcttccatgtcttcatttgttgtagcagctcctataaaaccaaatacacagaaggcaagcaaatcaatccaaacaaaaaagaggaaccgactagaacaccagaggcttaataaattggtctatgccagttacaacaggaagatggaaaataggtttcaaacactaagggagctgggatccaaaggaaaaagacgcaacccactgatgcttgaagagttcatgtgggaaaatgaatgggttgaagaaaatgaagatgatggtgctggttcgtcttctcagcctcaacgaacatatgttaggacaaggaagcattctagaaatacagcagctcaagatattggagaagaggatagtgatgatcaagaagatggtgttgctgcagcacaagcagaacaacaacaaacccaagaagcaactggatacatggacgaagatggtgctgctgctgatgcattttgtttggatgctgatctgctctag

SEQ ID NO: 131961 - DNA, 102 bp, Zea Mays
cccgatcaaaccctaataattctcatggaacaaaaaccatcccaatcaagttctaaaactcatgacacaaagaaagaactgagcacacaaaaaggaatcgaa

SEQ ID NO: 131962 - DNA, 5721 bp, Zea Mays
atgcaggaggagctagggcaaaggatgcatgtacctcatggtatcaatctgtgtttctcaacttcttccgagctctttcaggtggaatcttccattgagctgggtactgcagaagtgaaccctgtaccatctgaaaagttatctgctaactcacaagctgttagagatgatgctggagcagttgaaggtattgacatgaatggaaaacctgtccaaaaacctaagaggaaaaaacataggccaaaggtcattaaagaaggacaatcagcaaagttgcagaagcctaaaactccaaagcctcccaaagaaaatgggaatcagcctactggaaagagaaagtatgtcaggaagaagggactaagcacaccagccaaacaaattccatcagaaggtgctgatacacacactagagctaaaccaggaatagcccaaagatgtttggactttgatgtggaggaccaacatggacatttggatctggtatcacaaacccaggaaacggagatacagactggtcctggggacacacagccatcaatatctggagttgaaagaagtaatgcccaggtatcatgccattggggttggggtggtacaagcagttctattatttcagctgacccaatagttgatatacaaggattacaggcagactgcatacctaaaagagtcaattttgatttgaacaattctatggcaagtcagatgccaaccaattattctagtcgaatggacagctctggacaatttttccagtttggtttaggagaaaaagttcaaacaaatcagttactggattataattgtaatctgccagctagacgtgtctctcatctcagcagctcggtcgatcatatgcgacaccccttagccaattttgaccaatacataagcacatctcaagtttgtacagaaaattcacgcagacattatcagatgcctagtagttctagaatttcagaaaataggacagcagcttctcagtatactgaaagggtgtcaatggggggcaatttcaatcccggagcttgtataggagaaggcacggtaatcaaacaaatggcccaatgttatagacttccagaaagtccacttgtacctcccaaacataatgaaagggatgtgatgaatggaaatctaaacgagttttctgtgtataatgattacttgaatttttctagcaatagtaactaccaaactggagcagcttttggttttcatgattctccagtctattcagatgttcttgcaatgggtaaaaaaagagaacacaatgctatcagtggtcaccagatttcttttgacatcgactttgttaactcaaatagtacaaggaagttctgtattgatgaccttctttccactagctctcaaacatcttattatcctgaagcatgcaaaaggatgagaccagagaatcatagcaatcagctcaatgtaactacgggaaagctttcttcttcatcagcattttctggtagtttgaatacaaataacgtttcaactataaaccctggaattggtaccttggctgatatacaaaggttgatggcccttgagaaatcacaagcttcacaacaaatgattgactttattacgtcgcaaaacaacatggccggtgaaagtactgaacttgctcagcaaaataattctgacaaaggatttgttgctttacataataaaaagttccaaagcctcactgcgcagaacataccattgcctgacagtactgtgaaccaatcgggagaaagtaatatcttgaggaatggaatacatcaaacacaaccttgggaaattacatctaggtcgcatcactctagcgacaattttgctttgccaaataaatggtctggttacttgacagcagggaacacacagttatcaagcatcacagtaaacccatccacagaaaactatattcaaagtaatgctatttatcaatatcaatgtttagaaaacgttgtggctaaggtgccagtattgtctggaacacacaatacttccagtcaggagggccataaccacagcactgctgctactaatgagcatatcagaactacaagtgaggaagttgttagatcctttacccaacgagcaagtgaaccaaccacacatgggaactacaatctcaactcttctagagtaactgcagaagcaaactccactgagaagccaagaaaaaggggccgtccaagaaaagtagtaaaacccaatggggagccaaaagaaagaggtactaaagggaaacaaaatgttagtcatgaaaaacctacatcgcaaaaaggttcacatactgacattttgaaaactaatggtatttcttatgcttctgaaccttccactggaattactcctaggatggctattgtggagtcgaaaagctctgatcaagataaggaaattcatggaggtgtcattcctcaagctacagcaatatcagttgatcttttagatggcataattcaaaagattaagctcttaagcataagcagaccagacaatgttgtggcagagataccaaaagatgctcttgttccttatgaaggtgaatttggtgcactggttgcatttgaggggaagacaaagaaaaaccgttctcgggccaaagtgaacatcgatccagtcaccactatgatgtggaacttattaatgggaccagatatgggtgatggtgctgaagggttagacaaggataaagagaagtggcttgatgaagaaagaaaagtgttcagaggacgtgttgattcattcattgctcgtatgcatctagttcagggggacagacgtttctctcgatggaaaggatcagtcgtggactcagtcgtgggtgtatttcttacccagaatgtttcggatcatctttctagttctgctttcatggcggttgctgccaaatttcctgctaagccagaggtccctgaaaaacctgtggctgagatgtctcatactcctgaacagaaggatagttgctcttgctctggactgtttggtgattctatcaaattgcagggcaagatgttcattgaagagataagtgatgttagatcattaattactacagaagataatgaagaaagtaatagtaatgaattgattggaagctctgccgggtatggagtaaaccatgcaactggaggctgccatgtttcttataggaagtcactaactgaatcccatgaaaatgggctttcaggatctgtttttccaactaccggcttttcaagtgtagtagaaactgaagatggctcattagaggatgttatttcttctcaaaattctgctgtttcttcccagaattccccagattacctttttcacagaacggatccaataggttctagttcgttgcaaaatttcaccgaagagggctatatcatgagaaatatatccaacgggactggcagctcaactgactgctcagggtttctgccaattcaagatccaaaaggcacgcttggattgtcagaatattatggacataatcctcttctagtttcaggtgtgaacaagggtgtgttgcttgatctaaacagatcatatcagccattacatacttctatgccctatgttcagaatagcgagtctgatttcacaggtgtgtcatgtttcagccatatggataaatcattccacacaggccctaatagagtgaatctttctagtgttacacaatctgaggccagtctttaccctactgatcctttgcaacaagacgagttttcaccagtaattaaacaaaacttccaaccattatatagttcagacaaagtgtcattattcaaggagcactgttcctatggaaatgatttttcgaggaacaaaactgaagctgctattatggaaccacttgtctactcaaatcctcaagagctgtacactacctcaacagagcaaatgggtgttgaacaatttcaatcaggatgtggccaacaggacaatgatgtgagagttcagacaacatcatatgaaaggcatcagtcttcaaccttgtgtggaaaccagaactctcagttagagatcttgcaaggagttgcttcaggctcaacacagaagttcattgatactcaaaagagtccgtcagaagttcaacaaaacggatcaaaagctaagaaggtacggggtcgacctaaaacgaaaacttatgactgggacagtttacgaaaagaagtgttttctaatggtggggataaacaaagaaataatgatgcaagggatactgttgattgggaggcagttaggcaagcagaagtccgagaaatatctgaaactatcagagagagaggaatgaataacatgctagcagaacgaataaaggaattcctgaaccgattggtgacagaccatggaggtattgatcttgaatggctaagagatgttccaccggacaaagcaaaggacttccttctaagcattagagggcttggactcaaaagtgttgagtgcgttcgtctcttgacgctacatcatatggcttttccagtggacacaaatgttggtcggatatgtgtgaggcttggatgggtgccgcttcaaccattgccagagtctcttcagttgcacctattggaaatgtatgagcttcactaccaaatgattacttttggaaaggttttctgcacaaaaagtaagcctaattgcaattcatgtccattgagagctgaatgtaagcactttgctagtgcatttgcaagtgctaggcttgctcttcccgcacctgaagaaaaacgtttggctacatcggaggatccaaatgttgtagagttttgtcaccaaacatacataaattcaggggctgttggcgaacttgagtggagtgcgaactatcctaagcatgctgtttgtggtaacctgcagccgttcattgaggaaccactgagcccagaacctgaacctgaaaatgtagaggcgaaggacggtgcaatagaggatttctttaatgaagaccctgatgaaattcctactattaatcttaatattgaggagtttacacagaacttgaagaactatatgcaagcaaaccatgttgagattgagtatgctgacatgtcaaaggcattggttgccatcacccctgaagctgcttccattccaactccaaagctcaagaatgtcagtcgtcttaggacagaacaccaagtttatgaactgccagattcacaccctcttctggaaggatttgaacagagagaaccagatgatccctgtccatatcttctttccatatggaccccaggtgaaactgcacaatcaaccaatgcgcccaagacattctgtgattcaggggagactggtcaactatgtggaagtttaacatgctttagttgcaacagtttacgagaaatgcaggctcagaaagtcagaggaacactcttgataccatgccggacagcaatgagaggaagcttcccacttaatgggacatattttcaagttaatgaggtatttgctgaccattgttcaagccaaaatccaattgatgtcccacgaagttggatatgggacctcccaagacgaactgtttactttggaacctcagttcctacaatatttagaggtttaacgactgaagagatacaacaatgcttttggagaggattcgtttgtgtgaggggctttgataggacagtaagggcaccaaggcccctttatgcaaggttgcattttcctgccagcaaggttgttagaggcaaaaagcctggagcggcaagcgtcgaagaataa

SEQ ID NO: 131963 - DNA, 1373 bp, Zea Mays
ggtgatacaatttacttttattggatctactaggagaatttcatataggacttgtaaaatgtttggttgtttgtgtctttgtttccctcattatgatctgctaaaacaatgagatattctgttcttgtagacacttatgctaaaatgcctctatgtttctgactctgaacatgtccagagtgcatcaccttgtctattcagtataaagggacaatgcagttcttaccctttcgttgtgttactcaggtggagcatcttcaaacaagaacaaccgggtacggttcctcaaatcctctgtttggtggagcatcttcaaacaagaacaaccggatctttttcttccttcatgccattccagggatgcttctagctctggtactcttttttgataacaggaagttcaaggatgtgaattttccaccagctatgtctcccccaaaacgggtatggtattggcttggtagctgcactagatgctgggatcttgtcttagtctcctcaacagccttactgtacctggtgatgtccatgtcaactgggctagccaacatgagtttgaaacataacagcattctcactgggcttctgtccttcatgatggacgatgcactgacaactggaagcatcaagacatcagatgcagaaaagaggcgtttagcaaaagcttcccttgcctacaattgtgagagcaaaaactgtccgcacttcaggaaacttttcccagagtatgttgagaagtacaatcaacagctacaattggagaacactgctgcagagccggtgcctcaggagaatcctgcacctgctccatcccctgctgcccagcaagccccgaccgtggccaatagggcacaaccactggcggaggcgcgccgtgacaagaaccagaagaaggcggtgcccttctggatggtgctgagtgcaaagacaaacctgaacgtcgagcaggttttcttttctatagcaagggatatcaaacagagactttcagagactgattccaagcctgaggatcgaactatcaagatcaaggctgaaggggaagctgatgcagcagaggcgcagaaatcagcttgctgcgactcttgaacggttgtggccgcaggatagtttcataattttttttctttgccagcaagtctctccttgtgcttgagctatcacaattgctgtggtttggacaagtgggtgttacgtcagaactaattacttgctatattgcggaaaccctgctcttgataacgacgatcgcatatgcaactgggcgggtgggtggtttgatctcgtgatggctactgctatggctgtagagtcatagagatggcattggagttgtatggtgcatgttatttaaaaaacatgaggaagtacta

SEQ ID NO: 131964 - DNA, 1273 bp, Zea Mays
aagcagcatgactgcatcagagtgatttgagtcttttttctgtgtagtctataatttttcaactttgctcttgcttttgcgtataatccattcataccactgatgacttgaatttaatcacctagatctttttcttccttcatgccattccagggatgcttctagctctggtactcttttttgataacaggaagttcaaggatgtgaattttccaccagctatgtctcccccaaaacggtgggatcatgtgtggtatgctctaacagggtatggtattggcttggtagctgcactagatgctgggatcttgtcttagtctcctcaacagccttactgtacctgcatggagccatggtatagtgatagtgtgaccagttgccccccctcgaaatccactcctttctcatctatatttgcttcaggtgatgtccatgtcaactgggctagccaacatgagtttgaaacataacagtttgatgaggaagtactactactattacaattgatgcttcagttctacgacttctttcaaaccaagcgtccacacatatcttgagcattctcactgggcttctgtccttcatgatggacgatgcactgacaactggaagcatcaagacatcagatgcagaaaagaggcgtttagcaaaagcttcccttgcctacaattgtgagagcaaaaactgtccgcacttcaggaaacttttcccagagtatgttgagaagtacaatcaacagctacaattggagaacactgctgcagagccggtgcctcaggagaatcctgcacctgctccatcccctgctgcccagcaagccccgaccgtggccaatagggcacaaccactggcggaggcgcgccgtgacaagaaccagaagaaggcggtgcccttctggatggtgctggtcatgttttcagttttcggggctgtgatggcgttgcccctaatgcaactttgacaataataaagacaataagaacgtgtgatgctagggccgtaattttgtatagttttctattggtttgtctgagtgactcagttggtcccctagactacctaccacctcggagtcgtattgatgaacctgtgatggtatatctgaagaacttttgttctcagttctcactcttgagttgcagcgccagaaggtcgttcatttttgctttctgtttccgaaatcgtatacttaattttttttgttgcctcccagttcgtctttgtgatgtgtgctgacttcaaggttgagttcgcattttcacatcctctttcc

SEQ ID NO: 131965 - DNA, 2004 bp, Zea Mays
aaggaaactgacagacaaagggcgtgttcggctggctacaagccgacactgttgcagctgtttggactgctgcagctgcaatccatagagagaaaaatactgtagaagccgcagccgcagccggattgcagccgcagcaagccgcagcgacaagctgaaaataattatggtgacaaatccaagcccacgcggccgaggagactcccccctccacttgggagttgggatccaccaaccttcacccactcgcagcaccagtcatggaggtcgccggcgcccgcgagcccggtagcggaggaggaggaggtggcggcggtggcggaccagccccgttcctgctgaagacgtacgagatggtggacgacccgtcgagcgacgcggtggtgtcatggagcgacgcatccgacgggagcttcgtcgtctggaaccagcccgagttcgccgcgcggatgctgcctacctacttcaagcacaacaacttctccagcttcatccgccagctcaacacatacggttttcgcaaaatagacccagagcgctgggaatttgctaatgagtactttgtcaagggacagaagcacctgctgaagaatatccacaggaggaaacccatccacagccatagccatcagccaggtgccctgcctgacaatgagcgtgcgttatttgaggatgagattgacaggctttcacgagagaaagctgccctccaggctgacctctggaaattcaatcagcagcagtcaggtgctgtgaaccagttagaagatcttgagcggcgagtgcttgacatggagcagcgacagacgaagatgctcagcttcttgcagcaggctaggaagaatcctcagtttgtcaggaagctcgttaagatggcagaggaatccccaatctttgcggacgcgtttcacaagaagcgaaggctacctgggcttgaatgcatcacggatgctaccgaaactgccactagctttttcgatgaccatagcagtagttccaggcaagaaatgggtaaccttctgaatcagcacttctctgacaagctgaagcttggactctgtcctgcaatggcggaaagcaacctcatcaccctgagcacccaaagctcacatgaagataacgggagccctcttgggaagcatccagattacgagagaacaggcatggagtgccttccactggtgccacagatgatggagctctctgacactggaacatccatctgtccctcgaagagtgtgagctttacaacagctgcaaatgacgacgggttcttgccatgccacctcaacctcagccttgcatcatgtccaatggatgtggtcagaagccaaatccccgatgcaaacgtgaacactgtggatgagaaggatggcccaccggaggtgaccacacccaccatggagaaggacgacggcatgcctgacagatgccatgatgctacccagaaccagaaggaggcttcaggtcacgctggggccgcagcagatgcaacgggtaggccgcatcggggcagccaagctccccctgaagaacatacaggtccccaggtggtggtgaacgacaagttctgggagcagttccttaccgagaggccgggctgccccgaagccgaggaagcaagcttcaccctgaggagggatccagaccacacgcatgcgtacgacgagggcactggaagtgacacgagagatatggggcagctgaaactctgaccttgagtttttctagcatgaccttgagtttttgctggaaattggaatggcacgaaggtctgtctaggattgtgtgtaaacagcatcgcaagaatgccctgtacatattatcccagtatacataccggagacagagcaatgcgactacggaattgctgttctgttgtggttaatatgtatatggttatacttcgttacagcaaagcgaccagtttacgcaagccgcgttgacagaattcgatgtaacaaagaaaattccttaaaattctaggaagaggtgtataaagta

SEQ ID NO: 131966 - DNA, 2036 bp, Zea Mays
aaggaaactgacagacaaagggcgtgttcggctggctacaagccgacactgttgcagctgtttggactgctgcagctgcaatccatagagagaaaaatactgtagaagccgcagccgcagccggattgcagccgcagcaagccgcagcgacaagctgaaaataattatggtgacaaatccaagcccacgcggccgaggagactcccccctccacttgggagttgggatccaccaaccttcacccactcgcagcaggcagcaggcggcagcagcagcacgcgctgccgcagcaccagtcatggaggtcgccggcgcccgcgagcccggtagcggaggaggaggaggtggcggcggtggcggaccagccccgttcctgctgaagacgtacgagatggtggacgacccgtcgagcgacgcggtggtgtcatggagcgacgcatccgacgggagcttcgtcgtctggaaccagcccgagttcgccgcgcggatgctgcctacctacttcaagcacaacaacttctccagcttcatccgccagctcaacacatacggttttcgcaaaatagacccagagcgctgggaatttgctaatgagtactttgtcaagggacagaagcacctgctgaagaatatccacaggaggaaacccatccacagccatagccatcagccaggtgccctgcctgacaatgagcgtgcgttatttgaggatgagattgacaggctttcacgagagaaagctgccctccaggctgacctctggaaattcaatcagcagcagtcaggtgctgtgaaccagttagaagatcttgagcggcgagtgcttgacatggagcagcgacagacgaagatgctcagcttcttgcagcaggctaggaagaatcctcagtttgtcaggaagctcgttaagatggcagaggaatccccaatctttgcggacgcgtttcacaagaagcgaaggctacctgggcttgaatgcatcacggatgctaccgaaactgccactagctttttcgatgaccatagcagtagttccaggcaagaaatgggtaaccttctgaatcagcacttctctgacaagctgaagcttggactctgtcctgcaatggcggaaagcaacctcatcaccctgagcacccaaagctcacatgaagataacgggagccctcttgggaagcatccagattacgagagaacaggcatggagtgccttccactggtgccacagatgatggagctctctgacactggaacatccatctgtccctcgaagagtgtgagctttacaacagctgcaaatgacgacgggttcttgccatgccacctcaacctcagccttgcatcatgtccaatggatgtggtcagaagccaaatccccgatgcaaacgtgaacactgtggatgagaaggatggcccaccggaggtgaccacacccaccatggagaaggacgacggcatgcctgacagatgccatgatgctacccagaaccagaaggaggcttcaggtcacgctggggccgcagcagatgcaacgggtaggccgcatcggggcagccaagctccccctgaagaacatacaggtccccaggtggtggtgaacgacaagttctgggagcagttccttaccgagaggccgggctgccccgaagccgaggaagcaagcttcaccctgaggagggatccagaccacacgcatgcgtacgacgagggcactggaagtgacacgagagatatggggcagctgaaactctgaccttgagtttttctagcatgaccttgagtttttgctggaaattggaatggcacgaaggtctgtctaggattgtgtgtaaacagcatcgcaagaatgccctgtacatattatcccagtatacataccggagacagagcaatgcgactacggaattgctgttctgttgtggttaatatgtatatggttatacttcgttacagcaaagcgaccagtttacgcaagccgcgttgacagaattcgatgtaacaaagaaaattccttaaaattctaggaagaggtgtat

SEQ ID NO: 131967 - DNA, 874 bp, Zea Mays
aaggaaactgacagacaaagggcgtgttcggctggctacaagccgacactgttgcagctgtttggactgctgcagctgcaatccatagagagaaaaatactgtagaagccgcagccgcagccggattgcagccgcagcaagccgcagcgacaagctgaaaataattatggtgacaaatccaagcccacgcggccgaggagactcccccctccacttgggagttgggatccaccaaccttcacccactcgcagcaggcagcaggcggcagcagcagcacgcgctgccgcagcaccagtcatggaggtcgccggcgcccgcgagcccggtagcggaggaggaggaggtggcggcggtggcggaccagccccgttcctgctgaagacgtacgagatggtggacgacccgtcgagcgacgcggtggtgtcatggagcgacgcatccgacgggagcttcgtcgtctggaaccagcccgagttcgccgcgcggatgctgcctacctacttcaagcacaacaacttctccagcttcatccgccagctcaacacatacgtgcgtaacaacggctccacctccctgctctgcgctgtctggctcttgtatatggtgcgctgctcgtgttggtgatccggggcactcctttggttggagtggtgggggatttgggcgttaaggttgcgcgggtgagagggatcgtcctcctttggttggagtaaaggtgaattttgtgctgtttcgttttggggaattttgcgtcgtgatttgggctcagaggagccttcatttcagtagccttctgccgaattgttagtttatctgggtttctattttttggtagattgattggttggaaacatagaattgggccaaaataaa

SEQ ID NO: 131968 - DNA, 347 bp, Zea Mays
acctcccgtacattatccttggtcttcacctccacctacacctacatctccacttaccgaacatcagctaccttgccgacacatcaacgagaagacgagttagactttgtcgaaaccctcttcgctagtggaggtatcgaccatcactcgtcaatgtaccccgatggtgatcggcgatcgtgagcttccatgttatgtgttgtgatacttgagacttttattatgactatgtatgagatattgtctcttattatgactgtatgagatgtgtcttattatgactatggatgagacttttgtgatgcaattgatgagactatggatttaaatattgttatgtgatgctg

SEQ ID NO: 131969 - DNA, 322 bp, Zea Mays
cgattcaatcgcttagactaccagagcctacccattatcgcgaggaaggagggagcagggggtgatcgggcggccaccgtggagagtcaccgccaccgtcgtcacgctccctgcgaattgccttgagtgttagtcatggtctgtggcacctgggcaaaggatcttcaagcgataggaaccctgataccccgggtaatttttcatcggagggcaccagcaccttgagccccgtgctgcgccgtaattcgcgcgtccgtcgccccaactccgacgggcaggcaaatgaggacctaggtgctcaggaggtggaaaatactgagca

SEQ ID NO: 131970 - DNA, 164 bp, Zea Mays
atgatagatctaatctggtacttatctattacaatcctatcctatatattaggaactctaacaaactcgaaaccaaatttgttacatgatagatctaatctggtacttatctgttacaatcatatcctatctgttaggaactctaacaaactcgaaaccaaatc

SEQ ID NO: 131971 - DNA, 669 bp, Zea Mays
atggatttttaaaatctgtagtgtttaaagaactagaaatggatttgcttgtttctaattcattttgcttgttggatgtcgatatgcacatgcattttcagtcagcttatgatcaaggggacaaataagatcatgccaactctactccatgtactgctggtgtcacagactcacctctgcggcagtatgccctgcctttgctgtgtacttaaatctgctggaggatgatgcatgggcatgcacggcattagattctattgctgtttgtttggctcgcgataatgatcacagaaaagtggaacaaacactgttgaaaaaagaggccattcagaatttagtgaagttcttccaagattgcctagaacagttttttggccatatattggacgctttcttgaagataataacgaaatcttctaggctaaatacggcaatggctaccaatggtttaacaaaattgctcattgcaagacttgaccattccaatttggtggtcgcaaaagtgtggagacttgaattcatataatgttaggcttaacaatagtgcaaatagttgtattttagtttagatttagagtacacttatgtatgcgttgtttgacaatgcttatttatgatatattgattggtacttatttatattatattaattataatgttgttcaatat

SEQ ID NO: 131972 - DNA, 678 bp, Zea Mays
atggagctattcacgcgcgcgaaggtggtgcggctcaggagccaccacgacaagttcctgtacgcggacgaggacgaggtgcgcgtgacgcaggaccgggacaggtcctcggcgaacgcgtggtggaccgtcgaggcgacgccgcatagcgcaggcgccatccgcctgcgcagccgctacgggcgctacctcaccgcctccagggagccgttcctgctggggatgacggggcggaaggactgggtgctttgggacgtcgaggtcgtgcagctcctcacgcccgcgccgcggcccgagcgcaccggctccgcgcccgtcgccaagttgtcggactcgcggcccgcgccggacctcggcaagccactacaggcgcatgggccgcaccaccacccatccaagtcctacgcgacgccaccgcccacgctcgagcccgaggcgccgccgccgtcgtccaggttcaataagctcgagcgttccgctgattgggcaccacagacggtctgtggttgtggatgggattatcattttggcagaaagctggttgaagctcgtgatgaactaatgaaaggaaggtaccacaagtacaagagccccagaaggggatctatagacccaagcgatgagtcgttcttcattaagcactgcctctattcgagttctttgccactagcccactag

SEQ ID NO: 131973 - DNA, 484 bp, Zea Mays
agacttcgacatcatgagcatcgtgggaaagtcgcagtacactgagcatcagtaggttccttccgtagtgttctcttttcttttaatcatagttccatctccacggtcgagaccagaacagcaacggtgctggagctacacatttgtaaccaaagtatttcatccttcttgcagtagtaatcatgccatgaaaatcctatccttgtttcaacaaccctaccttgctcttcgtgaatgtccaccatacaagggtatagcccgttgataagcagtgttgatacttgataggcacgggggcacctggtagcagcgacttcggagctgcactacgcaagaatagaatgtgcgagtgcgaccgccttgagatgccagcttccgcttgtgtcctgtgtcatttcctccactacactgtaccatttcttcccacttccgcttgataaatgcttacccctatttgctcgctctcggacgaatccattcgcct

SEQ ID NO: 131974 - DNA, 2118 bp, Zea Mays
gagagaccatcagatcacggctccagatccgccgtacgcataagccccagctgccctacctgcgcactcgcctccgcctccatctccttcgccaccagacctcaagcgcgccacacgccgccgcacgggagccgcgcgccgcacccgccgccgcttctcctcaaaaccagaggtctccccacgtcccccgatccagcgtctccatggccgcgccgcagcctgtcgcccccgcctccgaggcgccgccgtctgcgcaaatggtgggcaacgcgttcgtgcagcagtactacctcgtgctgcaccagtcgccggatctggtgtaccgcttctaccaggaggccagccgcctcgctcgccccgcatccgccgccggagccgccggcatggactcggtcaccaccatggaggcgatcagcgagaagataatggagatggacgtgtccaaagcggagatcaggacggtggactcgcaggagtctttaggcggcggcgtcgctgtgctcgtcacaggtcacctcaccggccgtgatggagtgcgccgcgagttctcgcaatccttcttcctcgcgccgcaggagatgggctacttcgtgctcaacgacatcttccgcttcgtcggggacatccctgcctctaccgccgttgaggcgcagccagaggcggttgctgtagtcccgcctgtggctgctccacttgccaacggcacagctactcctgctgtggagcctgccactcctgatgatcatggtgccgtgccacagcaggaacatcatgttgtggaccgatcactgcctcaacctgaagaggacgaggctgaggtttacaatccgccgcaagaggaagtagtggatgaggaacagcctgttgctgaagtgataaatgaagttccaaacaatgtggcacctgtggtggcaactacagttgcctcagtgttgcaggaggaggcaccaaagaagtcatacgcctcaattgtcaaaatcatgaaagaagttccattgcctgctcctgcgcctcctactaggccttcaccacccaaactagagaagcagtctcctcctcctgctactcctgtcacagatgtaccgcctttcagttctaaccccgagaacatcaatatccaagagcctgaagttgatgcacatgcaatatatgtgaggaatttacctttaaatgccactgaaactcaactggaggatgagttcaagaagtttggtaccattaagcaaaatggcattcaagtcagaagcaataagattcaagggttctgttatggattcgttgaattcgaggattctacttctgtccagagtgctatagaggcttcccctgtagcaattggcggtcgtcaatgttacgttgaggaaaagagagcacctggttcacgaggctccagcagaggcggcaggttcgcaccaggcaggggcaacagtttcagaagtgaaggtaccagagggcgtggtaactacggtggaggaaggggctacgggaggggtgaatttagttacaggtctgattacggggtcagaagtggtggcagaggtggctcattacgtggagctgatgttggctaccagagggttgaccatgctggatatgctggtggtcgtggtagccgcacagcagctgctggcgcaccttcaaaatgaggggcaccatagctgttgcgcgtcttttgggagtgttgttcggtggctctaagattattttgaagttggcatagaggctcatcaattggttcagtgcgggattacaagagaagcctggatacaaattatgagggttcctgtccttgatcattatttttgcaggcagcaaaaatggttactaattgagtaattgtagattagacacctattcagatgtagttctagtttcggtcgtcgactgatgtgccttgttgtcttttttgcaacgcatcatctaggtttttgttactgctggtattcatttattctgttgaattgaggttaatagcttttttagacttggaataagtgacagtttagggaagttaatagtggctagggtaaggatttaaatgtttctttgcaatgtgtcgacgccaaaagattctcttagtatttattatactgacaatattggtctttttttgaattc

SEQ ID NO: 131975 - DNA, 2084 bp, Zea Mays
taaattcctacctgtcctcttctctctgcccaagccccccgccaccagcccaccaccactgtacagcacaccactcctcgtctgctccctcaacaccctctcctctccctccttcaatgcgagaagctccgtcggcgtgcgagctctgaagccatggtagccggcgccgggaacccggggcgtcctgtcgcggttcttgccctcctcctcctcgccgccgccgcgccgcccggtgcctgggccgggtccgcggccgtgaacggggaccgcctccgggcagagcagatccggaagcaggcctcggacgcggccgcatccgctgccgcgctcgccgcggcgtcgcgccggctccacctggaccgcgcgcgacacctccgcctcctctcctcgctccaccgcaacctcaccaacacgctccgcgccctctccgtagccgccgacttcgcctcggacccttcctccgccaacgtatcgtcctcccgccagctcgacctccaagccaaggacctcatccgcgccgcgcgcgccgccatcgccgactccaagccgctcttcgacccgcagctcaagatccagcgcctcaaggacaccatcttcgcgcagaacgagctgctcgcgcgcgccaagaagcgcggcgccttcgcctccctcatcgccgccaagtccatccccaagccgctccactgcctcgctgtccgcctcaccgcggagcggattgcgaggcccgaccagtacgcggacccggtgccgccaccgccggcgctcgaggaccccgcgctcttccactatgcaatcttctccgacaacgtgctcgcggcctcgtgcgtcgtgcgctccgccgttgccaactccaacgatccctccaagcacgtcttccatgttgtcaccgaccggatgaacctcggagccatgcaggtgataatacgccgaatggacttaaaaggtgcacactatgaggtcaaagcatttgaggattacaaatttctcaactcctcgtatgttcctgtgctccggcaactggagtcagcaaacctccagaaattctattttgagaacaagcttgagaatgccaccaaagatgccagcaatatgaagtttaggaatcccaaatatctgtctatgcttaatcacttgcgattctatttgccggagatgtacccaaagctacaccgcattcttttcctggatgatgatgttgtggtacagagggatcttacaggactctggaagattgacatggatgggaaggtgaatggggcagtagaaacatgctttggatcttttcaccgatatgcacagtatatgaacttctcacaccctcttatcaaagcaaagtttaatcctaatgcctgtggatgggcatacggaatgaatttcttcgatcttgattcttggaggagggagaaatgtactgagcagtaccattattggcagaatcagaatgagaacaggacattatggaagctaggaacgctgccccctggcttgatcactttctactcgaccacaaaacctctggagaaatcttggcatgttcttggacttggatacaatcctagcatcagcatggaggagattagaaatgctgctgttgtgcatttcaacggcaacatgaagccctggctggacatcggtatgaaccagttcaggcacctttggacaaagtatgtggactatgatgactcatatattcgtcaatgcaattttgcaccgccatagaaggctttaattatcgacaacgaagaagaatcggtaaacgtggcacatacatacgccgcaagcacgttttctgtagagataaggagtttctagagtacaactgaagggaccaccacaatcttttctagctcataatgtttgccattagttatgatcaaagtaatgtttgccacatgactgcatgagcattattgtcgttgtgtgtgttagttatgtcagcaatactctgtatatgccgaagtcagatatatttctgttcacgtggatccaagaagtaaagtgtctgatgtatttacaaaaggcaccaaatactaattgtagattgaaactctacaatgtcactgtatatttctcttgtcacattt

SEQ ID NO: 131976 - DNA, 588 bp, Zea Mays
cgagcgagcaggtgtgggcgtggcgtgggggaggcgccgaggcggtcgggcccgtagataagagtcgtctcacctcgtcgtcgcagcctcgcatcgcacgagaggagaaggagaggggaagggctagagagagaaacaaaggtggtagtagatgtgagccaccctctttgtatccctcgtcaacttctcctaccaacttctttttcctcccccaccccttccttaccgtctcgcgcccgctccgcagcctcgcaccacccgccgccgccggccgaccggccggcaccgccggtggcatttgaagtatggttagcttgaggcgacgccgactattgggtctttgttctgggaaagactcattgccagttgatcttcctaagccgattgaaaatgaaaaaactgtggaagttgcacactccaatgtgaagccattcagtgtgcatccactacccttggcaaagacttctgatgtgctcataaaatcctcaaatggttctgatgattcaaaggaagagaaaacccagtactatccaggtctatacttcatccttattctgtattattggcatttcttcactttatgtccag

SEQ ID NO: 131977 - DNA, 435 bp, Zea Mays
cgagcgagcaggtgtgggcgtggcgtgggggaggcgccgaggcggtcgggcccgtagataagagtcgtctcacctcgtcgtcgcagcctcgcatcgcacgagaggagaaggagaggggaagggctagagagagaaacaaaggtggtagtagatgtgagccaccctctttgtatccctcgtcaacttctcctaccaacttctttttcctcccccaccccttccttaccgtctcgcgcccgctccgcagcctcgcaccacccgccgccgccggccgaccggccggcaccgccggtggcatttgaagtatggttagcttgaggcgacgccgactattgggtctttgttctggtaataggaactcatttcgtaccttgaaatatcttgcaagatgtaaaaattgttcataggatttatgttatgaaaagaacatctttt

SEQ ID NO: 131978 - DNA, 95 bp, Zea Mays
cgcttgcgtgctctctccctatatatctagcggtatactacctatatcgcctccaaatgactaggtctttgtcgtgtcattcttcggcaacgaac

SEQ ID NO: 131979 - DNA, 87 bp, Zea Mays
atgttcaaaggtggtgccgcttcactgaatcttaacagtactcatctaaatctgcgtataggtcacttttttggttcagtggcattt

SEQ ID NO: 131980 - DNA, 810 bp, Zea Mays
agaacagaacacgagaagttgactatcgcgaggtggccaagaaggaaaagtagcggcggcatggggtcgcccaaggcggccaagagcatggtgaagcaacgcatctggcgtcaccggctcgtcgcgccgttcgctgccgttctcatcacggccgtcgtcgtattctccggcctgttcgcgcaggacccaagtgccacctcggagttcactgccgtgaacgcgggtaacaccctgccagtgcgcgataagtcggaatccacagcagccagaggatctcccaacaaggaggatcttgcaacagctgcatttgagcaagaattggatgttggaaattctgagcccaatcaagctttccaaggcaccgtgcctgcagcaggcgagagagggacagcaacggcagtgccggtccaacgagaaagaagcagtggaggatctgaacctgaagagaagcaatcgcccccacaggaccaggaaggagaagaaacctctgctaagtcaggagctagcttctgtgctcggacggtggtacacaaactggaggaagaatatgtcctttgtgctctgctggagcctcggctctcaacaaactcctctctaggttgctctcctcgggctttctatctcaaggagatgttttcgtgggtcgaggttgtatttttgttttgactttgtacctttgtacggggttcagagaggcctctcaataactccctgtactattttttttcttctttttaatgaaatgccacacgagtttattttgcattgttcgagaaaaaaaatagataaatatgttttataaaaaaaaga

SEQ ID NO: 131981 - DNA, 1915 bp, Zea Mays
agaacagaacacgagaagttgactatcgcgaggtggccaagaaggaaaagtagcggcggcatggggtcgcccaaggcggccaagagcatggtgaagcaacgcatctggcgtcaccggctcgtcgcgccgttcgctgccgttctcatcacggccgtcgtcgtattctccggcctgttcgcgcaggacccaagtgccacctcggagttcactgccgtgaacgcgggtaacaccctgccagtgcgcgataagtcggaatccacagcagccagaggatctcccaacaaggaggatcttgcaacagctgcatttgagcaagaattggatgttggaaattctgagcccaatcaagctttccaaggcaccgtgcctgcagcaggcgagagagggacagcaacggcagtgccggtccaacgagaaagaagcagtggaggatctgaacctgaagagaagcaatcgcccccacaggaccaggaaggagaagaaacctctgctaagtcaggtttagtccagtacacaacatgcacacctcgaacgggagcaaccgtctgtgatctctccaaccagcggtacgacatctgtgagctttgcggtgatgctcgcgccattggccgctcctccaccgtaatgtacgtcccacagccccttacttccaacggtgaagagtggaacattccagcacaatcacggaagagccttccatggatcaagaaggtgactgtcaaaaccctgaaggcttcccaacaggcgccaagctgcacatccaggcacaccatgccagccatcgtctttgcgttgggcgggttcacaggaaacgtctggcacgacgtgagcgacgtccttgtccctctgttccttaccgcccgccagttcgaccaagatgtccagctactcgtcaccgacaaccggccctggttcatcaagaaatactcggcaatcctccgccgcctcacgagacacagtgtcatcgatttcgatgcagacgacgaggtgaggtgctatccgcatgtcatcgtcgggctgaggagccaccgggacctcggcatcgatccggactccacgccgcagaagaactacacgatggtggatttccgtctgtttgtccgcgaagcctacggactgcccgcgcctggagtggacataccgtacagggctgacaaagacgagcccgagaagaagaagccccggatgatgctcatcgagcggggcaagacgcggaggctcgtgaacacgcctgacgttctactcgggcttggctggttcggcttcgaggtggtcagggcggatccaaggacccactctgacctcgaggagtttgcccgcctagtcgactcgtgtgacgcgatgatgggcgtccacggtgccggtttgaccaacatggtgttcctgaggtcgggcgcggcgctggtgcacgtcgtgccctacggggtcgagttcatggctgacgggttctacggcgcgcctgcgagggacatgggcctcaggcatgtgcggtacagcgtcggtccagacgagagcacgctgctggagaagtacggcaggaaccatgcggtggtgagagacccggaggccgtaaggagcggcggatgggagaaggtcggggaggtctacatgaccgagcaggacgtcgtgctcaacgtgacgaggtttggacctagtttgttgaaggcaatagagttcattgtgtaggtgggtggacgagatgaggtttgtgttagctatgacaatggaactagtgtacaccgtcttttttttatattaggttttattgtttctgcttctgtacagggtctaaaatgtatgatgtagtgctctgaccaattttaaggtacaattaggaacaacactgagatagtactgtcccaatctttgacttttaactaaataatattattaaaggatcgtcctattccattct

SEQ ID NO: 131982 - DNA, 435 bp, Zea Mays
atgggtactcttgccttacacttgaacggcttaccacaaaccaaccaattccctggaacaaaactgtggtgtggtctcctgtatcatgatgcaacaacaatactgcgtctcaatgctctactgaacctagctagatcatccatgcatcaccacaactgcaagaacatgtacatgaaacagagcagagcaagagatgagagggacgcggtcgccagaggttcagcattggagtcggtagaatcgacgtcaggtgggttcaatcctccggtgcttccagtgccttttggcgacaaagacgtgggagtccctggcatggatgttgaaccaggtgatcctgtttgcccggcagtgctgcaaacaagaattaccatgatcaatatgaccaagtttcagaaacgcgggtataggttctggtacataaataaagcatgctaa

SEQ ID NO: 131983 - DNA, 2094 bp, Zea Mays
atgtgctttgcatctttctttgacgaagtccgcgcggcagatcgtcgaccgccttgtcgtctgcgcggccgccgcgaccacgaccacgaccacggcaacgctggggcagcattgtgcgtgggcgacgcgctgcgcaaggccaccaaggtgctcgaggaccggcaggaccgcaacccggtggccaccgtcatgctgctctccgacacccaacagcagcaacagcagtcggcagcgccggaaaactcgtcaaggaagcagtttgggcggccagcggtggccccagcaacgcgcttcacccatgtggagatccccatcggccccggcgacccgcctcctcttgtgtccgagtgcgaggaggagcctcccgtggagcacgcgttcgccaagtgccttggcgggctggtgagcgtggtgatgcaagaggtgcatctggagctggcgttcccgacgggggagatcacggcggtgtactcgtgcaggcctgggcagcaagtcgtggcagtctttcggtggtacgggggtgagcatgcggctgggcgagatgtacgcagaggaggagcgcgaactgctggtggaggtgcgggcgccgctgggcagccacccgcactcgttgacggtgcggtgcatgtaccgcaacccggcgtcgcaggagacggtgcgcggcgcggtgcagcctctgctgctgcccgcgctccatggcgagcgggcgccgtcatcgtcgtctcggcaattgttgacatcactacaacaatggcatctagagaaggtctcagcgtctatgtcagcggggcagttgcatgggcagtgcagcgagccgcggagcagcgaatgaacgagagcttgttcacatgtgaactttcaaaacaaaccttatcatccgtcaaggatacagttgaaatggctgtcaaaaaatggggagagaaatcattaactgaactggaagcagaaaagcggttgtcctactcatgtgagaagaccagtggccctaaccattggaatgtcgagactatggttgtgtggtgcgaccaacaacaccacagtatctccggaagacaattgactgcctcaatgggaaacgaaaaagcaaatagccattgggaagcagagctgcctcctaaatatgatagggttgggatagagaatttcatccgtgcaaaatatgaggacaagagatgggtaccaaggaatggaacattgcgactttcctccggtgttcgagatgagaagagccaagagtctccagctagtgctaattggagtggacatcatagatcttcatttgagcaaaaccatgcttcaccagctcttccgagcaaagttgcacctgtagcttcaaggataccctctcaggcatcacctcagcccccaaaggtagaaccaccagttcctaaggtggtttcacctcctcagccacaaaaatctcctgccaaagttgaggcaacaccccctaaagttgagaagccatcagttgcgccgcctcctaaagttgattatgctactgatctctttaacatgttatcaatggatggaacaatagagaaagagccagagtcatctccaaacgacgataatgcctgggatggcttccagtctgcacaaccagtacctagctccgaggaaaaagattctgccaaaccagcagaaagcaagacccagtctacatctggaatagaagacttatttaaagattcgccagctgtgtcgttatcctcagctccagttgtttcccaagaaaatgcaaagaatgatatcatgagtttgtttgagaagtccgatatggcatcaccatttgctgtccaacagcagcagctggcgtttatgtctcagcagcaagctcttctaatggctgctcttaaagctggaaattcaccacaaatagttccagggaatgccaatcaactaaacactaacatttctaatccccctcttggaaccttgcctttccaaaactggacaaatcttggctatcaaaatcctgggttgactctagcagcagcacagaatggtgccacaatgaggagcatttcagtttcctgagcactcgatgcctaattatgacagtggaaaggctgctaacagtatgatcaaacagag

SEQ ID NO: 131984 - DNA, 1799 bp, Zea Mays
tcacccgtttccctgatctgccatccaccgtcgtggcgttccgccagaagccatccgtcgccatcggagctgccaaagcaagcagactgcaggcagccacaccaaacgtgccaaacccccaacgccatcctctataaacggcttcctcgcgggctccccctccccctccccgactcctccccatcgcccatcgccgccctccgatccttcatggccgctgccacagccgccgccgccgcgctcgcctccccggcgggcctctccacatcgctggcgcgccgcggcctcgtcagcttcgcacccgcgctccgccccggccctgaccgcagctctcgcgccgtcgccctcctcggtgtacgaactcatgtcacggctgttgatcaagccattgtaaaaggtgatacaaagttggaaggtcctgtggttgttgttactggtgcttccagggggattggaaaagccactgcattggctcttggaaaagcaggctgcaaggtcttggtgaattatgctcgatcttcaaaggaggctgaagaagtctccaaggagattgaagcatctggaggccaggccattacctttggaggagatgtttccaaagaggctgatgttgaatctatgataaaagtggctgttgatacatggggaacgattgatgtactagtaaataatgcaggaatcacacgggacacattgttgatgagaatgaagaaatcacagtggcaagatgtgattgatttgaatcttacaggcgttttcctttgcacgcaggctgcaacaaaagtaatgatgaagaagaaaaagggaagaattatcaatatagcatcggttgttggtcttactggtaatgctggacaagctaattatgctgctgccaaggctggggttattgggttcacaaaaacagttgctagggagtatgccagcagaaatattaatgcaaacgttatcgctcctggatttattgcttcagatatgactgctgaacttggtgaagagttagagaagaaaattctgtcaactattcctttagggcgctatggtcggccagaggatgtagcaggcctggtggaattcttagccctcagccctgctgcaagctacatcactggacaggtcctcaccatcgatggaggaatggtaatcggtttgtggtatagtacagtttgtttcgaagggagagttgatactagaaatttgcacacgtatagttagcttaatttctttgcgattggccgattgctccaaacatgttattggaacgctctttccctgagtcttcgtttccgtttcccttataaagtcttataaagtgtttggtttgatgaatcactctattcaaaattcaaaatgaaacggtatatcatggatttattccttaaatttggtgggataactccattccacatattagtactaaacaactaactatgaagaatgaggtggtgatggattaactcactccattctacaaaccaaacaaaaaatgagggagaagatgatggactacatcattcctcaaaccaaacactccagtactgtcgagcctcggctcaacttctgtttctgggacggagtacataccatgagcaacggtcacacaaatataatgaacagcaaacatctagtttagaagaatacaaagaaaagttgccaccaaatatgaacgccaatacgaattgccagtcaaaccaatttagccatttatggaaatggaggaatacatcgtacttccgacccacagcaaatgtccatacaaaccaaaaattaaaacacagccgatgatatgctaagcgcag

SEQ ID NO: 131985 - DNA, 1794 bp, Zea Mays
tcacccgtttccctgatctgccatccaccgtcgtggcgttccgccagaagccatccgtcgccatcggagctgccaaagcaagcagactgcaggcagccacaccaaacgtgccaaacccccaacgccatcctctataaacggcttcctcgcgggctccccctccccctccccgactcctccccatcgcccatcgccgccctccgatccttcatggccgctgccacagccgccgccgccgcgctcgcctccccggcgggcctctccacatcgctggcgcgccgcggcctcgtcagcttcgcacccgcgctccgccccggccctgaccgcagctctcgcgccgtcgccctcctcggtgtacgaactcatgtcacggctgttgatcaagccattgtaaaaggtgatacaaagttggaaggtcctgtggttgttgttactggtgcttccagggggattggaaaagccactgcattggctcttggaaaagcaggctgcaaggttacaagtttaagtaatctgcttataaatatagagaagtttatcaaatgtgtatgcttctcttaaactctgcacaaacctcaagcccacaatggccattgctagaccaagctgttagattgtcaatttaaatggaccattatgcatagtggataaatggttttatcatcagaataatatgaaagctgtatttaaactgcaggtcttggtgaattatgctcgatcttcaaaggaggctgaagaagtctccaaggagattgaagcatctggaggccaggccattacctttggaggagatgtttccaaagaggctgatgttgaatctatgataaaagtggctgttgatacatggggaacgattgatgtactagtaaataatgcaggaatcacacgggacacattgttgatgagaatgaagaaatcacagtggcaagatgtgattgatttgaatcttacaggcgttttcctttgcacgcaggctgcaacaaaagtaatgatgaagaagaaaaagggaagaattatcaatatagcatcggttgttggtcttactggtaatgctggacaagctaattatgctgctgccaaggctggggttattgggttcacaaaaacagttgctagggagtatgccagcagaaatattaatgcaaacgttatcgctcctggatttattgcttcagatatgactgctgaacttggtgaagagttagagaagaaaattctgtcaactattcctttagggcgctatggtcggccagaggatgtagcaggcctggtggaattcttagccctcagccctgctgcaagctacatcactggacaggtcctcaccatcgatggaggaatggtaatgtaaggcttcgaatctgtgccgctggcctctaatgtgtcgcagaaaaaaaatgtaattcagttttttgagtgtcatttttaaggggtggtttcttttgtccgcagcggtttgtggtatagtacagtttgtttcgaagggagagttgatactagaaatttgcacacgtatagttagcttaatttctttgcgattggccgattgctccaaacatgttattggaacgctctttccctgagtcttcgtttccgtttcccttataaagtcttataaagtgtttggtttgatgaatcactctattcaaaattcaaaatgaaacggtatatcatggatttattccttaaatttggtgggataactccattccacatattagtactaaacaactaactatgaagaatgaggtggtgatggattaactcactccattctacaaaccaaacaaaaaa

SEQ ID NO: 131986 - DNA, 1603 bp, Zea Mays
ggcaaccgttctcacccgtttccctgatctgccatccaccgtcgtggcgttccgccagaagccatccgtcgccatcggagctgccaaagcaagcagactgcaggcagccacaccaaacgtgccaaacccccaacgccatcctctataaacggcttcctcgcgggctccccctccccctccccgactcctccccatcgcccatcgccgccctccgatccttcatggccgctgccacagccgccgccgccgcgctcgcctccccggcgggcctctccacatcgctggcgcgccgcggcctcgtcagcttcgcacccgcgctccgccccggccctgaccgcagctctcgcgccgtcgccctcctcggtgtacgaactcatgtcacggctgttgatcaagccattgtaaaaggtgatacaaagttggaaggtcctgtggttgttgttactggtgcttccagggggattggaaaagccactgcattggctcttggaaaagcaggctgcaaggtcttggtgaattatgctcgatcttcaaaggaggctgaagaagtctccaaggagattgaagcatctggaggccaggccattacctttggaggagatgtttccaaagaggctgatgttgaatctatgataaaagtggctgttgatacatggggaacgattgatgtactagtaaataatgcaggaatcacacgggacacattgttgatgagaatgaagaaatcacagtggcaagatgtgattgatttgaatcttacaggcgttttcctttgcacgcaggctgcaacaaaagtaatgatgaagaagaaaaagggaagaattatcaatatagcatcggttgttggtcttactggtaatgctggacaagctaattatgctgctgccaaggctggggttattgggttcacaaaaacagttgctagggagtatgccagcagaaatattaatgcaaacgttatcgctcctggatttattgcttcagatatgactgctgaacttggtgaagagttagagaagaaaattctgtcaactattcctttagggcgctatggtcggccagaggatgtagcaggcctggtggaattcttagccctcagccctgctgcaagctacatcactggacaggtcctcaccatcgatggaggaatggtaatgtaaggcttcgaatctgtgccgctggcctctaatgtgtcgcagaaaaaaaatgtaattcagttttttgagtgtcatttttaaggggtggtttcttttgtccgcagcggtttgtggtatagtacagtttgtttcgaagggagagttgatactagaaatttgcacacgtatagttagcttaatttctttgcgattggccgattgctccaaacatgttattggaacgctctttccctgagtcttcgtttccgtttcccttataaagtcttataaagtgtttggtttgatgaatcactctattcaaaattcaaaatgaaacggtatatcatggatttattccttaaatttggtgggataactccattccacatattagtactaaacaactaactatgaagaatgaggtggtgatggattaactcactccattctacaaaccaaacaaaaaa

SEQ ID NO: 131987 - DNA, 2315 bp, Zea Mays
cctaatctgttattacggcatacctaaactgccctgcataaatccaccgttccttgatacgacagctctgaaacgcggacaagtctctacagcctcagcacggacccggcctgcctcctcttctctctctcggcgacgactgggcgaccgaccaaccgtcgctgcgctacgccaggtgccaaggtcttcttcgggtccttcgccggcgaccagcagcaccaggcatagacttgtgtaagaaatggatgcaactgccggttaattgcgacacagatttatatggacatagatattggggccatgtgtaagggcggaagctgttcctaccgcgtcaataaggggagtcctgctggttctaccaggaagatccattccacagcctctcaaggtcggatggcatctgacacagcgagggtaacgaaaacagaggcatcaaagctgaagaacctgatctcggcatcattcaaacccttgtctctgaccattcccatcggcgacggattccacgaatcgctccctttcagccattgtcatttatagtagagaaagacctacgagaacgtccaggtgctttctgcaggatctcataatacttgcacgagctaggatgcagctcaagcctcctgcaagacccaagctctattcagggctcatgccccaagaggatttggatccgtaccgtgatctaataccaggcttgcctgaagacttggcgaagatatgtcttgcccttgtccctcgtgctcattttcctgccatgggcgcagtttccaagaggtggatgtcgttcctcgaaagcaaggagctcgtagctgtgaggaaggaggttgggaaacttgaggagtgggtgtatgtcctggttccagatgctggggcgaaggggtcacactgggagattttagagtgttcggggcaaaagcagagccctcttccacgcatgcctggactaaccaaagcggggtttggtgtggttgttattggtggtaagctctttgttattgcgggctatgccgctgaccatgggaaagactgtgcttcagatgaggtttatcagtatgattcttgcctcaacaggtggactgtgcttgctaagatgaatgtagctcggtgcgacttcgcctgtgcagaggtcaatggggtgatatatgttgctggtggatttggtccaaacggcgagagtttatctagcgtcgaagtgtatgacccagaacagaataagtggacactgatcgagggcctgcgcagaccaaggtggggctgcttcgggtgcagcttcgaagggaagctgtatgtcatgggcggccgctcaagcttcacaatcggtaactcccgttctgttgacgtgtacaaccctaacagccacgcctggggccaggtcaagaacggctgcgtgatggtcacggctcatgcggtcctcggcaagaggctcttctgcatcgaatggaagaaccagaggtctctagcaatcttcaacccagctgacgactcctggcagaaggtccccgtgccgctcaccggcagctcaagcactcgtttctccctcgtggtgcacgaggacaagctgctgctcttccctctggaggaagagcccgggtaccaaacgctgatgtatgaccctgcagctccgatggggtccgagtggtgcacgtcgaagctgaagccgacgggttcttgcctgtgcagcgtgaccatcaaagcctgatgatgaccttgaatgcgtgggatgcggtggtcgtactgtcctcataagatggagtcccacacgccttcatatttcagagttgggatgaggctgccttcagttggtctcatgcgcactttctttgcttgaaattttaattttgcgtgtcgcatcgacaaataatggataggacatttatgcttcggttcattgagttgctgaagcttatgatgtattctcacttctgtattgaactctgttcgtttggttgtttagttgatttgatcttttgttttttgctggcactcacatgataacgacagccgtgctgtcaacagtcaactgatgctcggcagaaaggtttatgtcgttggctcgttgcacatgatcaggtcggcttttcttatttggggctgaaagtatagctcgggctcaaatttcattaatcagatggaggattaagattctggagcactcattttatgagaacctttgcgcacagatgagctggtcaagtatattactacttgtgacctttgatcttgcaagtcctgattgattctcatgatgcagtatgtgcgcccacgttttatcccgtacagtatgataagaggacttttggcttttgccccct

SEQ ID NO: 131988 - DNA, 2145 bp, Zea Mays
gaaacgcggacaagtctctacagcctcagcacggacccggcctgcctcctcttctctctctcggcgacgactgggcgaccgaccaaccgtcgctgcgctacgccaggtgccaaggtcttcttcgggtccttcgccggcgaccagcagcaccaggtatgcccgccctcgctcttcccttgctggtgcgctaaaccgagcgcccgattcccaacttaccggttatctgtgtccggatctgatctagttacaagcaaatccccctgtattatgcctactaccttcgcttgtttcgcaaaaattatctcgtggagtacatgtgtattcttctgcgccacctgctccatggtgaaatcaagttcatcatcttaagccaatctgttgataaccgcaggcatagacttgtgtaagaaatggatgcaactgccggttaattgcgacacagatttatatggacatagatattggggccatgtgtaagggcggaagctgttcctaccgcgtcaataaggggagtcctgctggttctaccaggaagatccattccacagcctctcaaggtcggatggcatctgacacagcgagggtaacgaaaacagaggcatcaaagctgaagaacctgatctcggcatcattcaaacccttgtctctgaccattcccatcggcgacggattccacgaatcgctccctttcagccattgtcatttatagtagagaaagacctacgagaacgtccaggtgctttctgcaggatctcataatacttgcacgagctaggatgcagctcaagcctcctgcaagacccaagctctattcagggctcatgccccaagaggatttggatccgtaccgtgatctaataccaggcttgcctgaagacttggcgaagatatgtcttgcccttgtccctcgtgctcattttcctgccatgggcgcagtttccaagaggtggatgtcgttcctcgaaagcaaggagctcgtagctgtgaggaaggaggttgggaaacttgaggagtgggtgtatgtcctggttccagatgctggggcgaaggggtcacactgggagattttagagtgttcggggcaaaagcagagccctcttccacgcatgcctggactaaccaaagcggggtttggtgtggttgttattggtggtaagctctttgttattgcgggctatgccgctgaccatgggaaagactgtgcttcagatgaggtttatcagtatgattcttgcctcaacaggtggactgtgcttgctaagatgaatgtagctcggtgcgacttcgcctgtgcagaggtcaatggggtgatatatgttgctggtggatttggtccaaacggcgagagtttatctagcgtcgaagtgtatgacccagaacagaataagtggacactgatcgagggcctgcgcagaccaaggtggggctgcttcgggtgcagcttcgaagggaagctgtatgtcatgggcggccgctcaagcttcacaatcggtaactcccgttctgttgacgtgtacaaccctaacagccacgcctggggccaggtcaagaacggctgcgtgatggtcacggctcatgcggtcctcggcaagaggctcttctgcatcgaatggaagaaccagaggtctctagcaatcttcaacccagctgacgactcctggcagaaggtccccgtgccgctcaccggcagctcaagcactcgtttctccctcgtggtgcacgaggacaagctgctgctcttccctctggaggaagagcccgggtaccaaacgctgatgtatgaccctgcagctccgatggggtccgagtggtgcacgtcgaagctgaagccgacgggttcttgcctgtgcagcgtgaccatcaaagcctgatgatgaccttgaatgcgtgggatgcggtggtcgtactgtcctcataagatggagtcccacacgccttcatatttcagagttgggatgaggctgccttcagttggtctcatgcgcactttctttgcttgaaattttaattttgcgtgtcgcatcgacaaataatggataggacatttatgcttcggttcattgagttgctgaagcttatgatgtattctcacttctgtattgaactctgttcgtttggttgtttagttgatttgatcttttgttt

SEQ ID NO: 131989 - DNA, 1727 bp, Zea Mays
cctaatctgttattacggcatacctaaactgccctgcataaatccaccgttccttgatacgacagctctgaaacgcggacaagtctctacagcctcagcacggacccggcctgcctcctcttctctctctcggcgacgactgggcgaccgaccaaccgtcgctgcgctacgccaggtgccaaggtcttcttcgggtccttcgccggcgaccagcagcaccaggcatagacttgtgtaagaaatggatgcaactgccggttaattgcgacacagatttatatggacatagcacgttccactgtttctttcttcagatattggggccatgtgtaagggcggaagctgttcctaccgcgtcaataaggggagtcctgctggttctaccaggaagatccattccacagcctctcaaggtcggatggcatctgacacagcgagggtaacgaaaacagaggcatcaaagctgaagaacctgatctcggcatcattcaaacccttgtctctgaccattcccatcggcgacggattccacgaatcgctccctttcagccattgtcatttatagtagagaaagacctacgagaacgtccaggtgctttctgcaggatctcataatacttgcacgagctaggatgcagctcaagcctcctgcaagacccaagctctattcagggctcatgccccaagaggatttggatccgtaccgtgatctaataccaggcttgcctgaagacttggcgaagatatgtcttgcccttgtccctcgtgctcattttcctgccatgggcgcagtttccaagaggtggatgtcgttcctcgaaagcaaggagctcgtagctgtgaggaaggaggttgggaaacttgaggagtgggtgtatgtcctggttccagatgctggggcgaaggggtcacactgggagattttagagtgttcggggcaaaagcagagccctcttccacgcatgcctggactaaccaaagcggggtttggtgtggttgttattggtggtaagctctttgttattgcgggctatgccgctgaccatgggaaagactgtgcttcagatgaggtttatcagtatgattcttgcctcaacaggtggactgtgcttgctaagatgaatgtagctcggtgcgacttcgcctgtgcagaggtcaatggggtgatatatgttgctggtggatttggtccaaacggcgagagtttatctagcgtcgaagtgtatgacccagaacagaataagtggacactgatcgagggcctgcgcagaccaaggtggggctgcttcgggtgcagcttcgaagggaagctgtatgtcatgggcggccgctcaagcttcacaatcggtaactcccgttctgttgacgtgtacaaccctaacagccacgcctggggccaggtcaagaacggctgcgtgatggtcacggctcatgcggtcctcggcaagaggctcttctgcatcgaatggaagaaccagaggtctctagcaatcttcaacccagctgacgactcctggcagaaggtccccgtgccgctcaccggcagctcaagcactcgtttctccctcgtggtgcacgaggacaagctgctgctcttccctctggaggaagagcccgggtaccaaacgctgatgtatgaccctgcagctccgatggggtccgagtggtgcacgtcgaagctgaagccgacgggttcttgcctgtgcagcgtgaccatcaaagcctga

SEQ ID NO: 131990 - DNA, 1571 bp, Zea Mays
gaaacgcggacaagtctctacagcctcagcacggacccggcctgcctcctcttctctctctcggcgacgactgggcgaccgaccaaccgtcgctgcgctacgccaggtgccaaggtcttcttcgggtccttcgccggcgaccagcagcaccaggcatagacttgtgtaagaaatggatgcaactgccggttaattgcgacacagatttatatggacataggtattcggctcctccctgctccctccctctctgaaaatggctggcaactactgttacaatcttgtttcagctaacatcgtagcacgttccactgtttctttcttcagatattggggccatgtgtaagggcggaagctgttcctaccgcgtcaataaggggagtcctgctggttctaccaggaagatccattccacagcctctcaaggtcggatggcatctgacacagcgagggtaacgaaaacagaggcatcaaagctgaagaacctgatctcggcatcattcaaacccttgtctctgaccattcccatcggcgacggattccacgaatcgctccctttcagccattgtcatttatagtagagaaagacctacgagaacgtccaggtgctttctgcaggatctcataatacttgcacgagctaggatgcagctcaagcctcctgcaagacccaagctctattcagggctcatgccccaagaggatttggatccgtaccgtgatctaataccaggcttgcctgaagacttggcgaagatatgtcttgcccttgtccctcgtgctcattttcctgccatgggcgcagtttccaagaggtggatgtcgttcctcgaaagcaaggagctcgtagctgtgaggaaggaggttgggaaacttgaggagtgggtgtatgtcctggttccagatgctggggcgaaggggtcacactgggagattttagagtgttcggggcaaaagcagagccctcttccacgcatgcctggactaaccaaagcggggtttggtgtggttgttattggtggtaagctctttgttattgcgggctatgccgctgaccatgggaaagactgtgcttcagatgaggtttatcagtatgattcttgcctcaacaggtatgcttgggttctcataagtttattatactatggaagattctgttcatttctcagtgaccttactaacgtcacaaaactcaattgataaactggcatactgagagaaactgaacacatcaaaggaaaaaaaaactcatcaactctgatactgatatattattcaaccaaatgcatattaaggtctgagtattttgaattatttggctgattcatttatgctattggttcccaggtggactgtgcttgctaagatgaatgtagctcggtgcgacttcgcctgtgcagaggtcaatggggtgatatatgttgctggtggatttggtccaaacggcgagagtttatctagcgtcgaagtgtatgacccagaacagaataagtggacactgatcgagggcctgcgcagaccaaggtggggctgcttcgggtgcagcttcgaagggaagctgtatgtcatgg

SEQ ID NO: 131991 - DNA, 467 bp, Zea Mays
ccatgtaattgtagagagaacaagaacttgactggaacaacaagatatgcaagtgtaaatacccaccttggaattgaacaaagccagagggatgacatggaatctcttggatatgtactgatgtacttcttgcgaggaagccttccatggcagggcctgaaagctgggaacaaaaaacaaaagtatgaaaagattagcgaaaggaaaattgcatttaatacacccaatattcgggaaggttggtttaatacacccaatatttcatttaatgataaaccatgtatgcatttctcagtgtagcaaaaatgctaaatcggaattatgttatccattgggcaggttttcagtttgattatgtttttaactagaccattctaaagtaccaacaggcacagatgaccactgctccacctcgtgcaattgctccagcagtaggacaaagctctaggatggctcctgtggctcaa

SEQ ID NO: 131992 - DNA, 1700 bp, Zea Mays
gagcaaacaagtttcccctccatcccaacaccaaactcctccgacgacccagcttgccgacgaccatggcctgcagtcctcaccaccagggtgacgtggtgttcgaggcgaacgccatcggctgggctccctcgggcgcgcgcacggcgctgtcgctgcgccacgagcgggacccggccaggctccccgctgccgccgtcgggggcgagcgcacgcccagcagcggccggtacgtcctggcggcgggccgcggcggcgaggaggacgggctgcgccaggcgatcccgccgggcgcgctcaggccccgggtcacgtaccgcgtcgcgggctgggccagcgtagccgtagcggcggcggaggaggaggaggagggagcccgccagcagtaccgccatcaccccgtgcgcgtcagcatccgcgtcgacgacggcgtggtcgtcgagtgcggcgctgtcgcctgctcggccgcctccgactccgactccgggtcggcggcggcagggtgcagcaggtgggcggagatcaagggcgcgttccggctcagggagtgcccccgcagcgcggcggtgcacgtgcatggcgcgcctgccggcgtcgacgtcaaggtcatggaccttcggatcgttgccacggacccgaaggcgcgcttcgggtacctcaaggacaagacggacaaggtgcgcaagcgtgacgtggtcgtgaagctgagcggggcggcggcgggcgcgtcggtgcgcgtggtgcagctggacagcgccttccccatcggcagctgcatcaacggcacggtgatccaggaccctgcgttcgtggacttcttcacgagccacatggactgggccgtgttcgagaacgagctcaagtggtactggacggaggcggagcgcgggcagctcaactacgcggacgccgaccgcctgctcgacttctgcgaccgggcgggcaagcccgtgcggggccactgcatcttctgggccgtggacggcgaagtgcagcagtgggtcaaggacatcgggcgcgacgaccccgaccagctcatggcggccgtgcgggaccgcctcgggggcctcctcggccgctacgccggcaggttcccgcactacgacgtgaacaacgagatgctgcacggccgcttcttccgcgaccgcctcggcgacggcgtgcccgcgctcatgttccgcgaggccgcgcgcctggacccggccgccgcgctcttcgtcaacgactacaacgtcgagtgcggcggcgacccggccgccacgccggagcggtacgtcgacctcgtccgagccctgcagcggggcggcgcgcgggtcggcggcgtcgggatgcagggccacgtcacccaccccgtcggcgaggtcatctgcgacgcgctcgacacggtctacgccgccaccggcctgcccgtctggttcacggaggtcgacgtctgcgagcccgacgacgcgctccgcgccgacgacctcgaggtggtcctgcgcgaggcgttcgcgcacccggcggtgcagggcgtcgtgctctgggggttcatgcagggccacatgtggaggcaggacgccgcgctcgtcaacgccgacggcaccgtcaacgacgccggccagaggctcatcgacctcaggagcgagtggatgtccgacgcgcggggccgcctcgacgccgacggacagttcaggttcaggggcttccacggcacctaa

SEQ ID NO: 131993 - DNA, 2988 bp, Zea Mays
tctatcttttttatcagaggttaaatcaatcatcagaagaagaattaggccaaaaattaggatacattctggaaaaatgaaagaagcaaatgaaacgcttttataaaaattctcgtagaatcgagaatgaagttttcattctgtacatgctagatcatgaattagtaactgcagccaatctccgaaaagtcccgattgttttgatttttggaattggatatttacggaatccccatgaataggatcaaacctttattccatgctatatttctataagattcctctttcttattctttaagtaagcccccgagagggcttagttgatcatgatttctgttttctctttttttctttttatttgtttcgaaaaagatatcgtctgattctccttctattgattcttttctgatcgagatgtatggatccatgtgtctacataccctagattctgttcatggattaacgaaaatgtgcaagagctctatttgcctctgtcattctatgagtcgcttcctttttgcgtatggcacccccactccctttggcagcatctactaatttggaacttaatttgaaagtcatatttcgacccgaacgcttttgggatgcttctaataaccaacgaatggcaagtgctcttccttgtttagatcctattcaatcagaactttccacgtcgatccttttttattacgtcttatttttactcctatattgggagttactctacgtatttcttgatgtaaaaccaatagtggatttgtttctgtcttttgttgaatcttttccatggctcgatagagaatttgataagccaatgatttttttcatcattcataatacggttaaccaccatgttaactaatcgattacgaaaaaatggatcggattttgcggttcttttttctgcagtacctcgacgtgacatgagcgtgaaagaggttcaagaatccattttctttttataagggctaaaaacgaatcacttatttttttggctttttggccccatattgtagggtggacctcgaaagataggaaagatctccctccaagacgtacatacgactttcatcgaatacggctttccacataattatatagggatctatgagatcgagtatggaattctgtttactcactttaaatttagtatctatttccctcattttccctctaggaccggaaatcctgtattttccatatccatacgatcgagtccttaggtttccgaaatattctgacttgctcctacggaacccaggtcgaaaggattgaaaaagtcagacattcacaaccactaatgaaggattcctcgaaaagttaaggattagtagttctttttcgaaatccattttgaaaaagaatggaatcgatcttatacatacgtgaggaaggtaatcaaaaaagaaagaagcagagttcttctttcttttataacttaggagctgcgcgagatgaaattcacatgcacggttttgcatgagagaaagaagcgaggaatcctctttttgactccgactccccagtccagtcgttgcttttctttctgttacttcgaaagtagctgcttcagctttagccacgtgaattctcgatatttcttttttatttctcatcaaacaaatgcatcttcttctagaaatcctagctattcttagcatgatattggggaatctccttgctattactcaaacaagcatgaaacgtatgcttgcatattcgtccatagggcaaatcggatatgtaattattggaataattgttggagactcaaatgatggatatgcaagcatgatagaggttcttccattatttcgtcttttattatgttagtggaacggggaaaatgggaactcagagatatcgaagagtaaaaaaggatggaataaaagagtgattggttgaaaagaaagagaaatagaataatgagaatgatatggatttacacaaacctctaatgattagaaactaaaaacgagatcttgaagtaattcgaacgatttcgattatcatttatttgtacttattagttacttctacccaatagagcttagaagttggaagtaataatttcttggttgattgtatccttaaccatttcttttttacacgaggaactcatcatgaatccactaattgttgttgctttcgttattgctgctagattggccatagggcttgcttctattgggcctgaagttggtcaaggtactgctacaggacaagctgcagaaggtattacgagacagccagaagtagaaggtaaaataagaggtactttattgcttagtctagcttttatgaaagctttaacaatttatggactggttgtgacactagcgcttttatttgcgaacccttttgtttaatcctaaaaaagaaaatgagtcatttagattagatactttttttctttttttagtacattagtatttgcttatgtaattctaagtatatcaatactttactttactcctatttattatactatttcttttttatattatttcggaaattttgtatttatcaagatagacaataccctatgaaccccaagaagggctgatttgagcatgatcaatttagaggatatgctcgccctctttcttcacatccttagtttaggacagtggaaagtatttttccttttattttaggaattttgggaacatttcaacaaaagagatctttcataggtcaaacgagacctaagacttaatctaaaagaaattattagattgaatctatatgcattaaaaaacgataaaacggacgagcgaaagtaagtaatcgaaaaactttattttttgttcgtcctatctataagaggagagcatatgaaaaatgtaacctattcttttgttttttagctcactggccattcgttgggagtttcgggcttaataccgatattttagcaacaaatctaataaatataactatagtggttggtgtattgatttttggaaagggagtgtgtgcga

SEQ ID NO: 131994 - DNA, 1188 bp, Zea Mays
tttgaacgtaacaggctaacagcccagcccaaacatccggcccaccagatggtcgtgagtgtccgcacgaacccatcacacgctccgcccactcccccaggcgcacggccgcacctctccacctccggcgactaccaccagtccaccaccatggcggccacctccctcgcgcgcctctcccgacgcgccaccatttccgctaccgccgcggcgccctccctccggcgcctcctctcagtaacctccacagcctctgtcgcggcatccgccccgccgccgccgcccagcgcggccggcgccgcggccgtgggcgcggatcgggtgcggtgggactaccgcgggcagaggaagcttgttccgctgggacaatggatgcccaaggtggccgtggacgcttacgtagcccccgaggccgtgcttgccggccaggtcaccgtccacgacggcgcctccgtctggagcggcgccgtcctgcggggggacctcaacaagatcacgctcggcttctgcgccaacgtacaggagcgatgcgtcctccatgccgcatggacggctcccacagggcttccagctgagacactcgtggaccggtacgtgacagtgggcgcctactgtctgttgcgctcttgcaccatcgagcctgagtgcatcattggccagcactctgtcctcatggaaggttcgctggtggagaccaactcgatcctcgaagctggctctgtattgcccccaggaaggcggattccgaccggcgagctctgggctggaagcccggccaggttcgttcggaagctgaccaatgaggagatcatggagattccgaagctggcaactgccatcaacgatctgatgcagagccatttctcggagttcctgccttactctaacgcttatctggaggtagagaagctgaagaagtcgttctccatccccctgtaacagcctgttgccctcactcgtccagttgaatggacgaggaagtaaataaaggtgcccaaatactagatgttttgcgttgaaatctaacttgtgctgggtttgatctgttacgtcccaaatttttttgttcattgttgttgtgagcatggggacacgtgcaggaatgtcttgtgtctttttacccaacccaatggacattatgttctgcaaatttcacctgtactgtgttctgtgaatggtgccattgct

SEQ ID NO: 131995 - DNA, 796 bp, Zea Mays
attaattactccccctcccttgcatcacccagctgcttcagacgagcgagcgagcgagcgagccaccgcccgagagagagagagagagagagagagagagagggagagtgagagtggggattcaagtttcaaactcactatcgaggggggataggaaggtggtcactcatcggtccacagctagctcgtcgccccccatggctgactggggccccgtggtgatcgcgacggtgctgttcgtgctgctcacgccgggcctgctgttccagctgccggcgcacggccgcatcgtcggattcggcaccatgcacaccagcggcgtcgccatcctcgtccacgccgtcctctacttcgcgctcatcaccatcttcctcatcgccatcggcgtccacatctacgccggctagctagggccgggtgtcttctagtccacacccccttcgtctcttcctctcatcatcggcccctgctagcttcctagtcatgtactactactagtcttcgtttggcggatgatgcgcgcatgctagcttagctgcggcgaacaattaatccggacgccggataccccgcagtatgttggtatttattatgggattgttatggtgttttatattgttccagctccttccgtcgtcttaacgcttggttgcgcatccatttcactgaagatggtccggccgggctcttgattcagtctgaacagttgtgtgtgtgtgtatgtgtttatacaagactcagaatgaacacttactggctgttggtttgattatatccctggggttcgttcgttccg

SEQ ID NO: 131996 - DNA, 714 bp, Zea Mays
ggccaaggcatcgggttcctgacggctgccgtactctactctagtctagtctctcctccgcagatccataaaccactccacactccccctctcctagtctcctctccacactcccgctctcctgctactctgctccgtgatctggtctggtgagatcggggatcggaccgtcgactcgacaaacatggcggactggggccccgtggtggtgggcgtggtgctgttcgtgctgctctcgccgggcctgctctgcgagctgccgggcacccaccgccacgtcgacttcggcggcttccacaccaacggcaaggccatcttcgtccacaccctcgtcttcttcgccgccttcaccatcctcacgctcgcgctccacatccacatctacaccggctagctagctagtgcggagcatatgttgcgtcggtctggactcgcggaggtctcagatcagaaaggaacgccggccggcggcgcgtcctgtgttgctgctcttgttcctctgcagttcgatcgattcgaccaagtgcttgtaactgcctagcttcctcgttgctatgctagttactctctgctatctatcatgtaaaggccgccatggtcgtccatctgtagctgggcttgcagcaacaggaactagtgcgtgccctttaattaatggaatctgttcgttggttgcttaattaattcgcactccgttcgtcccgatttccggtc

SEQ ID NO: 131997 - DNA, 516 bp, Zea Mays
agatcagggagtccaaacgggtcgcacccacctgccaggctgccacccgcaatccgcaacagggacaccgggcacagcccacaagatgagcagcggcggcgacagcttcaggcccggtgttcactactaggcctggtacgccagtacggtgtcgtcatcaagctcaactccggcgtcgactaccgagcaaactgaagaatacgtcaatggtcagctgaagaaagaagaaggtgatgccttcataagaggaaatggtggtgcggattatatgatgtgaatattctgagatctatgtcgggcaaattcttgtagcagtcttctgaatatgcagttctgtacatcagtatacccaagcgtacccttgcagacaattaggaagatggtgaaagccaaaactgctgctataaaaaaacacaagccgatggattaaagccgcagcgaacaggctttagcgccggtctggcaaaacttggtcgtttatgagagactttaatatattgtacttttttgttatca

SEQ ID NO: 131998 - DNA, 571 bp, Zea Mays
ggaggaatgccagaaccgagatgttggcaattggctattgcatcgatgcagggaaaggtggacatgatctatatgaagtaattgttctttctgaagctattgtatcatgactgaagtgaggttggactcagagagtccgaccttccagggatggaggtggccaagacggtggcgctcgtagcgctgggagcgctggccaccaggttctgcagcgcatggaagcatagaacgaggaggtatgctgcctcgtgttgctcgcagtggtggaagaggagaccgtcgcgtggaggcaagcctactactacaggctacagctactacaacgggttcgtgtgtgtgtccgtcttgttggaggcaccctcgctgtggactatgcagaaggtgccctctgcgccaaaggaggtggactggtggaggctgaggtggtagtagcggcctcccctgcggcagggaagggcgtctacgcgatgtgctccaaggtccaagccaacgatgctcctatgcaagagatgcaagagtgtcaagtactggtaagtgaggtctattcctgcacttgtttccgctctctctg

SEQ ID NO: 131999 - DNA, 1501 bp, Zea Mays
ggccgcataacccttcttcctcctcgatcgatcggctctagctctcctgatcccatctcctcctcgaccacgaggaagccaaacccttctttgtctctagctagtgtgcctctgctgcacgtacacgcactctctctcggctagctagctgctgctctgcgttctttcaattcagctcagctcagctccttctatatattttggcttagcttcgtcctccggcccgaccggtcaatccatcgtcgagtccagcgcctgctcctgcctcctgcacgctgaacctgtagccgcagaatatgcctccagccgtcctccaagagccatgaataacaccagcaatagcaccaagaagcacagcctcctcgcgcccaaggccaccgtggacatgtctcgcctgcaccaggcctacgaccgcggctagctaataggccgggttgatagtcttttgatctgctgtggtcgttagcttgttgaacagaaaaacctactgggttgatagtgtttgccttgtgcagttgtgctagcttagcttgtttgcggctcagttactacgccgtttaattactgtcgtaagttcgttcgtaatcgtaacatcaatgaaggaaggaggcgagaagaagaacatcctgtccaagacgctgcagaggtgccggacctcgctggcccaacggaggaggccgccaccgccggcggcaccgaagagggcggcgtcgtcgccgtccctgggcgtgcccccgccgccgccggtgccagccgccggctacttcaccgttctggtgggcccggagaaggagcggttcggggtgcgcgcccgctgcgccaaccacccgctgttccgggcgctgctggacgcggccgaggccgagtacggcttcgccggctgcgacggcccgctcgagctgccctgcgccgtcgacgacttcatggaggtcatgtgggagatggagctgggcgaccccagcgcgtcgcctggctgtggacgcttcgccgccggcagcactagaggctaccaccacgtgcaccagctggccggctaccagttggtggtgagcccgccggcgaggttcctcgtcgctggccgttaattcaacagagcacctgcttgcatgcattgctagctgcttggacgcccggccggcgacggtggtctaaaatggtctggtcgtatcgtcggttatggttgagcttgagcttgaacactcttttcttcctcttcttcttcggcgtcatcataagtagactagagatccgggcgcgcgcagaactttgttcaagtgcttgctgcttgctttactttgccgtctgttaacgtttgtttcactctctttgccttttcatcgcaagtgtactccatagatttgtttttgtgtctttgtaactctcatgttgtcttcaaatcgtttaattaacgatgtatgtatgcatgtatatacatcgtgtttactgtaacgagtgtaacacgttaaatacatataatagaagtggtgtatgtatgttctgt

SEQ ID NO: 132000 - DNA, 2007 bp, Zea Mays
atcttcgcagcattgttgctgtccgaggtcagccgccctctctctctcctcgtgctccgattcgtgggctcgagctccggtgactaggaacagcggcaaggaaacaatgcttctttctcccttcgcacctttgtgatgcactgaacactagtcaggagctctagtaatcctctaatggccgaatgttcattggcaacgctgagagtgagaggccagtatcaagggagatggacctggtccaacagcaagttgaatatgccaatcatggatccaaagaggaactacgccctcaagattcatcttccatgccaatccaaagcagcaagagaatggacaagtgttgcatttaccccttttggttttcatggaagggatcacagggtggaaacttcagttaaatgttactgtttgcagccactcatggattcggagagcatggtctcaccaaatctaatactgatttcggatgaagctcttctcactatcagcatggtttttgcatatttggctggagttgtaccctctgggcagacatctcctcgtgtcagaaatcagaatgtttctcaacatattccagagccaagctcctctcattctggtagggacctaaagttcttgcctgaaaggaatgctgcatttgaccccaacgatatgtggagtgaagtgagtgctaaactttccaaagccttacaagcacatgttcaagatgcccttttggatagccgagaggatggactcatgagtgataggaaaaactatcctttgagtatgcttgccattcatgctggtcccagattgcggcttcttctgatcacattccagcttctggaaatggaggtaagaaatatctctggaagttctgaactcgatggaatcaggtggttgcaagtatcgactaccttgatagatagtttaattcaaccagtatttatgaaatggattgaagaagaacaggccttggaaaatggacaaatcaacgaaaaacttatgaagacgataagcagcaaactaaaggagggcaataagatcttgaggaggtttaacagatttgggaaatctgaactctatttggatatgctctttttcctaagatttggttctgcaaggtgtgacagttattttaatgtcaaatttcttgctgaacatggagaaagaattttagaggaccttgttatttccttagctgatgtgattgctagtatttatctggagcttatgtcagtggatggtgatatgtctgctgaagttgttggttccagcttggttctatgttctctatcaaccagagaactccaaaagctgcgcaatgaggtggcaattaattggtggttgcaccaatacttcaagtcagttgtttcaatgtatgaggacaggttcgagttatatgttctatgcagcaaaaaatgtgaaaaaacagccgacaatcaagctgagagggcaaattggtggaggattgcatctggcaagcctaatgtgcttactcttgattatgttaacatcagtccattttcccttccagcaagaaggacaaaggaattaagagctttgattggatggaggtattacttcagcttattcttagagttgtcagatattgccatgcccttcataagggttgctatcagcaaagtgagctctgcggtgtcctacttctgggtgtcaatgattggaaggtctcttgggctgattttctcagggattagacaatcactaggctggaaataagcttatacggtcatacctgttgagttttgagtctgacttctgggactgaatgaatgtctgttaggttatgcattgtaaatctttgagatggctgtcatttttctctgctttctttttcatcttagtgtgtaagaaagtccattgatttcgtggacggaatatgttaatctgtggattactgaaatccatccacatccagtctttctcaaaacagaattcatgtacacgaaatgtctagatgcatttttgtttttttattcaagagggacggaacatcatatt

SEQ ID NO: 132001 - DNA, 1509 bp, Zea Mays
gtaaaaccttataaaaggttcgatatatatataactggtcaaaattgatagggaacgacttagaacaaacttaaaataactaaattaaactaaattatatggacgaaggggtaggtacctactccacagtacttaatttcctctagtagttaaccgaaacacggtagatactgaatgaatgtgttgcaagaaacatactgatctgtctacttttgcttctcccctcttcgcctcttcaataattcggtgtgcaaagatgttgagaagagaaccgtgaataccgattttgcaggtcaccaaggacgggtgcccaatcatcttccatgacaacttcatcttcacacaagacgatggtaagatttcacaaaagcgtgtggccgatattcagctggaagacttcctgcagtatgggctccagaatgagcaggggaaggttggcaagcccctgcttcgcagattgaaggatggcaggatggtgaactggaacgtgcaatcagaggacgctctttgcacactcgaagaagcgttcgagaaggtcaatccaaggttgggcttcaacgtcgagctgaaatttgacgacagtcttgaatacaccgaggaagagctcactcgcatcctccaggccatcctgaaggtggttttcgagtacgccaaggacaggcctatacttttctccagttttcagcccgacgctgcgcagctcatgcgcaaattgcaaggcacataccctgtctacttcttgacgaacggagggacggagctatacgccgacgtgaggaggaactcgctggaggaggccgtcaagctgtgccttgccggtggcctgcaaggaatagtttcagaagcccgcgggatcttcaggcaccctgccgccgtgccaaagatcaaggaggctaacctctccctgctaacctatggaacattgaacaacgtgccggaggcggtgtacatgcagcacctcatgggagtgaacggggtcatcgtcgacctggtgccggagatcaccgaggcagtctctgagctcatcgccctgcccgagcccgacctcgacctggaagtgggcagcttgagcaaccaggcggcagctagaggagccacaacaccgaatttctcgcagcgcgagatctcgttcctgctgaggcttattcctgagcttgtccaataatgcctagacttcctggtgtctgtctgtctgtctatcatggatgaattgactaatgtgttactgatgtactgatccgcatacaagaaaagaagcccttgtgcagggtattatttgttgtcgtgggttgatttgtctgtcctgaagcttgtcctgctcccagttttacttttttcttaagtaaaagttactgtaggaggtctacagtatttttttgcttaaggaaacaagattggggtgaagatacaggagggtgagtatagaaaaaaaatagagttacagaacagaataaagaagccaggttctaattttatctcctattactggcttaactcgatgactaagaa

SEQ ID NO: 132002 - DNA, 1635 bp, Zea Mays
cgcctcccggttcccttccccgtcgcgacctcgccacccaaattcatcaagctcaacacgatctcgattcgattccagttcatccatccaacgcctcccgcctgtacgtatagaagaaagaaggaagaaccgtcaccgtacgtcctcgccagtacaaataatggccctgctcaaagccgcgcgcgtcgccgatgtgcccaccctggacgtggtggtggcccccggcctggtggcggttgccaaggcgaggagcgccgcggcggtgggcggccggttctcggtgatcgggcaccgcggcaaggggatgaacgcgctggcgtcggaggacccgcgtctgcgggaggtccgcgagaacacggtccgctccttcaacgacgccggacgattccccgtcgactacgtcgagttcgacgtccaggtcaccaaggacgggtgcccaatcatcttccatgacaacttcatcttcacacaagacgatggtaagatttcacaaaagcgtgtggccgatattcagctggaagacttcctgcagtatgggctccagaatgagcaggggaaggttggcaagcccctgcttcgcagattgaaggatggcaggatggtgaactggaacgtgcaatcagaggacgctctttgcacactcgaagaagcgttcgagaaggtcaatccaaggttgggcttcaacgtcgagctgaaatttgacgacagtcttgaatacaccgaggaagagctcactcgcatcctccaggccatcctgaaggtggttttcgagtacgccaaggacaggcctatacttttctccagttttcagcccgacgctgcgcagctcatgcgcaaattgcaaggcacataccctgtctacttcttgacgaacggagggacggagctatacgccgacgtgaggaggaactcgctggaggaggccgtcaagctgtgccttgccggtggcctgcaaggaatagtttcagaagcccgcgggatcttcaggcaccctgccgccgtgccaaagatcaaggaggctaacctctccctgctaacctatggaacattgaacaacgtgccggaggcggtgtacatgcagcacctcatgggagtgaacggggtcatcgtcgacctggtgccggagatcaccgaggcagtctctgagctcatcgccctgcccgagcccgacctcgacctggaagtgggcagcttgagcaaccaggcggcagctagaggagccacaacaccgaatttctcgcagcgcgagatctcgttcctgctgaggcttattcctgagcttgtccaataatgcctagacttcctggtgtctgtctgtctgtctatcatggatgaattgactaatgtgttactgatgtactgatccgcatacaagaaaagaagcccttgtgcagggtattatttgttgtcgtgggttgatttgtctgtcctgaagcttgtcctgctcccagttttacttttttcttaagtaaaagttactgtaggaggtctacagtatttttttgcttaaggaaacaagattggggtgaagatacaggagggtgagtatagaaaaaaaatagagttacagaacagaataaagaagccaggttctaattttatctcctattactggcttaactcgatgactaagaa

SEQ ID NO: 132003 - DNA, 1319 bp, Zea Mays
gtaaaaccttataaaaggttcgatatatatataactggtcaaaattgatagggaacgacttagaacaaacttaaaataactaaattaaactaaattatatggacgaaggggtaggtacctactccacagtacttaatttcctctagtagttaaccgaaacacggtagatactgaatgaatgtgttgcaagaaacatactgatctgtctacttttgcttctcccctcttcgcctcttcaataattcggtgtgcaaagatgttgagaagagaaccgtgaataccgattttgcaggtcaccaaggacgggtgcccaatcatcttccatgacaacttcatcttcacacaagacgatggtaagatttcacaaaagcgtgtggccgatattcagctggaagacttcctgcagtatgggctccagaatgagcaggggaaggttggcaagcccctgcttcgcagattgaaggatggcaggatggtgaactggaacgtgcaatcagaggacgctctttgcacactcgaagaagcgttcgagaaggtcaatccaaggttgggcttcaacgtcgagctgaaatttgacgacagtcttgaatacaccgaggaagagctcactcgcatcctccaggccatcctgaaggtggttttcgagtacgccaaggacaggcctatacttttctccagttttcagcccgacgctgcgcagctcatgcgcaaattgcaaggcacataccctgtctacttcttgacgaacggagggacggagctatacgccgacgtgaggaggaactcgctggaggaggccgtcaagctgtgccttgccggtggcctgcaaggaatagtttcagaagcccgcgggatcttcaggcaccctgccgccgtgccaaagatcaaggaggctaacctctccctgctaacctatggaacattgaacaacgtgccggaggcggtgtacatgcagcacctcatgggagtgaacggggtcatcgtcgacctggtgccggagatcaccgaggcagtctctgagctcatcgccctgcccgagcccgacctcgacctggaagtgggcagcttgagcaaccaggcggcagctagaggagccacaacaccgaatttctcgcagcgcgagatctcgttcctgctgaggcttattcctgagcttgtccaataatgcctagacttcctggtgtctgtctgtctgtctatcatggatgaattgactaatgtgttactgatgtactgatccgcatacaagaaaagaagcccttgtgcagggtattatttgtttatagaaaaaaaatagagttacagaacagaataaagaa

SEQ ID NO: 132004 - DNA, 1445 bp, Zea Mays
cgcctcccggttcccttccccgtcgcgacctcgccacccaaattcatcaagctcaacacgatctcgattcgattccagttcatccatccaacgcctcccgcctgtacgtatagaagaaagaaggaagaaccgtcaccgtacgtcctcgccagtacaaataatggccctgctcaaagccgcgcgcgtcgccgatgtgcccaccctggacgtggtggtggcccccggcctggtggcggttgccaaggcgaggagcgccgcggcggtgggcggccggttctcggtgatcgggcaccgcggcaaggggatgaacgcgctggcgtcggaggacccgcgtctgcgggaggtccgcgagaacacggtccgctccttcaacgacgccggacgattccccgtcgactacgtcgagttcgacgtccaggtcaccaaggacgggtgcccaatcatcttccatgacaacttcatcttcacacaagacgatggtaagatttcacaaaagcgtgtggccgatattcagctggaagacttcctgcagtatgggctccagaatgagcaggggaaggttggcaagcccctgcttcgcagattgaaggatggcaggatggtgaactggaacgtgcaatcagaggacgctctttgcacactcgaagaagcgttcgagaaggtcaatccaaggttgggcttcaacgtcgagctgaaatttgacgacagtcttgaatacaccgaggaagagctcactcgcatcctccaggccatcctgaaggtggttttcgagtacgccaaggacaggcctatacttttctccagttttcagcccgacgctgcgcagctcatgcgcaaattgcaaggcacataccctgtctacttcttgacgaacggagggacggagctatacgccgacgtgaggaggaactcgctggaggaggccgtcaagctgtgccttgccggtggcctgcaaggaatagtttcagaagcccgcgggatcttcaggcaccctgccgccgtgccaaagatcaaggaggctaacctctccctgctaacctatggaacattgaacaacgtgccggaggcggtgtacatgcagcacctcatgggagtgaacggggtcatcgtcgacctggtgccggagatcaccgaggcagtctctgagctcatcgccctgcccgagcccgacctcgacctggaagtgggcagcttgagcaaccaggcggcagctagaggagccacaacaccgaatttctcgcagcgcgagatctcgttcctgctgaggcttattcctgagcttgtccaataatgcctagacttcctggtgtctgtctgtctgtctatcatggatgaattgactaatgtgttactgatgtactgatccgcatacaagaaaagaagcccttgtgcagggtattatttgtttatagaaaaaaaatagagttacagaacagaataaagaa

SEQ ID NO: 132005 - DNA, 1486 bp, Zea Mays
cgatcacacagcaatttgactgaccgcgtctgtccttccgaccttgccgttttgctttgcaggtaacataatctcgctgatggtgttcctttcgccgctgccgacgttctaccgcgtgtaccgcaagaagtcgacggaggggttccagtcgaccccgtacgtggtgacgctgttcagctgcatgctgtggatcttctacgcgctgctcaagtccggcgccgagctgctggtgaccatcaacggcgtcgggtgcgtgatcgaggcggcgtacctggccgcgtacctggtgtacgcgcccaaggccgccagggcgctgacggccaagatgctgctggggctcaacgtcggcgtctttggactcgccgcgctcgccaccatggtggtctccagcgccggcctccgcgtgcgcgtgctcggctggatctgcgtcagcgtcgcgctcagcgtattcgccgcgccgctcagcatcatgcggcaggtggtccggaccaagagcgtggagttcatgcccatctcgctctccttcttcctggtgctgagcgccgtgatctggttcgcgtacggcgcgctgaagagggacgtgttcgtggcgttccccaacgtgctgggcttcgtcttcggcgtcgcgcagatagcgctgtacatggcgtacaggaacaaggagcccgcggcggtgacggtggaggaggcgaagctgccggagcacgccaaggaggtggtggtggccgcggcggcggccgaggccagggcgagctgcggtgctgaggtgcaccccatcgacatcgacatcgaagctacgccgacgccggtggaggaggtgcacgagccgcaggtggtcgtggtcgtcgacgtggacgtggagcctgtcacctgcgccggcgccgccgaggcagctgcgggagcaggggcagatgcgtccggcgtggccgacggcggcgtccctggacccatggcgccgccggagcagctggcgatcaagcccgacatggccatttccgtggaggcgtaggttggttaaagtgtaatagcagagtgagtcgatatcgatcagtagtagatttgtcgagtcaaggaaggggcctgctgctgctgctacgcgacagcagcggccagatgtactgcctgcatgcatgcagtccctcccgttgactcgacccgtagagaagggatgggatggaagtagccgggtccttgggcgagtagcggcgccttggcacccacgggccagccgtactggcctgtgtgatgaaccggcgagagagatgagataatgtgcgagcgagagagggttggttgggttgtggtagttgaagaagacggctagctagctgctgctgctgggctctctatctgtctctagatctgtgtatgtctgtgtaatcgaggattccctcaccttgcatgccgcctcccttttgtgtccttctagtctgatgattgttttcattccatccatgccggcgtcgcagtaataaaatttttttgg

SEQ ID NO: 132006 - DNA, 1852 bp, Zea Mays
ctcaggagctaatgactcacctctccgtgctcacctcctcttcttgaggcttgagctctctcttcctctctcccctcagctcatctccaccgtctccctatatataggatgctctgccggctccaaggttcccaagcgcccaaggcagcggagagagctagctccctcctcctcctcaggtagcgagcgagcgagctcctctgcccctctgcacacctggcctccccttctccgctgcaggaccgccgttgacgactgctccaccagtactgcgcgcgcccgcgctgcctacccttacctagccagagcgcggcgcgcgagagggagaacgaccaggaggggaggagatcgatcgatcgatcgatcgagatagatggctttcctcaacatggagcagcagacctgggccttcaccttcggtatcctaggtaacataatctcgctgatggtgttcctttcgccgctgccgacgttctaccgcgtgtaccgcaagaagtcgacggaggggttccagtcgaccccgtacgtggtgacgctgttcagctgcatgctgtggatcttctacgcgctgctcaagtccggcgccgagctgctggtgaccatcaacggcgtcgggtgcgtgatcgaggcggcgtacctggccgcgtacctggtgtacgcgcccaaggccgccagggcgctgacggccaagatgctgctggggctcaacgtcggcgtctttggactcgccgcgctcgccaccatggtggtctccagcgccggcctccgcgtgcgcgtgctcggctggatctgcgtcagcgtcgcgctcagcgtattcgccgcgccgctcagcatcatgcggcaggtggtccggaccaagagcgtggagttcatgcccatctcgctctccttcttcctggtgctgagcgccgtgatctggttcgcgtacggcgcgctgaagagggacgtgttcgtggcgttccccaacgtgctgggcttcgtcttcggcgtcgcgcagatagcgctgtacatggcgtacaggaacaaggagcccgcggcggtgacggtggaggaggcgaagctgccggagcacgccaaggaggtggtggtggccgcggcggcggccgaggccagggcgagctgcggtgctgaggtgcaccccatcgacatcgacatcgaagctacgccgacgccggtggaggaggtgcacgagccgcaggtggtcgtggtcgtcgacgtggacgtggagcctgtcacctgcgccggcgccgccgaggcagctgcgggagcaggggcagatgcgtccggcgtggccgacggcggcgtccctggacccatggcgccgccggagcagctggcgatcaagcccgacatggccatttccgtggaggcgtaggttggttaaagtgtaatagcagagtgagtcgatatcgatcagtagtagatttgtcgagtcaaggaaggggcctgctgctgctgctacgcgacagcagcggccagatgtactgcctgcatgcatgcagtccctcccgttgactcgacccgtagagaagggatgggatggaagtagccgggtccttgggcgagtagcggcgccttggcacccacgggccagccgtactggcctgtgtgatgaaccggcgagagagatgagataatgtgcgagcgagagagggttggttgggttgtggtagttgaagaagacggctagctagctgctgctgctgggctctctatctgtctctagatctgtgtatgtctgtgtaatcgaggattccctcaccttgcatgccgcctcccttttgtgtccttctagtctgatgattgttttcattccatccatgccggcgtcgcagtaataaaatttttttgg

SEQ ID NO: 132007 - DNA, 1678 bp, Zea Mays
ctcaggagctaatgactcacctctccgtgctcacctcctcttcttgaggcttgagctctctcttcctctctcccctcagctcatctccaccgtctccctatatataggatgctctgccggctccaaggttcccaagcgcccaaggcagcggagagagctagctccctcctcctcctcaggtagcgagcgagcgagctcctctgcccctctgcacacctggcctccccttctccgctgcaggaccgccgttgacgactgctccaccagtactgcgcgcgcccgcgctgcctacccttacctagccagagcgcggcgcgcgagagggagaacgaccaggaggggaggagatcgatcgatcgatcgatcgagatagatggctttcctcaacatggagcagcagacctgggccttcaccttcggtatcctaggtaacataatctcgctgatggtgttcctttcgccgctgccgacgttctaccgcgtgtaccgcaagaagtcgacggaggggttccagtcgaccccgtacgtggtgacgctgttcagctgcatgctgtggatcttctacgcgctgctcaagtccggcgccggcctccgcgtgcgcgtgctcggctggatctgcgtcagcgtcgcgctcagcgtattcgccgcgccgctcagcatcatgcggcaggtggtccggaccaagagcgtggagttcatgcccatctcgctctccttcttcctggtgctgagcgccgtgatctggttcgcgtacggcgcgctgaagagggacgtgttcgtggcgttccccaacgtgctgggcttcgtcttcggcgtcgcgcagatagcgctgtacatggcgtacaggaacaaggagcccgcggcggtgacggtggaggaggcgaagctgccggagcacgccaaggaggtggtggtggccgcggcggcggccgaggccagggcgagctgcggtgctgaggtgcaccccatcgacatcgacatcgaagctacgccgacgccggtggaggaggtgcacgagccgcaggtggtcgtggtcgtcgacgtggacgtggagcctgtcacctgcgccggcgccgccgaggcagctgcgggagcaggggcagatgcgtccggcgtggccgacggcggcgtccctggacccatggcgccgccggagcagctggcgatcaagcccgacatggccatttccgtggaggcgtaggttggttaaagtgtaatagcagagtgagtcgatatcgatcagtagtagatttgtcgagtcaaggaaggggcctgctgctgctgctacgcgacagcagcggccagatgtactgcctgcatgcatgcagtccctcccgttgactcgacccgtagagaagggatgggatggaagtagccgggtccttgggcgagtagcggcgccttggcacccacgggccagccgtactggcctgtgtgatgaaccggcgagagagatgagataatgtgcgagcgagagagggttggttgggttgtggtagttgaagaagacggctagctagctgctgctgctgggctctctatctgtctctagatctgtgtatgtctgtgtaatcgaggattccctcaccttgcatgccgcctcccttttgtgtccttctagtctgatgattgttttcattccatccatgccggcgtcgcagtaataaaatttttttgg

SEQ ID NO: 132008 - DNA, 2013 bp, Zea Mays
ctgtccaccaccactcgagagaccgctgctcgcttccttcgcttccgctccaaaaacccaataaaaaaacgcacctttccttcccctcgctttccccctccttcctcccctcgatcccctcgccgggaaagatccgatcccatccacctccactccacgtcgcggcgcaaccagagttccccgtcggcgaagcaggaagtcggaagcgaaaggaatgttgcacctttgaagcggcgcggcgacccggtgtttcttcctggccggcgatgggctgcttctcgtgcttcgactccccggcagatgagcagctcaaccccaaattcggtgccgactgtgggtacggcggcacctctgcggccgcggcgtacggagccggcttcggccggcacggggacagggggtacccggacctgcagcaggcgcccatggcggcgccgcgcgtcgagaagctctccgcagcggctgagaaagcaagagctaagagtaatgggctcaccaaagaggcttcagtgccaaaggatgccaacggcaatgccatctcagcgcagactttcaccttccgtgagctcgccaccgccaccaggaacttcaggcctgaatgcttcctgggagaaggaggttttggacgtgtttacaagggccgcctcgagagcacaggccaggttgttgctataaagcagcttaacagggatgggcttcaaggaaacagagaatttctagtagaagttctcatgctcagcttactacatcatcaaaacttggttaatttgattggctattgtgctgatggagaccagcgacttcttgtttatgaatatatgccctctggatcacttgaagatcatttgcacgatatacctcttgataaagaggccttggactggaacaccaggatgaaaattgcagcaggtgctgccaaaggactggagtacctacacgacaaagctaatccaccagttatttatagggatttcaagtcgtcgaacattctgttggatgaaagtttccacccgaagctctctgactttggacttgccaagttgggtccagttggcgacaaatcacacgtctcaacacgtgtaatgggtacatatggttattgtgcaccagaatatgctatgacagggcagctgacagtgaagtctgatgtgtatagctttggggtcgtcttgctagagttgataactggtcgtagggctatcgacagcaccagaccacatggagaacaaaatcttgtctcatgggcacgtcctcttttcaacgacagaaggaagctccccaagatggccgacccaaggctggaagggcggtaccccatgcgcgggctgtaccaagccctggcggtggcttccatgtgcactcagtcggaggccgcttcgcggccactgatcgcggacgtcgtgaccgctctgtcctacctggcgtcccagccgtatgaccccagcacagctttcgcttcaaggaggcttggtggaagcaagcctggcgagaacggtggcagggtggtttccaggaacgacgagaccggaacctcaaggtcgctggggaaggaccgggaggactcgcccagggacctcccggctatcctcctgaacaaggacctcgaacgcgagcgcatggtggcagaggccaagatgtggggcgaccgggagcgcttggtggcggaggccaagatgtggggcgaccgggagcgcatggtggccgaggccaagatgtggggcgagaattggcgcgacaagcggcgcgctgagaacgggcagggcagcctggactcgccgcctactaggaacagctaggggactggggagagcctttcacacatccatccatgcttatcggttgtttatttcctggtcgattttcgtcgccgcggcgggcaggggcagggtcagggagggtagatgtacatttctagggcagcgtcgtactggatagtgaatgcatttggttgtacttgtaaattctcagaaaaattttgtgagaatgaaaggacgcattttgagttccactcgt

SEQ ID NO: 132009 - DNA, 1639 bp, Zea Mays
aggttgtggggagatgaactcgtgtgtactgatgcgatcacaacatggtagtttaaatagtgattctctttgtccgagtcggactgcggactagcttactgaatctaccccttgtaacctgtctatgtgtgcagcggctgagaaagcaagagctaagagtaatgggctcaccaaagaggcttcagtgccaaaggatgccaacggcaatgccatctcagcgcagactttcaccttccgtgagctcgccaccgccaccaggaacttcaggcctgaatgcttcctgggagaaggaggttttggacgtgtttacaagggccgcctcgagagcacaggccaggttgttgctataaagcagcttaacagggatgggcttcaaggaaacagagaatttctagtagaagttctcatgctcagcttactacatcatcaaaacttggttaatttgattggctattgtgctgatggagaccagcgacttcttgtttatgaatatatgccctctggatcacttgaagatcatttgcacgatatacctcttgataaagaggccttggactggaacaccaggatgaaaattgcagcaggtgctgccaaaggactggagtacctacacgacaaagctaatccaccagttatttatagggatttcaagtcgtcgaacattctgttggatgaaagtttccacccgaagctctctgactttggacttgccaagttgggtccagttggcgacaaatcacacgtctcaacacgtgtaatgggtacatatggttattgtgcaccagaatatgctatgacagggcagctgacagtgaagtctgatgtgtatagctttggggtcgtcttgctagagttgataactggtcgtagggctatcgacagcaccagaccacatggagaacaaaatcttgtctcatgggcacgtcctcttttcaacgacagaaggaagctccccaagatggccgacccaaggctggaagggcggtaccccatgcgcgggctgtaccaagccctggcggtggcttccatgtgcactcagtcggaggccgcttcgcggccactgatcgcggacgtcgtgaccgctctgtcctacctggcgtcccagccgtatgaccccagcacagctttcgcttcaaggaggcttggtggaagcaagcctggcgagaacggtggcagggtggtttccaggaacgacgagaccggaacctcaaggtcgctggggaaggaccgggaggactcgcccagggacctcccggctatcctcctgaacaaggacctcgaacgcgagcgcatggtggcagaggccaagatgtggggcgaccgggagcgcttggtggcggaggccaagatgtggggcgaccgggagcgcatggtggccgaggccaagatgtggggcgagaattggcgcgacaagcggcgcgctgagaacgggcagggcagcctggactcgccgcctactaggaacagctaggggactggggagagcctttcacacatccatccatgcttatcggttgtttatttcctggtcgattttcgtcgccgcggcgggcaggggcagggtcagggagggtagatgtacatttctagggcagcgtcgtactggatagtgaatgcatttggttgtacttgtaaattc

SEQ ID NO: 132010 - DNA, 113 bp, Zea Mays
ttttttcttcttattattgtagtaatcgcgacctttttaatcttaaacaggcgcttcttgtagttgttcgtattaaattgcatgcacatgtaccaactagttcatgtcaagac

SEQ ID NO: 132011 - DNA, 1003 bp, Zea Mays
atcactcaccaagactccaagcactcacctcctcagctcattgccagcctttggttccttccagctagcaaccggacggccagcaagccagcagactagtagctcttctcagttctcacacctactgtgtctgtgtgtgctcgcctttagcggcaagcgacccaccccccttcggtagcgagcgacaatgcagtacgcggcggcggagcaggcgtggtacatgccggcgaccacgacgatgatggcggagagcgcggtggcgcgcgtggagcggctggcgtcggagagcgcggtggtggtgttcagcgtgagcagctgctgcatgtgccacgccgtgaagcggctcttctgcggcatgggcgtgcacccgacggtgcacgagctggacctggacccgcgcggacgagagctggagcacgccctcgcccgcctcatcggctacggccccgccggcgcgcccgtcgtccccgtcgtcttcatcggcgggaagctggtcggcgccatggaccgggtcatggccgcgcatatcaacggctccctcgtcccacttctcaaggaggccggcgcgctctggctctgaactgtaggcaggccgcgcgccattgctggtgactcgtgtgccaacaggctacgcagcttcttccgttgtctaagttagttccttgttgctgtagaacctgatgtcacttgctgcaagctaatcaaactacgtactaagctacggtgataggaggatacatccatggacagggccggatggtggtagatcagtgatgcatcggattgggcttaatgtgtgtgagtagtgtgtgcaagagagaagagaggctggtaccgtgtgtgtgcttttttctcactacctactgcctccgtcggtgtttgtgtgtgcgtgcatgtggtgtttgacgcatgcgctggatttgctttgcttggggtgctacactgttaccaccactgttgtttaatttgatatcctttaattttaataccttgtttcctctca

SEQ ID NO: 132012 - DNA, 1791 bp, Zea Mays
cagtcaaacccaccgtcccttgcacgctcggcttggctgaagcggagagtttcctctgttcccccattccgtcgtgtcaccaccgccgccgccggagtgtgtcatcgccgattcgcctggtatggcagcaccgcccgggggagcggggatagtgtggcagacgccggccaacccgcccgagtcgcacgactacatcatccgcaacggtgaagaacagatgggctggaaagaccatcgttgacctcttcactgatgagttcaaagggcgttcccgcgattactatgtatgatgccattatttcctttgaatttcatgtaccatactgtttcttttcattacacgccattgtggttatatcattgtctgccaggaggtcctagttgtagagagatgtccataacaggcttgctactgaatgaagtctctgttgtttattgaaccccatcgtcttgaaccgtgcatcttcctttttatttaaaccttgtgcttcagattttgagctcattcatagtaacatatgcattgctgcatgtaagtgaaaggtgaaattgctaggttcatgcagtgaagtgtgggaggcttcaggttgatgggcaaatggttcacacagactatattgtgaaatcatcacaaaagataagccacttcttgcatagatacattatcctttacatgcttatatcataaaaatggcaagtgaatcaacaggcacgagccacctgtcttggcgggtgatatttcaatacttaagaatgaagttgatgtcgtaactatttgcaaaccagcttctgttccagttcatccatgtggtcaataccgcaagaatactgtagttgggattctgcaggcagagcatgggttaacacccctatttctgcatcggttagatcgtttggtttcaggcctccttatatttgcaaaaaatgccgacagagctgaatgtttcaggcaacagattgaagctggtctgctgcaaaaagaatatgtggccaaggttgttggggtttttcctgatggtgagcaaaccgtcgatgccaatgtaaatttcaacgcacgggaaggaaggagtaccgtggagattagtggtggtgctggtgaagaaccaaatggaaaacaagcactcactaggtttcaaaggatttgcacggatgggactcacagtattgtcttgtgcaaacctgtgactggtcgaactcaccagataagggtgcatctaaagcaagctggttatccaatagctaatgatgagctgtacctatcggggaacttttgtccacgatcaacaaaaggaacaaatgccagtaaaaaaattgcaccatcagatccagacagtagtgctgctgatcatggcagcaaagatgcaggaacggatgtggagtttgatatcgaccccatgtgcacaaactgtccaaatcttgctccagtaggttatgatagagatgaggaaggactatggttgcattgtgtgcggtacactggtcctgattggagctacgaatgtccttatcctgattgggcgttccttggtagcgtgtcaacaaagaagatgaagtcatgatgtagttcatggtgattggtgaatagtaagcccataaaaaaactgaacaatcaaatagtattgttttggcgttacctatgactgggcttccgaggttttcattcaaatcaaacacattagatccggttttcctcggcttctcattcagccaattcacggttcaaaatccactccttaaaattcaacatacattatcgcatccagcctttttgattggttccatatttacggc

SEQ ID NO: 132013 - DNA, 1514 bp, Zea Mays
cagtcaaacccaccgtcccttgcacgctcggcttggctgaagcggagagtttcctctgttcccccattccgtcgtgtcaccaccgccgccgccggagtgtgtcatcgccgattcgcctggtatggcagcaccgcccgggggagcggggatagtgtggcagacgccggccaacccgcccgagtcgcacgactacatcatccgcaacggtcggcgctacgtgaggccttactacttcgagttcatctcccatgtgaagaacagatgggctggaaagaccatcgttgacctcttcactgatgagttcaaagggcgttcccgcgattactatgttcatgcagtgaagtgtgggaggcttcaggttgatgggcaaatggttcacacagactatattgtgaaatcatcacaaaagataagccacttcttgcataggcacgagccacctgtcttggcgggtgatatttcaatacttaagaatgaagttgatgtcgtaactatttgcaaaccagcttctgttccagttcatccatgtggtcaataccgcaagaatactgtagttgggattctgcaggcagagcatgggttaacacccctatttccggtgcatcggttagatcgtttggtttcaggcctccttatatttgcaaaaaatgccgacagagctgaatgtttcaggcaacagattgaagctggtctgctgcaaaaagaatatgtggccaaggttgttggggtttttcctgatggtgagcaaaccgtcgatgccaatgtaaatttcaacgcacgggaaggaaggagtaccgtggagattagtggtggtgctggtgaagaaccaaatggaaaacaagcactcactaggtttcaaaggatttgcacggatgggactcacagtattgtcttgtgcaaacctgtgactggtcgaactcaccagataagggtgcatctaaagcaagctggttatccaatagctaatgatgagctgtacctatcggggaacttttgtccacgatcaacaaaaggaacaaatgccagtaaaaaaattgcaccatcagatccagacagtagtgctgctgatcatggcagcaaagatgcaggaacggatgtggagtttgatatcgaccccatgtgcacaaactgtccaaatcttgctccagtaggttatgatagagatgaggaaggactatggttgcattgtgtgcggtacactggtcctgattggagctacgaatgtccttatcctgattgggcgttccttggtagcgtgtcaacaaagaagatgaagtcatgatgtagttcatggtgattggtgaatagtaagcccataaaaaaactgaacaatcaaatagtattgttttggcgttacctatgactgggcttccgaggttttcattcaaatcaaacacattagatccggttttcctcggcttctcattcagccaattcacggttcaaaatccactccttaaaattcaacatacattatcgcatccagcctttttgattggttccatatttacggc

SEQ ID NO: 132014 - DNA, 974 bp, Zea Mays
ggaccgctactcctcgccgcacgccctcctgcgcgtacctggctcgcccgcgccgccgtggaatgcgtgtgtcgtctctgcttgtctcagcgagcgggtgataacatccatgcccttcgccctgttgccgcagggactggatcgcagctgctcttgtacgaggtgggtgctgccaggctcgttgcgtcgttccgagcgttcgacggggtgcgcgtccacggcatcgagccccggagcggaggccccggctgtcccagctacacgcttgcgttgtttggtgagaggagggtgaagctattctccctcggattcggtgttgaagcagatggcggcgaggcgcggctggagctggagcagatgctcccggggtttgaccattgggtgctcgacactcgtttccttgaggtcgatgggctgcttgcgattggtctgagtgacaattcagtagcgctgtgggatctgagcaagcgtgcgttggttacccgagtgaagtctccagagaagtgccttctatattccatgagaatgtggggagactctgttagagagtttcttgttgcatccgggaccattttaaacgagattctcatatgaaaattggcaccacaagttctgggatcctttatggtatgctccaatgaaggagatacttctgatgtaaacagtcccaaaattatgaatcctgatgatagtcagcacatgtcagttcatcttggtaggctcaaggagcatgaaggctcaatattccgaatagcttggtcctccgatggatcaaagtttatgtctatttctgatgaccgtaggttggtttatttcaatttgggctctcagtgactgcaccaggaacttttttagactacctttcatgagacttttgtgatgtaattgataagactatggatttaaatattgttatgtgattgtgtgtgagatgttttatgttaaaatatggtgtgctatatagttgttgatat

SEQ ID NO: 132015 - DNA, 849 bp, Zea Mays
atggccgcgccggcgatctcaggcgtagccgttgcggctgaggtggaggaggccggagctgccgcacttggggcacacgtcggcgcgcttgggcaccatgaagtacatgaagcaggcgcggcagccggccgccacgaggacgtggccggcgccgaggcgggcgccgccgttgtcgccggagccggactcgtcggtgggcgagaaggacgagagcgtcgacgagaccgccgacccccggctgctgcccgtgctgctggagctgctgctgctggtggtggtgctgctgctgctctcggcctcgtcctcgtcgtccgcctcgccgtcctcctgctcgtcgtcgttgtcgtacccgctgtcgttgctgacgccccgccacgcgccggtcacgacgtccgccgcgcccacggacgacgacacggaggtgtaccccgacgacggcgtggacgcgcgccgggtgcgccgagacgtggaggagcgcggtgtcggggaggagacgaaggccgacgccgtgcgcgggtccaccgtcgtccgggtgccgttctcccagttgatgtagtacacttgccccgtccggatgtcgaggcactgctcccagtggtagggcagtgccacctcggagttcagctccacggtgacgccgtcggtgtcgccgccgccctcggcgccgcggcgcctggtgcctccccggcgccgcccgccagcgccgccggtgagggagcagtggcgcagcgaggaggcgatcatctcgatgttgggcgcagtagtcatcaagaggccaggggggattatggggcgccccgggcggccaagtgggtgggtgggtgtgggtgtctgtgtggaggaagaagt

SEQ ID NO: 132016 - DNA, 2199 bp, Zea Mays
ggaacaagagggttgggacatgactatcccggtgttcccatttatccctcaaaattggaggaacgggagaggacgctagaaaatgtctctttcttgtcatgactgtcacacaacactgtcccgcaaccaaacagaccctaagttgagccacaaatgctaataagaaaaacaatataacggaaaccaagaaaaagggttagcctctctctacctagctgatccaattccacaggcacaagggaagaaaaaaaaacagtgacatgcatggaaaatacagtagggagaaggaagaaaaaaaaagaaatcaaggaatggttcctctctgctcccatacattgggcaattggcgtacaatgtagcagcaatgaatgaccaaagatcgggtttggggacctctcccctctctcctcaccaaaaactcgtagtactcctagttcttatggaagatctctagccaagagccaaacagaggtggcttgcattgcacgcacgactgcctgcgcctcaggagacgtcctccgatccccctcctacaattagcggagcgagcatatggccgcgccggcgatctcaggcgtagccgttgcggctgaggtggaggaggccggagctgccgcacttggggcacacgtcggcgcgcttgggcaccatgaagtacatgaagcaggcgcggcagccggccgccacgaggacgtggccggcgccgaggcgggcgccgccgttgtcgccggagccggactcgtcggtgggcgagaaggacgagagcgtcgacgagaccgccgacccccggctgctgcccgtgctgctggagctgctgctgctggtggtggtgctgctgctgctctcggcctcgtcctcgtcgtccgcctcgccgtcctcctgctcgtcgtcgttgtcgtacccgctgtcgttgctgacgccccgccacgcgccggtcacgacgtccgccgcgcccacggacgacgacacggaggtgtaccccgacgacggcgtggacgcgcgccgggtgcgccgagacgtggaggagcgcggtgtcggggaggagacgaaggccgacgccgtgcgcgggtccaccgtcgtccgggtgccgttctcccagttgatgtagtacacttgccccgtctgcacgaaaattagctcagagagaaaaaaaaaacgcaagacaccagctattaattaggttactgcgttaaacaaacagctagctgttggacaacgctatagaatctatttgcacgtagaccgttcctaatcatctttgttgcgttctgtttgtctgtttatacagtgcatacactcacacgaactagtggcattagaggtgggggtgggggtgtgcaggcactatgcaggtatcggggaacaggttgcaggaaggcagctggggcagggctggaaagaaggaaactccactccaccatgaccgcacacgccttccgcttcaccaacagcatctctgctgtctgagatggatcggaatcatggaaaggagctttccagcaaaaagccttgcccgatggcaaaacttttcgcctatgatgatgtgtttgcgtttcaaaagaaattttaaaaaaagatgctctttttgcttgggttctgtgtgaatttcttgctggggtggaatcagatgcaaaacaatgcaacttggttccaggaggaggaaagtaaacgcggaggggggaacagcttgagttgcgtatcacaggccttttcagttaataatgatgtgcttccttgctgcaggataagttggtgcgtgtcagatggaaaaactcaaagatctctctgcatctgcagtggggaacacgcgcttgagcagagcagttgattaggctgggtgattatggcccaggaccaaccagcaacagggtgcagaaccgctcgctgtggtccagaagaaatccgcggcgaaatctcgagttccagatacaaacagattagtaaaaagggacggatccgcagggatgtgtcaggattgagaacacggacagatctggactcgccttaatcacttccctgccgtatgaaattgggagaacgctagtagtataacagaacaaggagatggaaaaagaaatagtcttctgagctcgatcgaaccgagatgaaagataggttggttgttgttcttcgtctctctctctctctctctctctctctctctctctctctctctctcagagattcagggaggtcctc

SEQ ID NO: 132017 - DNA, 2324 bp, Zea Mays
gcgcctctcaccatttgggcccccgcgcactccgccccgcgacgagcgcgccaccacccccgcctctatttctttagcatcgccgcccccaagccatttctctccagcatcgccgccccccctctccgcctcaaggctctcctctcggaggtctgataggcaacccaataatggcagaagtcctatcaggatctcatgaacaccgtctaagctctgccttagatggacactacgacgagaagaggaaatccaatgtggaatacacagaggacgagaagaaagccgtgatcgcggctctgaaaaagaaggctttgagcgcctcacagaagtttaggcattccatgaagagggggaggaagagcagcaaggtgatgtccatctcgattctggatgagcgtgaacctgaggaggtgcaggctgtggatgccttccgccagcttcttgtacttgaagagctgctaccatcgcagcatgatgactaccacatgatgctaagatttctcaaggcaagaaagtttgatatcgagaaggcaaagcaaatgtggtctgatatgctgaagtggagaaaggagttcggtgcagataccattctcgaggaattcgaattcgaagaagctgataaggtggcagaatgctaccctcaaggttaccatggggttgataaggaaggcaggcctgtctactttgaacggcttggacagatcgatgtgaataggctaatgcaggtcactacaatggatcgctttgtcaagaaccatgtcaaggagttcgagaagaactttgctgttaagttcccagcttgctcaatcgccgcgaagcaccatattgaccagagcacaacaattcttgacgtgcaaggagtggggatgaagcaattcagtaaagctgcaagggagctcattggcatgcttcagaagattgatggtgacaattatccagagaccctgtgccgcatgttcatcatcaatgcaggccagggattccggcttctatggggcaccgtcaagagctttcttgacccaaagaccactgcaaagattcatgttctgggtaacaagtatcagagcaagcttctcgaggtgattgatgctagtgagttgccagaaatttttggtggaacctgccgatgtgaaggtggttgcatgaaggctgacaaaggcccttggaaggaccccgaaatcatgaagatggttcaaagtggtgatgggaggtgtggatcactcggtacggcctctttcgaggctccggagaaaatgatttgtgaagacgacacgtatcctaagaaacaagctttgtttgatggggaaacacaattagctggagacgagcattctcagtcacagaaaatttcccgtggccggattgaacatcctcacgtgtcacctcttcacgaggaacttatccccacttcaattcatacccctggatcaccctattcttgtgatgtcccgatggttgaagaggccatagacgccatctgcaagagccacggaacaccaccagatgagaagattgccatcaccaaagctattataaatgtatcgaatggatccaagcccccactctttgctggcatcatagcacttgtgatgagcatcgcaacgatggtccgtctgacccgcagcatgatgcctgggaaggttctcggtgctgccataggtggagctaccctctcagaaggtaaatcaaaagtacaagagcgccagcggtccaagctatcagaagaggctgtggaggaagctgaagacgccgtctctgcaaagcgcctctcggagcttgaggagaaggtcattgcactcctgacaaaacccgcatcaatgcctgctgataaggaggaggttctgcaggctgctgtctcccgcgttagtgcactggaagaggagcttgcagctacaaagaagaccttgcaggagactcttgagcgtcagttggagatcgttgcatacattgagaagaagaagaaaagcaagcgtttctttcgttggtagaagcaaacagcagtgaattgttcacgcccacgagaaaaaaggttttgcgtgtgatggaagcgagctggtgcttgcgtatgccagcaagctgcgattctgagtgtaacacataaggatgttctttcattcttcttttttgttcccttgttgcatcaaattgtgccttaaccacgtcgatgtgctgccaaattgtcaatccctgatacggtcaatcatggatggaccgactgcaatataaatatattataccacaaaatagcgcgacctttgctacgaacgtgttctgtatgtctctcttttttaaattcctactttctacatcttagattcaattcc

SEQ ID NO: 132018 - DNA, 2710 bp, Zea Mays
ctaccacgcatcgaccgtattaaccccacgccaccctgtccctttccccgcgccaccgccctctccgtcgccgccgttcgaccgagcgccgctcacccaccccacgagctcccgcgcgggttcatgtccatctctccacacgaacgcaccggaggagcctattacccgcgcccgcacaaccctagccctagtccccaacatggcagcgacagacgccgccacggccgccgctcccctccggcatccgtctcgccacccggcgccgctgcggaagctagcgacggcggggtcggctcgagctccaacccagtggttccagctattggagaatctattaatgctcccgaaaaggtagttggatttataatatctggggaagagaatgatacatgtacacaagaggttggcaatgtttcagaatgccactcttcagaacagggggattccggtttgcctgtagataattttggctcagttgggtcatatcctgagagacctaaaatggtgggatcccttcaggctgaccatttggcttcaggttctactggactgggtaatgggactcagatagctgccaggaagaatcagaccgtgaatgctaatcacctactgaatttccagtatgatcctatttctcggccacagcccagaggccctagaacatatcttccgagaagacaaaggaagataaaaccttacaacaaggatctgttcatccaagcaaactataagtttgttgtattggatactgggaattaccagattgattcaatggatcctgataagatgcttcagtgggaagatattatctgtgtaagatactatagcccttctgaggtacaatgccctatttgcttggaaagaccattgtgcccacagatcacatcatgcggacacatatattgctttccatgcattttacgttatctaatgatgggcaaagatgattatagaggtgagtgttggaagaagtgtcctctgtgtttcatgatgatatcatcaaaggatttgtatacaatacaaattactcaagtccagaatgtccgtgctggtgacgttgtcacatttacacttctgagcaggtcaagaaattcgctcactccttccatcaaaagctcctccagtgaaagttctacaacagatgaagagcattataatgttttctcaaagtttattttgacatctgatgtggagttgtctgttcgagatgcaaaattggatcttagtaattggttgcatatggctgacttaggccttgttgatgacttggagaaacttccatttgtttctgctgctttggagcaactggaagagaagacgaaatattggattgattacagaaattatggtggtagtcctccatcaaaagatagcttctctcctggatctagtttcaagtctaggaactcttttgatgtgaatacttctcagcagatgagtgagcacaagatctctctttcagatagagatatggtcaatggtatttcagaactctccatgtctcccgagttgagtaaaacctctggtaaaggaacaatatctaaagtaaatgagaaatgtaccacaaccattgattcaaatgaacatgacccatacacattttaccaggtgtcagatggccaacacctaattctccatccactaaacatgagatgtcttctaaaccattttggaggttctgatatgcttccacctagaataactgccaaaatattggagctggaaactgtaacacagtctgaggctataaggaagcgctatcggtttttgagtcacttctcattaacaactacatttcagttctgtgaaattgacttgagtgatgtagtgtctcctaactcactggctccattcttggatgaaatcaagaagcgtgagaaacaaagaaaacgagccgccaagaaggaagaaagtgagagagtgaaggcggaagttgctgctgctgttcaggcatcagctatgcgatttgagtatacaaattcctctcaaagtcacaacgatgtcatgttctctctggatgactttgaagccctgggaaacaacgctgggccgtccaccagtccaccagcgagtgaaaggaagcttttctctgatgtaacacgcttgggttttgcatctgctcaagactcacctcccttaagactcggaactggggatgcaaatggccaaagtgaaacctcgagagaccaagggccgttagcgacacccgcattatcatttgccagcatcatatcttccagtagagccgtgactgcagctgacaactcggagatgcagaaagcaaatggcgctgggaagaagggtaagaaagcaactagagtgcttttgtcgactggtggtggccgtcgatactgaaggactatagatgcattggaacgaacagtttggttgtttccatataatgccgtagctcaatgcaatgtgcatagtacataacctggctgggatacgcttgtaagttgtaacactgagcggcagtcgtgtgtgttttgcctttcttgtgggtgtgcttgcgttgtgcccacatcctgtcccttgcatgatctggaaacgagcgcagagaagcgtgtaccataactaataaaggtggcgcaacactttagttgtggaacgccgctagtctgcccggagtgtcaaaatctccaaaaatgtgtacttttgatcattgaacatagttcatcagggttcaaagattgtctgactcgctcca

SEQ ID NO: 132019 - DNA, 2563 bp, Zea Mays
ctaccacgcatcgaccgtattaaccccacgccaccctgtccctttccccgcgccaccgccctctccgtcgccgccgttcgaccgagcgccgctcacccaccccacgagctcccgcgcgggttcatgtccatctctccacacgaacgcaccggaggagcctattacccgcgcccgcacaaccctagccctagtccccaacatggcagcgacagacgccgccacggccgccgctcccctccggcatccgtctcgccacccggcgccgctgcggaagctagcgacggcggggtcggctcgagctccaacccagtggttccagctattggagaatctattaatgctcccgaaaaggtagttggatttataatatctggggaagagaatgatacatgtacacaagaggttggcaatgtttcagaatgccactcttcagaacagggggattccggtttgcctgtagataattttggctcagttgggtcatatcctgagagacctaaaatggtgggatcccttcaggctgaccatttggcttcaggttctactggactgggtaatgggactcagatagctgccaggaagaatcagaccgtgaatgctaatcacctactgaatttccagtatgatcctatttctcggccacagcccagaggccctagaacatatcttccgagaagacaaaggaagataaaaccttacaacaaggatctgttcatccaagcaaactataagtttgttgtattggatactgggaattaccagattgattcaatggatcctgataagatgcttcagtgggaagatattatctgtgtaagatactatagcccttctgaggtacaatgccctatttgcttggaaagaccattgtgcccacagatcacatcatgcggacacatatattgctttccatgcattttacgttatctaatgatgggcaaagatgattatagaggtgagtgttggaagaagtgtcctctgtgtttcatgatgatatcatcaaaggatttgtatacaatacaaattactcaagtccagaatgtccgtgctggtgacgttgtcacatttacacttctgagcaggtcaagaaattcgctcactccttccatcaaaagctcctccagtgaaagttctacaacagatgaagagcattataatgttttctcaaagtttattttgacatctgatgtggagttgtctgttcgagatgcaaaattggatcttagtaattggttgcatatggctgacttaggccttgttgatgacttggagaaacttccatttgtttctgctgctttggagcaactggaagagaagacgaaatattggattgattacagaaattatggtggtagtcctccatcaaaagatagcttctctcctggatctagtttcaagtctaggaactcttttgatgtgaatacttctcagcagatgagtgagcacaagatctctctttcagatagagatatggtcaatggtatttcagaactctccatgtctcccgagttgagtaaaacctctggtaaaggaacaatatctaaagtaaatgagaaatgtaccacaaccattgattcaaatgaacatgacccatacacattttaccaggtgtcagatggccaacacctaattctccatccactaaacatgagatgtcttctaaaccattttggaggttctgatatgcttccacctagaataactgccaaaatattggagctggaaactgtaacacagtctgaggctataaggaagcgctatcggtttttgagtcacttctcattaacaactacatttcagttctgtgaaattgacttgagtgatgtagtgtctcctaactcactggctccattcttggatgaaatcaagaagcgtgagaaacaaagaaaacgagccgccaagaaggaagaaagtgagagagtgaaggcggaagttgctgctgctgttcaggcatcagctatgcgatttgagtatacaaattcctctcaaagactcacctcccttaagactcggaactggggatgcaaatggccaaagtgaaacctcgagagaccaagggccgttagcgacacccgcattatcatttgccagcatcatatcttccagtagagccgtgactgcagctgacaactcggagatgcagaaagcaaatggcgctgggaagaagggtaagaaagcaactagagtgcttttgtcgactggtggtggccgtcgatactgaaggactatagatgcattggaacgaacagtttggttgtttccatataatgccgtagctcaatgcaatgtgcatagtacataacctggctgggatacgcttgtaagttgtaacactgagcggcagtcgtgtgtgttttgcctttcttgtgggtgtgcttgcgttgtgcccacatcctgtcccttgcatgatctggaaacgagcgcagagaagcgtgtaccataactaataaaggtggcgcaacactttagttgtggaacgccgctagtctgcccggagtgtcaaaatctccaaaaatgtgtacttttgatcattgaacatagttcatcagggttcaaagattgt

SEQ ID NO: 132020 - DNA, 1791 bp, Zea Mays
gatgaggcaaggcagctcatacgaaattagctgagtatgttttatgtttatatcactagaagatactagttgcgtatgagcaaccaacagaggctacacaacctagactgaaatttagaacggagcacatggaaatcgagtactcctatcacaagtcactcatgagtgagtcgcctaattaaacgccattgctcctaatccccttgcttaaacgtaaggcaacgcacgcaacccttcctttctctaccccctctccgtctcctccccagtccccctcccccacgcgtcccgccactcctctctcttccctttctctctcctacccgtcgttagccctccgttacaccacccgcctcacgccgtcacgtcaacttctgccacaaaaagtacgcgcctccgcccagccccccgcacccatgtccaccgccggcgaccccgccggcgcagcagcagcggcagcagctgctgctgcggcggcggcggcggcgcccgccccgtcagggcgcgcgccgaggctgccgcggtggacccggcaggagatactggtgctcatcgagggcaagcgcatggtggagggccgcggcgggcgcgctgggaggggccgcctggcggcagcggcggcggcggccgccgccgcagcgtcgggggaggcctcggcaacggcggcggcggcggcggcgctagagcccaagtgggccgcggtggcggagtactgccggcgccacggcgtcgagcggggccccgtgcagtgccgcaagcgctggagcaacctcgccggcgactacaagaagatcaaggagtgggagcgggccgcgccggccgagcgcgacccgtccttctgggccatgcgcaacgacgcgcgccgggagcgccgcctcccgggcttcttcgaccgcgaggtgtacgacatactcgagggccgggcccgcccagtcctcgacgaccgcgccgcccggaatgccgctgcggcggaagaggctgtggctgtggcggtggcggtgcacgtcgaggaggaggacagggaggcggaggtccccgaggccgtctttgacagtggccgcccggccacggaggaggccttgttctcggaggatgaggaggaggaggaggtagaggacgcaccggcggtggctcctcctccccctgcaccatcggttgtcgccgtgcctgtatctgagaaacccgaggcatcaaggcaccaacagagcgctgaacaaggcacatcgaaagacacacagcctgagcaaagctctgagagggacgcaccggctgagcagggtggacagaagagaccgcggaccgacgaagcggctggagaaggagaaggcacagcatacctgcagagcaagctgatcgagatcctagaccggaacagccggttggtggccgcacagttggaggcgcagaaccagaactgcgagctcgacagggagcaaaggaacgaccaggccaacagcctagttctcgtgctcggcaggctggccgacgcccttggcaggatcgccgacaagctatagaacattcagtcacctaggtgtatatgtgttgacggaaataattacagcaggaagatgacatttgtaagtgcatgtacagattggtgtagggctactggcattcgattcttttttgggccggttctggaaattctgtattgtggggggtggtgttatgtaggaaggggtcaggtttgtagcactcaaatgatattcagttgtgtggctgctgtagattctgaggctgtgttattgttaattgttatacagggacgcgagtaattattctcagcaa

SEQ ID NO: 132021 - DNA, 448 bp, Zea Mays
ttatctgcaaagtgctgcaacagttggaaatactaaacacacaagagataatgatgcgatctattaagcaggcacatcgaaagacacacagcctgagcaaagctctgagagggacgcaccggctgagcagggtggacagaagagaccgcggaccgacgaagcggctggagaaggagaaggcacagcatacctgcagagcaagctgatcgagatcctagaccggaacagccggttggtggccgcacagttggaggcgcagaaccagaactgcgagctcgacagggagcaaaggaacgaccaggccaacagcctagttctcgtgctcggcaggctggccgacgcccttggcaggatcgccgacaagctatagaacattcagtcacctaggtgtatatgtgttgacggaaataattacagcaggaagatgacatttgtaagtgcatgtaca

SEQ ID NO: 132022 - DNA, 654 bp, Zea Mays
attcaatatagcatagagtgacagaactgcttgaattgcaacgtacatggcaggaacattgaaagtctcgaacataatctgggtcatcttctccctgttggcctttgggttcaaaggagccttagtgagcaacacagggtgctcctctagggcaacacggagctcattgtagaaagtgtgatgccagattttctccatgtcatcccagttgcttacaataccgtgctcgatcgggtacttgagcgtgagaatacctctcttggactgtgcctcatcaccaacatatgcatccttctgccccatccctaccatgacaccggtgtgacgaggacgcccaacgatgctagggaatacagcccttggtgcatcatcgccggcaaaaccagcctagaagatagatacatataattagtggcatatttgggtgggggagactatgggtgtacaaattaaggggggaaagcactgaccttgaccattctggtgccattgtcacagacaagaggttggatgtcctcaccattagccatttctacagaactgctgcaggttgagtccgagccctggggtcgggcgaggcggagaccgtcttccggggtcgaggttgagtccgagccctggggtcggcgaggcggagaccatcttccgaggtcg

SEQ ID NO: 132023 - DNA, 1779 bp, Zea Mays
atggcctccggttcaggaagggcccgaggcggcggcatccgaatccaagaaccgggtagtaggcaccgcgatgagtccaacgccggcgccgccgccgcagctgcagagccgccgccaccctctccgtccaccgacggtctccaagaacggccccatgggccattgggagccgagagcgggagcccctctgcggccgccgccgcactgaaggggaagggggtcttggctccatccccactgccttccccgacccgctccgaggaaaccaactccctggtatcatccgacatcgtctccgacgaggaagccgaagagttgaggtccgccaacacgctcgcggacggtgacaggaggtttggagtgtcttggaagagcccgttggtggaggcgatgatggaggtgccgaaggtgacgaggcatatcgattcgaagacggcgttcgacaacttgtcgatggagcagcaatgggccctggcggaggagatagaaatgcaacagcggcagcaggcgcagcagaggaaatgtctctggatcacattcaaaggtggcatgtcaaacatgtttttggactggataggaaggcaaatgcacaacttcaattcagattctacagtaatcataccccatgtgaatcaccagacaatccctatgaccgggatcattgagcattacaacctcatggaaacggatgctggacgaggagtaatatttcattcaaatgtactgaaccttcgtcgtgcctattctgaatttaggccagtgcatggagatggagactgtttctacaggagcttcatgttttcctacctcgagcaagttcttgataggcaggatacacacgaggaacaccgtcttcttgctgctgttgaaggagtggctaggcatcatgcgcaccttgagtggaactccgaattttccctgagacacaaactacagcaaacagaaacttctcaagttcttcagcggttgtggcaggccagacaacaattggtagcagctatctggatatattcgcacagtgaagagtttgaaccacttatacccgagctcgatgaatatgacactctcagagaatggtgctctcaggaagtaatcaggcataaggttttcacagatcatgtccagatgacagcattggtcaccgctcttggggtgccgctgcgagtggagtacctcttacaagtaggagatggtcaagacctctacgatcgtcaggaggattcgcaagactatacgccaacaagtacatgttggtctagtcatcgtcgtcaactaccccatgttcatgtagtcccccgtgtgaccgtgctctacacaaacgctcactatgacatcatctatccccaccgtcgcgatggtcctcctgttccttctattgatgagagatgttgtcagcagactgcactggtacagcgcccaactactgagagttcaggtcaacaaattgcccagagagatagctgcagtggtactggtgagagttcaagccaacatattgctcaggtggagatctccactgatgagaattcagatcaacatgcagagctaaagttgacttctactgatgcccatgagtatgatgatcattgctgagtgaagctataggtagagaattagggcattaggcacacactgatgactgagatagctgatattctggactttttgttacattggtacaaactgctggtgccaactggagatcagtagctactcctcccttatatgaaaactctgcaaaggatgagaatcaggcatacagtgatgaggtagcaatta

SEQ ID NO: 132024 - DNA, 1379 bp, Zea Mays
atgctttttgcttcctccccaaagcaagcaaacctccataccgtaatcacagtgacaggcaccatcagtctctctccccgctcccgattgggtcagtcaaatacgcaaggaggtggtggtcaataccaagatcagattcagagcgagctgagggagaaaggcatcgtcatcgatcgatcgaaggtggatcatcggaggcatgacagtggcagcaagcgaaccctgcctgagcctgacggcgaggaggcggcggcggcggcggctcaatcgtcggcgtcgcggtcgctgggctcgagccaagagcgctacttcccgcgacggcggcagcagcagatagagctcggagggagtggtggtggtggtcacgatcacgatgaccgctactactcgcctgcggctgtgccggcaccgggacggtaccatgagcaggccgaacagcaaggtgctgtgtacagctccaccaccatggcgtactacgacgacgtgggcacgcactccgcctcctcatcgcttcagccgggcgacagcgccgccgccgccgtgccggtggccactgagtctcctcatcagcggcttccgctggaagccgggtctgctggttgttcctccgcggttgggcaagccgtggaggtgcaagaaggtactctgaccacgacgatgaggcactaccgtggcgtccgtcggcgaccatggggcaagtgggcggcggagatccgcgaccccgccaaagcggcgcgcgtctggctgggcaccttcgacacagcggaggccgccgcggctgcctacgaccgcgccgcgctccagttcaagggcgccaaggcaaaactcaacttccccgaacgcgtccggggacgcaccggccagggcgccttcctcgtatcccccggcatcccccagccgccgccagtatcagctccgttgttgccaccgtctccggtgccgttccccgacctgatgcggtacgcgcagttgcttcacagcggcaacgtagccgccgcctccgccagcaccgcccatgacctcgcgccgtcgtcgcagcaatcgccggtgcagattctggacttctctacgcgccgactcctcctgcgtggctcaccgcctgcaacgttcggccgaccgtcgatggcgtcctccaccgcggcttcttctaccagtatgccggtgcctcacgtcgaggacaaggatagcggagcaggcgaggagggtggcactgctccgcctgactgatttattaattttgccaagcatgcatgtctgcctgcctgccctaactgctgaccatgatgcaagcttggttcttgatttatggtcgcatttggtagggactcaaaatagactgtttttttctctccagagtcaataaatggaaatcggttccg

SEQ ID NO: 132025 - DNA, 3070 bp, Zea Mays
acctctccaccaatcccgtgcaacatcagtgcacggagcacgtggacatcgacccgcacttcgtccgcgagcgtgtcgttgctggtgacgttcgggttctcagtatccggaccacgttgcagttcgccgacatcttcaccaaaggggctgccgtcaagtgttttcgctagaggctattataccgtgaaggccgtgtagttagcttcagactttggtacagggagggaacacagctagacagtatatataattttaaggggcttcattgaaaattcaaagaccgtctctgcaaaccaccatgtttgtgccaatgtgttgtcgcaccaactgcctaatgactatagaccattagttgattcaatttgtttagtgacctagatgtgcaagtttggagtgcatgtacccaattgaacctatatgatacgtcacaagtctcatgacccttaatgcaatttacttgcatttacaactttaacacaattggtagcttgttctctagtggcctaaggtaacacatacatgacttagatatgagcatcatattttacaactgcaaagcagcacttgcatgttgcatcacctgaaggttgttgtggttccacaatttcttatgttaaattgtttcaagaccatcctaattttggattaataccattttttacttcattgaagacagactttttttgcaggttatcaccaaacgggacagactgctgactctgaagcttggtgtttctgaacataacttgccaaatcctaataattttggtgagctaactgttcaggctgaagaaagttcaggttcaaaagcaataatggagatgatattccgctgttcggatcttgaaatcaaggatcttctaacaaagagtgatacttttttgctaatatctggaatatcagatagtggaatgcctgttccaatttgcaagacagaagtaagaaagaatgatctcaatcctaggtggaggccagtgagtctgaatctgcaacagattggaagtaaggagaaccctctaattgtagagtgctttaacttcagtagcaatggcaaacatgacctagtcggcaagatagtcaagtcagttgcagaattggaaaatatgtaccataggaagaatggtgaaaatttctttgttcctgccagcaatgcacatgaatgtcacagtaaggaggtgttgaagagccagctatatgtagagaaatatgttgagagtaacagacatactttcctagattatatttctgttgggtgccagttgaattttatggtaggcgtagatttcacagcttcaaatggaaatccacggcttccagattctttgcattatattgacccctcaggtcggccaaatgtatatcagaaggcaatactggaaattggtgatgttctacaatattatgacccaccgaagcgtttccccgcttggggctttggagcaagacctattgacggtcctgtttctcattgttttaatttgaatggcagcacttatcaacctgaggttgacggaatacaaggaattatgtcagcttatatcagcgctcttcgtaatgtatcattagctggtcctaccctctttggtcagttgataagcaccgccatggcgatagctagccaatctcttgctgagaatcaacataaatacttcattttgttaatagtcactgatggcgtggtaactgattttcaagagactattgatgcgatcataaaggcatcagattttcctatatccataattgttgttggagttggaggggctgatttcaaggaaatggagtttctagatccaaacaaaggagagaaactggaaagctcaaccgggagagttgcatcaagggatatgatacagtttgccccgatgaaggatatgcacggcactgggatatccacacttcaatcacttcttgctgaggtaccagggcaattcatgacatacatgaggacaagagaaacccaaacagacagttagtacatgcatgctgccttcaatcagtacaagatgcaccttggaatattctttgttaatatcattttcgtccttcccgttacatagtggtgcaagtttcaagtcatgggtgtgagatagatagtatggacgtgtcaagtgtaggtgagacatcgatctcctggagacgccaacatcaaattggttagctgagcttgtttaaaatcgtcgccgttaaaaaaaaatgctgcttgttaagagaaatgaggacctccaccagcccaccttaattccatggcatctttttttttattattattctgtgtcaagttggattcctaggctgtaccgcccatctttctctacctgtttgtaagatatgactttaggggtttcggcctttattatccctagtaggcccattggaataggaacttttttggcattgcacattagaattttcaagtgttggcatggctgtttagttctatggtggtgactcgtgacctgtataatataatttagacaatggaatatacagcatttgtggtacagccatgtgacaatgtcagattaagatttgaggcatctggttgcaatacgtttatgtatcgttttctcttttaactatgtatagcaccgatggaacctggagtctgaactagaaattggcagtggctgttctcggacagtttccggaagagaaacccctagctactatgcaagacggtaggactacaaaggaacaactagacccccggcccaaattgcatcctggggaatgccgagggcggagggagatcgatcgatgctccggttccacgactatgtgcgtggtccttgtagaaaagaaaagaaaaagtatgcgtaatctgggtgaaagcaccagcagagtagttaatttggttcagacgttcagtggacaatcgaatcgagcaagcagtggaaggaatccatttcgatacgctgtggaggcaaaggcgccactccaacgatcccagcgatatctacgagaggaacttttcagaagatcttacgtggacaaacatgccaataagccaatcaggcttcggttacggtctcactcaggacatttccctgtgtccacccaacatccc

SEQ ID NO: 132026 - DNA, 979 bp, Zea Mays
aatggttcttgcatgaattatatacttacaaatagcgttacatgtgaataaaaagaacaaagtacattcatcatattaaaagatcaaaatacattgatctattatattgtgtacatatattactcattagacataatttggccttcactgtggacatactaatagacattgcgacaatagaattgaccgtgttaattaataaaaagctatagcatgaaatatgcttcttttttaatggttataaacatatatgctcggtttatggagtataaattattggtacgatggatcggtcgagagctagcacatatgtcgacatgtttagtcaaatgtcgcggtcttgcgtccggtgacggcgtacggtggagtgtacggcggccccggcggcgctggcgttggtggcatgggcgtcggcggcgcgggcgttggtggcgctggcgtgggaggcttgggtgtgggcggcttaggtgtgggcgcgggcgtgggcgtgggtggcgcgggcgtgggcggcttgggcgtgggaggtttcggcgtgggtggcttgggcgaaggcggcttgggcgccggtggcgagggcgtgggcggcgacggcgcgagcccgcagcggatcatacagacgacgctcctctggtcgcagccgatgatgcagagcggcaggtcggcgccctgctttcccatacacccgaacgagcagctgaacacctgcgtgaaacagcccagcaggcactggatgatgccattcagctgctccgtggacgccgacgccggcatcgtcagaagcgccaccgcgttgctgtcaccgctgttagtggcaacagtagcactcgccacggtggtggcagcggacgcgacgtcgacgatgccgaccagcacgacaaagagaagcacgaggaaggagccgccgctggcgcgagtactgccggtcatcgtcgcggccatggtcgtgtgagcgagcttgactgatgctgggtttttgtgt

SEQ ID NO: 132027 - DNA, 197 bp, Zea Mays
tttgagttcacatgacttattttagaaacttgagctcacaaacttcctcttatttggtctctgtatggtggatgtatgtcattctataatttttgttcgttcagtcagtcattatgaactctcttctaatcgctcccttcattggtcgtgttgtaccaagacatattggatggagtaaacaacaacatcaattagtc

SEQ ID NO: 132028 - DNA, 875 bp, Zea Mays
gagaatccacgacgcaaccaaagaatcctcccttcaccaattaacaatccctgcagcccaatcgctcgcacagacttgcgtgattcagttgacgagaagatgcctataaaagaaaggaagattggccaagctaaggcctgaccagtgttcccggcccactcacaccgaactcgtgaagcacagtttccatcgtatgatgtcgaggaagaggaaaaagaggggcaaagaagaagaaggtgctgtgagcgaagcactggtcgtcgcaccgccatcatcggcggtgtgagtgcatgcagcgaggaagcatgcttgccatgccgtccgcccggagcttcggcgccgcgggctggtggcgtgtgagcagggatgcttcggcggtgcacaagaaagaaggcaagtcttatcggcaagggaaggctaagcctttcttccaggtctccctctctccatctaaatcattctatgtgtttggaggagggggcaatcgatcgttacttactggtctcctgatccttagcggtcatgtctctgtgtgtgtgtgtgactgtgtgctccatctccgtgttgatttacagctagaataatgaccagttcagagtgaatgtgtgagcgtgtgtgttcaagtgtcagtgagtgaacctggcgttgtattttgaccgtgtgagtccgtgtcgtattttcagttgtctggtgtgttgtgtgtgtgagtatctctgaataagaatgtaatgctatatgtgtgccgtgttaattaacttgatcgagctgatctttaatttgttctcgatatatacgcgtttgtgcatatattcatgtcgtatccgataatgtaatttggatacaagtatacctcgatcgagtaaggattttattaa

SEQ ID NO: 132029 - DNA, 4026 bp, Zea Mays
ccctccctcgtcgtctcgccactcgcaacaccccaaaaacctcacgggctctcgacccctcgcgctcgcctcgtcgccacgccggcgtgaggggcgcccacccccgtgcctatataacgctgccggagcggagggtataagctggtatcatggcgtccagcgcagtagcaccaagatggttaaggggtaaggtgaaggctgtgacatctggggattgtcttgtaattatggggtgcacaaaggctgagatcgaacctgagaagtccatcaccttatcctaccttatggccccaaggctggctcgtcgtggtggagttgatgagccgtttgcatgggaaagcagagagtttctgaggaagctctgcatagggaaggaggtcacattcaaagtggattatacagctcctaatattggacgagaatttggaactgtttttctatgtgataagaatgttgcatactcagtagtttctgctggatgggcaaaggtaaaggagcaaggctccaagggtggcgaacaaaacccgcaccttggtgagttgttgaggttagaggaagttgccaagcaacagggtgttggtcgttggagcaaggaacctggtgctgctgaagagtcaataagatatcttccaccatctgcaattggtgaagcaagtggttttgatgcgaagggttttgcggttgaaaataaaggcaagagtttggaggccattgttgaacaagtacgcgatggcagtactgttcgtgtgtatttagtccctagttttcagtttgtccagatatatgttgctggagtacaggccccatcaatggggagacgcccatcggcacctactgtaattgctgaaactgatgatactgctaatgacacgaacggtgaagattctgagggaacacctgcccaactgactacagcacaaagacttgttgcatctgcagcttctgctgaaattccaccagataggtatggaagagaagccaagcacttcacagaggctagagttctcagcagagatgtgcgtatcgtggtggaaggcacagacagctttagtaatataattggttctgtgtattaccctgatggagagactgcaaaggacttggcccttgagcttgtcgaaaatgggcttgcaaaatatgttgagtggagtgctaatatgcttgatgttgaagtaaaaataaagctgaagaacgcagaactacaggctaaaaaggatcaattgagaatctggacagggttcaagccacctgtgacaaactcgaagcccattcatgaccagaaatttactggaaaagtggtagaggttgtaagtggggattgcattattgtggctgatgattctgctccatatggcagtccttcagccgaacgtcgggttaatctgtcaagcattagggcccctaagttgggcaatgctcgtacagatgtgaagcctgaccattttgctcgtgaagctaaggagttcttgcgcatgaggttgattggcaagcaagtggctgttgaaatggaatattctcgaaggatcagcaccgtggatggacagagtgttgctccaacagcaaacattgctgatacaagagtattagattatggttcagtttttctgggttcaccatcacagactgatggagatgacatatcttctgctccgagctctgccagccagcctggagttaatgttgctgaacttttactctcacgaggctttgctaaaacatctaaacacagggattatgaggaaaggtcgcactattatgatgctctattagcagctgaatcacgggctgagaaagcaaagaaaggagtgcattctcaaaaagaatctcctgtgatgcatataacagatttaacaactgtatctgcaaagaaggccaaagatttccttcccttcttgcagaggaacagaaggcattctgccgttgttgaatatgtttttagtggccatcggttcaaactaacaattcctaaggagacttgcagtattgccttctcattatctggtgttcggtgtcctggtaaaggcgagccatactcagatgaagctattgctttgatgaggagaaggatactacagcgtgatgtggagatagaggttgaagcagttgacagaacaggaacattcataggttcgttgtgggagtccaagaccaacatgggctctgtacttctggaagctgggctggcgaagctgagttcttttggcttggataggatgtcagatgctcatgtcctaacaagagctgaacagtttgcgaagcaacaaaagattaagatatgggagaactatgtcgagggtgagaatgcttcaaatggatccgcacctgaatcgaaacaaaaggaaatcctcaaggttgtcgccacggaagttcttggtggtgggaagttttatgttcagacagtgggtgaccagagggtggcttcaattcaacagcagcttgcatctttgaaacttaaagatgcaccagtcattggtgcctttaatcctgtgaagggagagatagtcctctcacaatttagccttgacaactcctggaacagagctatgattgttaatggacctcgctctgtagaatctctaaacgacaagtttgaagtattctatatcgactatggcaaccaagaggtggttccctacagtcgtctacgacccgtggacccatctgtttcctcttctcctgctcttgctcagttatgcagccttgctttcataaaagtgcccagtcttgaggatgactttggtcaggaagcagcagagtatctaagtgaatgtttgctcagtagctcaaagcaatatcgggcaatgatcgaagaacgtgatgcttctgggggaaaatcaaagggacaaggaacctgaaatgttctcattgttactcttgttgatgcggagacagaaagtagcataaatgctaccatgcttgaggaaggccttgctcggcttgaaagaagcaagagatgggacactagggagaggaagacggctctccagaacctggaacagttccaggagaaggcaaagaaggaaaggctccggatctggcagtatggcgatgttgaatcggatgaggacgagcaggccccagctgcaaggaagcctggaggtcgtcggtagagctccccaaatgtgagactctgctgggagttatagatgcaacttagagggtaccttatttattcggttagaaaacagaacttagcgaggcgaaactttctcggtttgagcacttttgatattccgttttttacatcgtaagcttataaggttaaaggtacattgttttttctctgaacacaataaaggtcgtctatgcgctgcagttctttgtgtagtcagaatataatatttgttgatactaagaaatgcagtgaattaaagttaatattgcatttaattattctcgtgcaataatgatttctctcgtacgcatttactgattgctttgtggcttgattactgactgctttgttgcttgatgataacattcttcgaaactttgctttgttccttgatgatagcatttttctttggccgcttgctttgtcaagtgaaaattatttgcaatacatacttcgccactattgattctctcttgtaggcttttaagtttagctccaaacaacaaaattttagagctctagtttagagttctaaatttgagttaaagctctaaatagttgctgttgggcctatgcttcgtcgccgaaggtcttctaggaagaagcggctttcggctgaagctgtttgtataagatggccgaaggtccctcttcatgaagcttcggtattacaaaccgacttaaagatagaatgaccttttagtccataaaggtctgagtcaatgttgtaaacttttataaggggcatacttgtaatccctcacaggctgcgccctgtgcctataaatagtgaacagtattcctttactgttcacggattctagtaattgcaatcgcatattctggaattcaaccttttgtcaaggcagaggtattattgtattcaacgattggatatattaagaaaatat

SEQ ID NO: 132030 - DNA, 3510 bp, Zea Mays
cgtcgtctcgccactcgcaacaccccaaaaacctcacgggctctcgacccctcgcgctcgcctcgtcgccacgccggcgtgaggggcgcccacccccgtgcctatataacgggtataagctggtatcatggcgtccagcgcagtagcaccaagatggttaaggggtaaggtgaaggctgtgacatctggggattgtcttgtaattatggggtgcacaaaggctgagatcgaacctgagaagtccatcaccttatcctaccttatggccccaaggctggctcgtcgtggtggagttgatgagccgtttgcatgggaaagcagagagtttctgaggaagctctgcatagggaaggaggtcacattcaaagtggattatacagctcctaatattggacgagaatttggaactgtttttctatgtgataagaatgttgcatactcagtagtttctgctggatgggcaaaggtaaaggagcaaggctccaagggtggcgaacaaaacccgcaccttggtgagttgttgaggttagaggaagttgccaagcaacagggtgttggtcgttggagcaaggaacctggtgctgctgaagagtcaataagatatcttccaccatctgcaattggtgaagcaagtggttttgatgcgaagggttttgcggttgaaaataaaggcaagagtttggaggccattgttgaacaagtacgcgatggcagtactgttcgtgtgtatttagtccctagttttcagtttgtccagatatatgttgctggagtacaggccccatcaatggggagacgcccatcggcacctactgtaattgctgaaactgatgatactgctaatgacacgaacggtgaagattctgagggaacacctgcccaactgactacagcacaaagacttgttgcatctgcagcttctgctgaaattccaccagataggtatggaagagaagccaagcacttcacagaggctagagttctcagcagagatgtgcgtatcgtggtggaaggcacagacagctttagtaatataattggttctgtgtattaccctgatggagagactgcaaaggacttggcccttgagcttgtcgaaaatgggcttgcaaaatatgttgagtggagtgctaatatgcttgatgttgaagtaaaaataaagctgaagaacgcagaactacaggctaaaaaggatcaattgagaatctggacagggttcaagccacctgtgacaaactcgaagcccattcatgaccagaaatttactggaaaagtggtagaggttgtaagtggggattgcattattgtggctgatgattctgctccatatggcagtccttcagccgaacgtcgggttaatctgtcaagcattagggcccctaagttgggcaatgctcgtacagatgtgaagcctgaccattttgctcgtgaagctaaggagttcttgcgcatgaggttgattggcaagcaagtggctgttgaaatggaatattctcgaaggatcagcaccgtggatggacagagtgttgctccaacagcaaacattgctgatacaagagtattagattatggttcagtttttctgggttcaccatcacagactgatggagatgacatatcttctgctccgagctctgccagccagcctggagttaatgttgctgaacttttactctcacgaggctttgctaaaacatctaaacacagggattatgaggaaaggtcgcactattatgatgctctattagcagctgaatcacgggctgagaaagcaaagaaaggagtgcattctcaaaaagaatctcctgtgatgcatataacagatttaacaactgtacgtgatattcatttattccatcagttcgattttgatattctctgcgtcatcattaacctatcagtgtggtccttatatggataggtatctgcaaagaaggccaaagatttccttcccttcttgcagaggaacagaaggcattctgccgttgttgaatatgtttttagtggccatcggttcaaactaacaattcctaaggagacttgcagtattgccttctcattatctggtgttcggtgtcctggtaaaggcgagccatactcagatgaagctattgctttgatgaggagaaggatactacagcgtgatgtggagatagaggttgaagcagttgacagaacaggaacattcataggttcgttgtgggagtccaagaccaacatgggctctgtacttctggaagctgggctggcgaagctgagttcttttggcttggataggatgtcagatgctcatgtcctaacaagagctgaacagtttgcgaagcaacaaaagattaagatatgggagaactatgtcgagggtgagaatgcttcaaatggatccgcacctgaatcgaaacaaaaggaaatcctcaaggttgtcgccacggaagttcttggtggtgggaagttttatgttcagacagtgggtgaccagagggtggcttcaattcaacagcagcttgcatctttgaaacttaaagatgcaccagtcattggtgcctttaatcctgtgaagggagagatagtcctctcacaatttagccttgacaactcctggaacagagctatgattgttaatggacctcgctctgtagaatctctaaacgacaagtttgaagtattctatatcgactatggcaaccaagaggtggttccctacagtcgtctacgacccgtggacccatctgtttcctcttctcctgctcttgctcagttatgcagccttgctttcataaaagtgcccagtcttgaggatgactttggtcaggaagcagcagagtatctaagtgaatgtttgctcagtagctcaaagcaatatcgggcaatgatcgaagaacgtgatgcttctgggggaaaatcaaagggacaaggaacctgaaatgttctcattgttactcttgttgatgcggagacagaaagtagcataaatgctaccatgcttgaggaaggccttgctcggcttgaaagaagcaagagatgggacactagggagaggaagacggctctccagaacctggaacagttccaggagaaggcaaagaaggaaaggctccggatctggcagtatggcgatgttgaatcggatgaggacgagcaggccccagctgcaaggaagcctggaggtcgtcggtagagctccccaaatgtgagactctgctgggagttatagatgcaacttagagggtaccttatttattcggttagaaaacagaacttagcgaggcgaaactttctcggtttgagcacttttgatattccgttttttacatcgtaagcttataaggttaaaggtacattgttttttctctgaacacaataaaggtcgtctatgcgctgcagttctttgtgtagtcagaatataatatttgttgatactaagaaatgcagtgaattaaagttaatattgcatttaattattctcgtgcaataatgatttctctcgtacgcatttactgattgctttgtggc

SEQ ID NO: 132031 - DNA, 228 bp, Zea Mays
atggccgtgcacgcgcagtaccacgcccacgccttcccacatgacctccgcgccatccccagctgcccagcgctggacaacgccacgagcgcgtcggcgttcctcgtcgccgacgccgaccccgcacccgcggctggcggcaacacggcgctcagcggcctcacccgcaacggcaacagccacggcagaaggttgcctcgggcggcgcaaggaagcgcgctcgtgtga

SEQ ID NO: 132032 - DNA, 400 bp, Zea Mays
atctctcgtcatctcctcctccaagcacggatcttctcgtcgtctcctccaagcacggtgatgtccctcgtatttctgccacccggttttcttggctcccctgtattcttcttcgctcctccgcgtagatctgcccgtcgtttcttcttcgattgtgcgggccgacggcaccacacacgcacccacccccatcctgcagcagatccgcacggcaccacacacgcagatccccacggcaccctacagcagacctctgcatttcacagtccccaggccgctaggggctagatggctagtcggagcgtcgggctctgccgctaggggtagcgtcaggctctgccgtcacatctaggagacgcttggtgtgaaggagatgtctgtacgtgccatggcatctagg

SEQ ID NO: 132033 - DNA, 1267 bp, Zea Mays
caatttattcatcctcaacgaaaccactacaacgtcttgattccattcatcacccgtgcgttgtgttctatgatacataggccggcgctggataacgcaaggaacgcgtccgttttcatcagctcggcggtggtcacccgctcgcggccaaactcagtgctcagcgacctcaccggcaacaacaacaacagcaacggttgcttcttaccgaggaagcgcgcgcgggttggcgacttggccggcgcgaccttgaacttggacatgcaaggtcaacgcgctctgctgccgctagtgtcggcgccggtgccgctgccgctgcccgcgggggacgtgcagaacaggttgctctgctctgcctccgcgtctaccagtgggcacccgacgcccagcgtcgcgccggtgtcgcagggcctcctgtcgcacctctaccgccacggcgtcgagattgacgcgctagtccgcatcgagaaggagaggctgcgagcggggctgcaggaggcgcgacgccggcacttccggacggtggtgctggcggcggaacgtgcggcggctcggcgcctgcgggcagccgaggccgaactggagcgcgccatgctgcgcaacgtggcgctcgaggagacgctccggcacactggagccgagggccaggcgtggcaggacatcgctaggcgccacgagggtgtcgcggcgggcctacgcgccacgctggacaacctcacgcagatgcagtcgccatgcgccggcgcagaggctgcaggcgcggctgccgacggcgacgccgaggacgcacagtcgtgctgcttcgagttggagcaggaacagggcgagggcgccgaggcgtacggcgggcgggcgagggcgtgcaggtcgtgcggccaggcagaggcatgcgtgctgctcctgccatgccggcacctatgcctgtgccgcgggtgcgaggcgggcgtctgggcgtgccccgtgtgcgcggtcaccaagaatgcctcgctccacgtcctcctgaactgacatgacaacatgtggcgtggcaatgccaacacatgagtaatgggttcgaccgacccatggaactcctgtcttaagcctatctccagcacatcagtttatccatactaatacatatattttgatatttaaactacactatacgaatagtacatcgtatagtacaatctactgtgcagaacagtgcaaaataatacttttatgtaaactttgagtaaactgttgcagacggcctaagaccgtccagagagtcggtcatcgg

SEQ ID NO: 132034 - DNA, 1373 bp, Zea Mays
caatcccactcccacgtctgtccgcgcgcggtgtggtcacactactacggcaccgcccaacgccatacttgccttctccatcctcctgcggtcccgccgtcctctcttctagtccaggccacttctcatggctgtgcacacgcagtacttgtcccatgccttcccctacgaccacagcaccatcaggccggcgctggataacgcaaggaacgcgtccgttttcatcagctcggcggtggtcacccgctcgcggccaaactcagtgctcagcgacctcaccggcaacaacaacaacagcaacggttgcttcttaccgaggaagcgcgcgcgggttggcgacttggccggcgcgaccttgaacttggacatgcaaggtcaacgcgctctgctgccgctagtgtcggcgccggtgccgctgccgctgcccgcgggggacgtgcagaacaggttgctctgctctgcctccgcgtctaccagtgggcacccgacgcccagcgtcgcgccggtgtcgcagggcctcctgtcgcacctctaccgccacggcgtcgagattgacgcgctagtccgcatcgagaaggagaggctgcgagcggggctgcaggaggcgcgacgccggcacttccggacggtggtgctggcggcggaacgtgcggcggctcggcgcctgcgggcagccgaggccgaactggagcgcgccatgctgcgcaacgtggcgctcgaggagacgctccggcacactggagccgagggccaggcgtggcaggacatcgctaggcgccacgagggtgtcgcggcgggcctacgcgccacgctggacaacctcacgcagatgcagtcgccatgcgccggcgcagaggctgcaggcgcggctgccgacggcgacgccgaggacgcacagtcgtgctgcttcgagttggagcaggaacagggcgagggcgccgaggcgtacggcgggcgggcgagggcgtgcaggtcgtgcggccaggcagaggcatgcgtgctgctcctgccatgccggcacctatgcctgtgccgcgggtgcgaggcgggcgtctgggcgtgccccgtgtgcgcggtcaccaagaatgcctcgctccacgtcctcctgaactgacatgacaacatgtggcgtggcaatgccaacacatgagtaatgggttcgaccgacccatggaactcctgtcttaagcctatctccagcacatcagtttatccatactaatacatatattttgatatttaaactacactatacgaatagtacatcgtatagtacaatctactgtgcagaacagtgcaaaataatacttttatgtaaactttgagtaaactgttgcagacggcctaagaccgtccagagagtcggtcatcgg

SEQ ID NO: 132035 - DNA, 1447 bp, Zea Mays
caatcccactcccacgtctgtccgcgcgcggtgtggtcacactactacggcaccgcccaacgccatacttgccttctccatcctcctgcggtcccgccgtcctctcttctagtccaggccacttctcatggctgtgcacacgcagtacttgtcccatgccttcccctacgaccacagcaccatcaggccggcgctggataacgcaaggaacgcgtccgttttcatcagctcggcggtggtcacccgctcgcggccaaactcagtgctcagcgacctcaccggcaacaacaacaacagcaacggttgcttcttaccgaggaagcgcgcgcgggttggcgacttggccggcgcgaccttgaacttggacatgcaaggtcaacgcgctctgctgccgctagtgtcggcgccggtgccgctgccgctgcccgcgggggacgtgcagaacaggttgctctgctctgcctccgcgtctaccagtgggcacccgacgcccagcgtcgcgccggtgtcgcagggcctcctgtcgcacctctaccgccacggcgtcgagattgacgcgctagtccgcatcgaggttggttgatttttctccgccagaagaattattgcgccgcgaatggcggcgtctcacttgggctcgccgtgcagaaggagaggctgcgagcggggctgcaggaggcgcgacgccggcacttccggacggtggtgctggcggcggaacgtgcggcggctcggcgcctgcgggcagccgaggccgaactggagcgcgccatgctgcgcaacgtggcgctcgaggagacgctccggcacactggagccgagggccaggcgtggcaggacatcgctaggcgccacgagggtgtcgcggcgggcctacgcgccacgctggacaacctcacgcagatgcagtcgccatgcgccggcgcagaggctgcaggcgcggctgccgacggcgacgccgaggacgcacagtcgtgctgcttcgagttggagcaggaacagggcgagggcgccgaggcgtacggcgggcgggcgagggcgtgcaggtcgtgcggccaggcagaggcatgcgtgctgctcctgccatgccggcacctatgcctgtgccgcgggtgcgaggcgggcgtctgggcgtgccccgtgtgcgcggtcaccaagaatgcctcgctccacgtcctcctgaactgacatgacaacatgtggcgtggcaatgccaacacatgagtaatgggttcgaccgacccatggaactcctgtcttaagcctatctccagcacatcagtttatccatactaatacatatattttgatatttaaactacactatacgaatagtacatcgtatagtacaatctactgtgcagaacagtgcaaaataatacttttatgtaaactttgagtaaactgttgcagacggcctaagaccgtccagagagtcggtcatcgg

SEQ ID NO: 132036 - DNA, 192 bp, Zea Mays
ttattcatattcctttgtgtttcatatgtacatgtttacattcatgcttacactactagaaaaccccccttgtagctatgcttttttggacaataggcacgctttaattcgtctctatatgaatgtacgcacgctttccaaaaacgtgttagaagcgtcttcgtatggaccgtatcagactttgtagaaacg

SEQ ID NO: 132037 - DNA, 965 bp, Zea Mays
atcaggtaggcgcggcgcggaccgcaacacgccagctttcttgctcttgtctctaagcagcagcagcttcctgtctctccagccaccattccattctcgctccttggtaatgaggctggctagccagctaatgcagctccgaacctgttttgttggtggtcatttaaccatgcatgcttcgatcgatggattggtgcatgcatggattattgcatagtgtgatgcatgtggcgcatcagtgcatggttagatgaccatcagcaaacatgttcttgaggcatgcaagttctctagctacacatatcagagatcgatcaccactgcggcgccatggctacttaattgaaatggaggtttgcatttctccgaacccggatgtcgtgattctgcttccgttcttgatccaggatcttccggtcttgttcccaccattactttccttaggaaactggaatggtttcaaccttaatttgtttatgtgtgtgtgcacatgcagcgtgtgtttcatatggagatcggtgcactcaccttgtagctttagcttgcatccccttcgctaacagagagtaagatatcttagtcctctcgccatctctctctaaacatatacgtatcattttgtttccgacgactctcccaatgagtcgttcgattctcctgcaggatctgacgacgaaagcgatcatcaatcatatgccacatgctatatttcacaggttctatctggttaagtaaagatctggcgtgtggcagtgctcattctcatgacgatatgcagatgcagtgtatatcaatcgtatccaatcagcatgcaagtggtctaaacaatgtaacacctaaatgctattttcaccgtatataagttttctcaatagtgagcttgcaacccattacccatatttgaatctgggtatacggtatggataatggttttattcaatagaaatatgtagactgcactctca

SEQ ID NO: 132038 - DNA, 993 bp, Zea Mays
tgttcttattattaaaccgaatcctctaattatagcatctgaaaagacatgaattaatagacctatctatttatcggtgcctatttatatattttgacccaatctacacgacatatcaaagaaacaacacccatagcgctagataaacattcaattgattgattccaccatgcaatcgaactaatcaatcaatccttaaagcaacggtcaacggaccagtgtgtccccgttgccgagtgagggcagtggaggcaacgatatgacgcgagttgcttcttcgtgcagccgtcaagtaggcaagtagcttcaagtcgttcgtcgtggagggcccgcctgggggagcagtgggtgtgccttcgcaccaggcgggggaggggagccgaggaggtgaaggtcgaggcccccaccatgttggacgtcgtcgccgagcctgtcccggacgacgcacccttcttctaccgcgtcgagtcgctcgagcgtggctgcgtgggtccggcttccacctcattctccttggacgggcgctcaaccacgaggactgtcgacttcttgcacgactgcgacgtcttcttctctatcacgggcgcgcggggtcggcatcgatgggatcgacagcgggcggagacactggtttggcggcgtcggcagaccggcatctccggtacccgacaccacctcgctggtttggttcggcaggtaggtcctcgcctagttgggtagctcggtgagcgggttggttggcaataccacctcaccgggttgctcgtcaagcgggttggtcggtcgtctcgccccgtcaggttgttcggtgggcgggttggtcggcagatctgccctgccggattgcttgaagtataggtcagtcggttagtggatcatctttgagaggtcttttaggtcttctttgaacagtcggttctcaggtacccgacataaaggttgtatgctacaacttattttagtaaaacaattcttgccatccacgcttaaacc

SEQ ID NO: 132039 - DNA, 2412 bp, Zea Mays
gtgacgctttcactgcacactacaatcaatcagccggcttttcctctcttcccctcgacagaagcccccaaatccgataccttcccctatccacctcgagtcccttccttccttagcggcggcgcgaaggcggcggagccatgggcggagtcggcgaaggtgacgcgtgggcggatcaggagcagggcaacggcgggggcagccgtggtgttggcggtggcggcggcgaggcgaagcggtcggagatctacacgtacgaggccgcctggcacatctacgcgatgaactggagcgtgcggcgcgataagaaataccgccttgccatcgccagccttctcgagcaggtcaccaaccgcgtcgaggtcgtccagctcgatgaggcctcgggtgacatcgcccccgtcctcaccttcgaccatcagtacccgcccaccaagaccatgttcatgccggacccgcacgcgctccgccccgacctgctcgccacctccgccgaccacctgcgcatctggcgcatcccgtcctccgacgacgccgaggacggcgccgcctccgccaacaacaacaacggctccgtccgctgcaacggcacccagcagccgggcatcgagctacgctccgagctcaacggcaaccgcaacagcgactactgcgggccgctcacctccttcgactggaacgacgccgatccgcgccgcatcggtacctcctccatcgacaccacctgcacaatctgggacgtcgagcgcgaggccgttgacacccagctcatcgcccacgacaaggaggtctacgacatcgcctggggcggcgcgggggtctttgcctccgtctccgccgacggctctgttcgcgtctttgatttacgggacaaggagcactccacaatcatttatgagtctggttcaggtggcagcagcggcggcggttccaactctggcgccggagatggtgggactgcgtccccgacaccactcgtgaggttgggctggaacaagcaggacccaaggtacatggccaccatcatcatggacagccccaaggtggttgtgcttgatatccgctacccaacactgccagtggtagagctacaccgtcaccatgcccctgtcaatgccattgcgtgggcacctcactcttcttgccacatctgcacagctggggatgacatgcaggcactgatatgggatttgtcgtctatgggaactggtagcaatggcagtggcaatgggaatggtaacacagccgctggagcagcagcagagggcggtcttgatcccattttggcatatacagcaggggcagagattgagcagttgcagtggtcggcgacccagcctgactgggttgcaatcgcattcgccaataagcttcagattctcagggtctgatttcctagttccaccctgtttcagtgaggagtaaaaaatgctaaacttggataatgagctgatgcccggaggataatcttgcaattgctttactgttgcttatttatgttgtggacaactgatattcatggcgggttagttctagaaatagaacagaagactttctagttagaagctgaattgtcaatgaatttggtttgtagagtaaggaactgctctggtgttagcgatggtgataatgggaactgaatttagtttgttcttggtgctcgaattctgcacggtagcatgtagattcatatcttaacttgcttattgaaaatgcaatggtcatatgtgccctataactgataatattccccatgtgttatgttttcacttttgtgcctttttctgaatgtgttttgtgtattccacaacatggtgtgttatatctggtcattgaaccagatgttttccttgttatttctgggttgtagagcaagtagctatgcatattttgtcttgttaatagttggaattgggcactgcaactaagttattatttgtgcttgaatgttctgcttggtagcatttgcatgtatataactcttaaggttgcttgttcgaatttgcatccatcttgtatgcattagaagttataaagttgtgttatgtattgataagctatttagtttcatgaatttctttggctgccttaattataatacctgtaaacctgtagctacagattacacatgttatatctcatccctttttttcgcttaatttgcatcctataatatatatgtatccttgattttatagcactaaatgctggtgtgttttgatccttgcattcaatatatagctaagctttgttgctgcaacaaaggattttttgttttcaaagaacaatggcataacaaagttcccatgcgtgttacgacgttgctttgtaggtttccttttcctttgctgaaattttcaggtgattgtttaccactggactggataggaaggcatggctatgagatgtaag

SEQ ID NO: 132040 - DNA, 279 bp, Zea Mays
atggagaggaggcggtggcgttcgacgattcgacaagcacggcggtcgactggagaggaggcggtggtggccggatgtctcttcggcgggaggatcctacatgacatttatgatttagccgacgatgaagctctggattctgacagaggaggagcgttccgagggaaccgtgttgttgtatgcatgaacgtaggtgtcctacaaccaggttgtgggaaaatactaacaggactgatgcaactatggactactacatgctctgcccacttttcattttag

SEQ ID NO: 132041 - DNA, 1576 bp, Zea Mays
agtttgccgctctgtgagcctgctgccgtcttcttccgccgccgccgccgtcgtcttcgtccgtaggtagcctcctctctcctgtcctcgcttgatcttatctactagtagtactcctgatgagacgctaagaaatctcgcttatattatgttaaccctgaaaccgaaagtgagtcttgtgcaactgtaaaaactgggacgtcactgaacgaacgatagcctgggttcgttcggtcgtagtggaggatacagcaacatcctcttaagttgaatttacgaacgcagttaatttgtttccctgtgccgttcgctgcgttacgcacaaggatctttactcctggatttcaatttatttattttccccccgcatttaagtattgcggcttgccttgccttgccttctggatgtcgcgttgcgccgctggctgatgatggcctatgtcctggcatgtgcagcagatcagagagcggggaggaagaaaaagcgatcgatggcgtccaactacgtggacacgacgggcgaggagggacggttccacggccctcacagccacagcaccagcacgaccccgacgggcggcgcggcggcggcggcggcatcgccgcgcaacttccggcgcagcttctcctccgcgtcctccgcgggccacagccacggcggcggcggcggcggggccaagtgcgtgtgcgcgcccgcgacccacgccgggtcgttcaagtgccggctccaccgcaccaactcccagggccacggccacggccacccgcacccgtccccgccggcctcccccgccgcgccggcgcagggcgtctcgtcttccgcttcctcccgcaccgtcgaggccctgtgagtgtccgaggccaaagacgggcgaggcgtggggaaagtgagaagatgatgggatatacttgtcgtgtcagtctgtcagaaggaaaggagtgaagctattattccctcttgttgtgatccgcgctgttttgcctcttcccccctacccgtttcctcccttcgtgctggttgtggttctaaattcctgattgccggccgtcccgccttcttccttgccaagacgagactctcctcctcctgccactgctaccgctgctcctctcaactggtgaactggatcctgatttggggagaaggttaaactggatgcctttccatgtaattaattgcctctctttaccattctacgtgctactagtattgaagtatcatcacccttgttgtgtccttctgtctgtggtgtgatggtcatggactcatggtctgtgtttcttcggtgaagagttcgtacccgtacataaaagatcttcaatcagtggccggtttggtacctgtttggttcagcttttttctgaccagcttttctgaaaatctggctgtggtgagaatctggctgtggggagaatctgagtataattacgattacgtgtggaggaagataaagttgtttatagggctcaggatctagaaagtgacggattcctactattacaacgactcaaccgattctgttacaacgactcaaccgattctgtgtttatgttgattttggatggtttttgtccc

SEQ ID NO: 132042 - DNA, 822 bp, Zea Mays
gctctgtgagcctgctgccgtcttcttccgccgccgccgccgtcgtcttcgtccgtagatcagagagcggggaggaagaaaaagcgatcgatggcgtccaactacgtggacacgacgggcgaggagggacggttccacggccctcacagccacagcaccagcacgaccccgacgggcggcgcggcggcggcggcggcatcgccgcgcaacttccggcgcagcttctcctccgcgtcctccgcgggccacagccacggcggcggcggcggcggggccaagtgcgtgtgcgcgcccgcgacccacgccgggtcgttcaagtgccggctccaccgcaccaactcccagggccacggccacggccacccgcacccgtccccgccggcctcccccgccgcgccggcgcagggcgtctcgtcttccgcttcctcccgcaccgtcgaggccctgtgagtgtccgaggccaaagacgggcgaggcgtggggaaagtgagaagatgatgggatatacttgtcgtgtcagtctgtcagaaggaaaggagtgaagctattattccctcttgttgtgatccgcgctgttttgcctcttcccccctacccgtttcctcccttcgtgctggttgtggttctaaattcctgattgccggccgtcccgccttcttccttgccaagacgagactctcctcctcctgccactgctaccgctgctcctctcaactggtgaactggatcctgatttggggagaaggttaaactggatgcctttccatgtaattaattgcctctctttaccattctacgtgctactagtattgaagtatcatc

SEQ ID NO: 132043 - DNA, 77 bp, Zea Mays
gcagcagagcagtgtcgtcatgagatgttgccatcctcctctggggccagtcaccgtcgccgattgatagatacgcc

SEQ ID NO: 132044 - DNA, 1912 bp, Zea Mays
gtctcgttctccctctcccgtatctgagtctgtttatggcggcggcggcgtcggcggatggaaatgcagcaggaggagcgagggcattgcccggccccatcgccgtcgcgccgtcgccgtcgccgcgctgcaggcagaggaggacggcgccggccagcatgggcgggtacgagctcgtcaggagcgacgacgcggcgggcgccgcgggagccgacctcgagtccggctccggcgccagcaaggtcgccggcgccccgccgccctcgccggccccgtcggcgtcgcccgccgcgcggcagcagcgcctcgcctcgctcgacgtcttccgcggcataaccgtcctgcttatgatcatcgtcgacgacgctggaggcttcctcccggcgctgaaccactctccctgggacggcgtcacagtagctgatttcatcatgccgttcttccttttcatagtcggagtctcactaacactagcgtacaagcgggtgccggatagagtggaggcaactaggaaggcagtgcttcgtgccctcaagctgttctgccttggtcttgttctccaaggtggatttttccatggcgtccacagtctcacgtttggtgttgacctaacgaagattcggttgatgggcatacttcagaggattgcaatagcctatctcctagctgcagtatgtgaaatctggctcaagggagacgacgatgtagattctgggtatggtttgctgaggagataccgctaccaactgtttgtaggattggtcctctctatagcgtactctattcttctctacggcatgtacgttccagactgggagtaccagatagcaggccctggttccagttccacagagaagtcgttctctgtgaaatgcggagtgagaggagacaccggaccagcttgcaacgcagtcggaatggtcgaccgtacggtcctagggatcgaccacctctacagacggccagtttatgcgcgcacgaaggtttgatatgggatgcgacaccgacatctcagttttctgctcccttgccacaaagctcaaataagaaactttggctgacatgtaggaatgcagtatagattatccagagaatgggcctctcccacctgacgctccgtcgtggtgccaggcgccatttgatcctgaaggcctcctcagctccgttatggcgattgtcacttgcttgatcggactccagtttgggcatgtaattatacatttcgagaagcacaggggaagaatcgccagttggttggtcccttccttcagcatgctagctctagccttcgtaatggacttcgtcggaatgcgaatgaataaaccactatacacgatgagctacactctggctactgctggcgctgcgggtcttctcttcgctggaatctatgctcttgtggatctgtacgggttcagaagacctaccatcgccatggagtggatggggaagcacgccctgatgatatacgtgctggtggcgtgcaacatccttcccatgttcatccgtggcttctattggagggaccccaacaacagccttctgaaagtcattggtatcggggcgtgaagccatgaccttctacatgttcaggcccaaacttggacatgcacagcgctctcgcatgtttaagagcaataatctaggtgctcaggccaagttttgctatgcggttagaggaccatagcgcgctcaggtcatgcgccatggggctgcctatattctcagcactgccgagatgcctgttgccacttgcagatgcatggaatccattctcccagccaactttgtatatggtggagttgagcacatgtacatgatatcacacgagtaatatgttgtgattcagatgaaatatatactagtacatatcagtccatattctataataatactacctccggtcttgaat

SEQ ID NO: 132045 - DNA, 1788 bp, Zea Mays
gtctcgttctccctctcccgtatctgagtctgtttatggcggcggcggcgtcggcggatggaaatgcagcaggaggagcgagggcattgcccggccccatcgccgtcgcgccgtcgccgtcgccgcgctgcaggcagaggaggacggcgccggccagcatgggcgggtacgagctcgtcaggagcgacgacgcggcgggcgccgcgggagccgacctcgagtccggctccggcgccagcaaggtcgccggcgccccgccgccctcgccggccccgtcggcgtcgcccgccgcgcggcagcagcgcctcgcctcgctcgacgtcttccgcggcataaccgtcctgcttatgatcatcgtcgacgacgctggaggcttcctcccggcgctgaaccactctccctgggacggcgtcacagtagctgatttcatcatgccgttcttccttttcatagtcggagtctcactaacactagcgtacaagcgggtgccggatagagtggaggcaactaggaaggcagtgcttcgtgccctcaagctgttctgccttggtcttgttctccaaggtggatttttccatggcgtccacagtctcacgtttggtgttgacctaacgaagattcggttgatgggcatacttcagaggattgcaatagcctatctcctagctgcagtatgtgaaatctggctcaagggagacgacgatgtagattctgggtatggtttgctgaggagataccgctaccaactgtttgtaggattggtcctctctatagcgtactctattcttctctacggcatgtacgttccagactgggagtaccagatagcaggccctggttccagttccacagagaagtcgttctctgtgaaatgcggagtgagaggagacaccggaccagcttgcaacgcagtcggaatggtcgaccgtacggtcctagggatcgaccacctctacagacggccagtttatgcgcgcacgaaggaatgcagtatagattatccagagaatgggcctctcccacctgacgctccgtcgtggtgccaggcgccatttgatcctgaaggcctcctcagctccgttatggcgattgtcacttgcttgatcggactccagtttgggcatgtaattatacatttcgagaagcacaggggaagaatcgccagttggttggtcccttccttcagcatgctagctctagccttcgtaatggacttcgtcggaatgcgaatgaataaaccactatacacgatgagctacactctggctactgctggcgctgcgggtcttctcttcgctggaatctatgctcttgtggatctgtacgggttcagaagacctaccatcgccatggagtggatggggaagcacgccctgatgatatacgtgctggtggcgtgcaacatccttcccatgttcatccgtggcttctattggagggaccccaacaacagccttctgaaagtcattggtatcggggcgtgaagccatgaccttctacatgttcaggcccaaacttggacatgcacagcgctctcgcatgtttaagagcaataatctaggtgctcaggccaagttttgctatgcggttagaggaccatagcgcgctcaggtcatgcgccatggggctgcctatattctcagcactgccgagatgcctgttgccacttgcagatgcatggaatccattctcccagccaactttgtatatggtggagttgagcacatgtacatgatatcacacgagtaatatgttgtgattcagatgaaatatatactagtacatatc

SEQ ID NO: 132046 - DNA, 1963 bp, Zea Mays
agtccagtagcaatactcactcctagtcctggagtatagtcactactacccctagaagggaagcgcatccgctcgatacggggggtggcaggttggcgaggagacgaaaggcacggcgagcgagagcccaacgaccgtccagttccagttccagcggtccgagcgagatcgatcgcccctccgcaaggccgcaacaacagacgcggcaagcgggtacaagggagttcttctggaggcgcgggagatcacgcgagtgtgttgcgcttgaaaagaagaaaaaaacaggcagggaggagggagtcccgttcccgaacccgaactacaagccagcgcaactgctgctgccgccgcccgcccagcaggaggagcgagggcattgcccggccccatcgccgtcgcgccgtcgccgtcgccgcgctgcaggcagaggaggacggcgccggccagcatgggcgggtacgagctcgtcaggagcgacgacgcggcgggcgccgcgggagccgacctcgagtccggctccggcgccagcaaggtcgccggcgccccgccgccctcgccggccccgtcggcgtcgcccgccgcgcggcagcagcgcctcgcctcgctcgacgtcttccgcggcataaccgtcctgcttatgatcatcgtcgacgacgctggaggcttcctcccggcgctgaaccactctccctgggacggcgtcacagtagctgatttcatcatgccgttcttccttttcatagtcggagtctcactaacactagcgtacaagcgggtgccggatagagtggaggcaactaggaaggcagtgcttcgtgccctcaagctgttctgccttggtcttgttctccaaggtggatttttccatggcgtccacagtctcacgtttggtgttgacctaacgaagattcggttgatgggcatacttcagaggattgcaatagcctatctcctagctgcagtatgtgaaatctggctcaagggagacgacgatgtagattctgggtatggtttgctgaggagataccgctaccaactgtttgtaggattggtcctctctatagcgtactctattcttctctacggcatgtacgttccagactgggagtaccagatagcaggccctggttccagttccacagagaagtcgttctctgtgaaatgcggagtgagaggagacaccggaccagcttgcaacgcagtcggaatggtcgaccgtacggtcctagggatcgaccacctctacagacggccagtttatgcgcgcacgaaggaatgcagtatagattatccagagaatgggcctctcccacctgacgctccgtcgtggtgccaggcgccatttgatcctgaaggcctcctcagctccgttatggcgattgtcacttgcttgatcggactccagtttgggcatgtaattatacatttcgagaagcacaggggaagaatcgccagttggttggtcccttccttcagcatgctagctctagccttcgtaatggacttcgtcggaatgcgaatgaataaaccactatacacgatgagctacactctggctactgctggcgctgcgggtcttctcttcgctggaatctatgctcttgtggatctgtacgggttcagaagacctaccatcgccatggagtggatggggaagcacgccctgatgatatacgtgctggtggcgtgcaacatccttcccatgttcatccgtggcttctattggagggaccccaacaacagccttctgaaagtcattggtatcggggcgtgaagccatgaccttctacatgttcaggcccaaacttggacatgcacagcgctctcgcatgtttaagagcaataatctaggtgctcaggccaagttttgctatgcggttagaggaccatagcgcgctcaggtcatgcgccatggggctgcctatattctcagcactgccgagatgcctgttgccacttgcag

SEQ ID NO: 132047 - DNA, 2431 bp, Zea Mays
cttggagagttcaaattcatctcctcccaccacacatccctcatgctgcctgctaaaagaaccatgtctttctctacccctcgtccttggtggcaatgctgccctcaacaaagtggagtactcttccctgatagcaacaagcggatgtgcatgcttctcaagcagctggcttccaccgccgtaagcttctctaagaacaaccatctgagtgccacaaaccctggacaggtaaaaaatgccagggtggcgttcgaacaccttggtgaacttctgcggcatgccaagcagcttcctcatattgctcacattctggcgctccgttctcttcgccacagtgaggtgcagcagctcatggaacactcccacattccgcttctccgacacgtctgtgcggcggtcgaggcctgaagcgtcagcgtatgggctggtgtatggcagcgcctgccactcccgtagccaggacatgcacttgcttctcagaccataacccctagtgaagctcaccgggaaggggatgcaggtggtatcgcctccgtcagcgctcttctcaagctcggagacggcgagaagatcgtcccaggagaggaggcggagccagacgcgctcgtcgccctccggctgctcaagggcgaagtggtcagggtagcgggggaggatggagtcctggtaatcgctgggcaggccaaggtcccagcggagaaggtcgacggtgtggagcgggagcgaacgggggagagtgagcatgaggagacggcggaggcgggcgacgaggtcgccctcggtggcgaagagacaatctacctcccgctgccgcaggacgaacgccatgtctgtcggcgacacgccgccgcgggacaacgtgaacatggtatggtatctcctgaggaactcgagcaaagagtgtgcggaaccacatatccttcgagcggacttttcagcgaggaggtccgaccgcgagacgcggtggccgggccgggagaacacgaggtcgagcaggtggtgggcggtgcggaggtgccgctcccgcgacactgcagcgtcgagggcccggtccttgacccacttcaccttcacgttcaccaacgtcgcgcgctgctccgccgcaaacaacggcgtccctgacggcgccgcgttccaccagcccctcctcgtcgctgagcgcagccatcgccacgccatgggaaagcgccggcgagacgcgctgcccaggtgctcgtttagttgggcctaatgaaatgaaatgaaatgttgggccggccgtacgaggaggcccgccgaggttaagcgaagataccgaggggataataaagcgtggccgccgagagagcgagaaacgcgaggtcacgagatatggcggacggcaagcgaggggaggattcggccgtggcgttgaagacctcgccgtcgtcggcggtgatggctgggggtttacgcggcgtgagcaaccctctggaggagtggagcgggcgcgtgaaggcgattgaggccgggttccgcgcgtggatggcgaagcaacccatccaaatcgaggccgcggtgaccacggccgtgggggcggtgcagggcggggctctgggtgggctcatgggctcgctcacagctgacggcgggtcgccgttccccatcccgcagccgccgcccaacgccaacccagaggccatggcgtcgttcaagcaggcccaggctttagctggtggacctttggtgcaagcccggaactttgcagtcatgaccggtgcaaacgcaggcatatcttgtgtcatgagaaggatacgagggaaagaggatatccagggcagcatggcagctgctttcggttctggtgctcttttctccatagtgagcggaatgggaactcctaatccagtagcaaatgcagttacaactggtgttgcttttgcagtatttcaaggtggctttttcatgatcgggcagaaattctcaaagccaccaagtgaagatacatactactctcggacaagaagcatgctgcacaaactgggtcttgaaaagtatgagaagaatttcaagaggggtctcctcaatgatcaaacgttaccactccttacggacagtgctctgagagatgtgaagattcctcctggacccagacttctcatactcgaccaaattaaaagggaccccgagctggttcaagcaaagtagcagtcacaattgtcgacagctggttctttctgggttgcatagggtttgaaagcgatgccgtctctagtttcttaataaactttctaggcaagcaagcaagaatttagttgtgctgtagttaattgttttttggccgatcagtttgcatcgatcctattaaattctgaacaacaggtatttatacgcatcttattcaaatttaaactggcattctctacattatgcaaatatgttggaaacaaggttgatggattaatttggcgtg

SEQ ID NO: 132048 - DNA, 575 bp, Zea Mays
ctcgctcaccataacgacggcgcatcttgggtggttgggagatgcagcaggagagcgtagaagaccgggacgagaatggtttgtgccagagtggccatcttgtcagctcagccagcctactggtcagggcaaaagccatttgcgccaggcaacgaccacatgtcgacatctctcctacctgtaagtacaaagcacagtttgacttgaccattgcagctcgtgaccagctgcgctccgtacgcagcagcagcaccgaattttttatattttagtccttcctcagaaaaaaattcacgtttggactttagaaaatttaaatatcatttttggaccttttgctcggcgccatagcccatagcgccgaggtaacacagttcggcgccataggctatggcaccgaggtgcgtgctacgctggcccaacctaaacgacgtggcgccaacgtggtaccgagctcggcgccaagatctatggcgccgagcttggctatgtaacagcaaattatgtctagctcagtcagtagagtggaagacttttaacttgaggttgtgggttcaagctccatggtggacgta

SEQ ID NO: 132049 - DNA, 1670 bp, Zea Mays
atgggggagaagcaggctccggacgcgacggccgtggccgcggcgggcgcgggggaccaagacgacggcaccgcgccgccgccgccgccgccgctggacggaatccagtactgcagcgagcacccgtaccggcctgccaacgccggcgccgcggcggcggtcgccggcggcgggatatgcgccttctgcctgcaggagaagctcggccgcctggtgtcctcctccaagtccagccctttcttcccgctcggcggccacccgccgccgtcggggtccccgtcgtcgccgccgtccttccgccgcgccgctgagccgccaccgccgccgccgccgctccacccgtccggcgcctcgcgcaagttcatgtcgttccaccggaagaagacgctctcctcgtcgtcctcctcctccgccgccgcctccgcggggggaggcgggctgaagcggagcaagtcggtggcgccgaggcccgagctggagcagttcccctactcgtcgtcggcttcgtcgctggcggccgagagcccgcgcaagaagagcttctggtccttcctctccatctcgtcgtcctccgcctacgcgcagcaggccgccgccgccgccgccgcatccacgccgtacgccaccaacatgggcgccgccgcctcgagaaggaagtcggtgtccgtggcgtcggcggcgtgggcgtcaaggggcgccggcgcgcaggaccagcggccgcgaggcggggccgggacggcggcggcgtccgcgctggggcggacgctggaggccatcggcgagcccgagagccccagccagagccaggtgtcgtcctctgcctccttcgggcggaaggtggcgcggtcgcgctccgtgggctgcggcagccgcagcttctccggggacttcctggagcgcctctccaacggcttcggcgactgcacgctccggcgcgtcgagtcccaccgcgagcccaagccccacaggatgcgcggcggcggcggaggcggaggcggaggcctgggcaacctccacggagctggcgcagacgacgctgacgctgacgacgaggacgacgatgacgtgtacgagcaccagcaccggatcaagtgcgcgggcttcttcggcgccttgggccccgcgtcctcctcctactggctctccgcagcggaggcaggcgcgagcgtcaccaagaggtcgtccggccggagccaccaccggagctgggcgtgggcgctggcgagtcccatgagggcgctgcggccgacatcgtcctccacctccacgaagaccatcaccgccgtgccgccgcccagccacgtgaccgtccacggcaacggcgactcgtcggcgtcggcattgtccataccatccccgacgccgccgccatcgtcgtcgacggaggtaaccgcagcggagaactgaaagccgaagctgcagcatggccgcccccactgccttgcgtcccgtctgtcgattcgcgccgtatagatctcgacatctcgtccgtcctcacctcacccccctgctgttcctaagtaagtgtctggatgtgtaatttcaacaacaaactgctcataagttgaagatcgtgctgtggattttgggtctggtgtgggcattttacgtagactgatgacaaccttagcaggaagggaacggcacaccaagccgaattcgttttcttc

SEQ ID NO: 132050 - DNA, 648 bp, Zea Mays
tcaaagatgcctcctcacgcgccgccggctgatcaaaaggcctggccgaggcagagacacgcggagaaggcggcgggggcgccggcaccgcgggagccgctcgtgcagcggcgggcgtcgttccacgcgcgctgcacgcctgagaaggagcagcagcgagaccacctgatgagacagaagccccggacgcatccggacctgctggccggcgtcagggagcggggcttccggcgagcgggcgtccacggcggcaacgctactgccgccgccgtcccgtggggcaggagggcggcgccgagcaaggcgctggtgaccgtcgccgtgcatcggagcatgtggccgctgcacgtgatggcgagggccgagtggcgcgtcgcggacctggtcgcggccgcggtggagctctacgtcaaggaaggacggcggccgccgctgccgtccgccgacccctcggcgttcgggctccattactcccagttcagcttggaaagcttggaccccggggagaagatcatggagcttgggagcaggagcttcttcctctaccgcagcagtagttgcggctcgctctacgcgtccagctagcaactgaagccggcaaggccacgcccacctctgccgacaggccaaacatgctaccaccaatcc

SEQ ID NO: 132051 - DNA, 2405 bp, Zea Mays
cctccgcctcccggcgcccgcatcgcctctcgcctgcgctgcgctttccttcccccaagatattttccggccgctctaccctgtagctgtagcgcgtgcgcgcaccgccttgccctgcggtccgcagccacgagactgccctgccccgccgccaagtggccagaatcccgccgcggggcccgccgcgatcgcccaccaaaaccaccctcgggctcgggtatactacacagatacatggccggccatctctgagccggtctcccggcagcagcagtccctcgggttgtccacgcggagcgccagccgatggccggccacagtatgtcggttcacccgaagcctataaattcctcgccgccccgcctctcgccgccccgcctctcgccgcccatttccctccgccgcctcctaatcctcaacacccgcgcccccaaccgcgcccgtcgtatgccaccatgcaccgcgcccgccccaccgcgcacgctaatgaccccgatgctccgtacgccgccgccgtcgcgatgctgctggagcccaaactcgaggacgaggagttgccgctgcagcagctggcgtccccgggccccttcgtgtccctggaccagctgatgccggcggtggccgtgccggccgaaccgcgcccgctggaggcgctgctgcaaggcccgcagctgccgcccttcctgtccaagacgtacgacctggtgaacgagccggcgctggacggggtcatctcctggggcgctgccgggaacagcttcgtcgtgtgggacccctccaccttcgcgcgcgacgtgctgccgcacaacttcaagcacaacaatttctccagcttcgtcaggcagctcaacacctatggtttccgcaaggttcatgctgacagatgggagtttgctcacgaagatttcctgcgagatagcaagcatctattgaagaggattgtcaggcgcaggtcctccccaacaaaacaaagcagcgttcagcctggctcttcttctggagagtccagcttggaccctgagctccacacgctgaggagagagaagaacgcgctgcttgaagaagtagcaaggttgaaacaggaacaccgccagacaattgagcaaatgagcacgctgaatcacaggctggaatctgcagaggaccggcagaggcagatggtctctttcctggccaagctccttcagaacccgagtttcgtgaggaagctgaagctgcacagggagaagaaggagatcgactccaccagggtgaaaagaaagtttctcaaacatgttcctcatggcagcgtagagtcaggtgaatccagctcacagcacgccggagagaatggttcgtatttcgctgtgagttcccccatggctacaactacaagcgtgcatgacgacatcacggagcttcagaactttcttttggaagatgatgacctcaacttcggcatggattcagaaaacaccgggcttgaaggcaccgaggcaacagatgatattggagaactgattcaggggttcgacacacaagaggaacttgacctcggcagtggagctgagctacaggagatgcctccagcttctggccctcttgctcgagatcccacaatcggcaggttcaagggaaagaatgtgctgtgtccaggactggacgctacctcctccgaaggcgactgcctcagtccattgcctgacaacatggggctgctttcaggcaccatgctagggacggcaggcagcatgatggccgctgacgatgagcaaatatggggcgttgatgcttcggcagccctgcaaagctcttgcagtggcactagccaacaagctttcggtagccatgctagtgatccctatctgatggacatcgccaacaggcctgagagattctgggagcttgatttccaggcactggatgaggctgatctgcagctggacaagtgtgctatcgatgaccctgctcttcagcagcagccaagcatgaagaagctgtagacgaatttccgttgtcagacagacagtatggtggtgcttcatccactgaagtgctacaattaacttatggagattgctatagttacttcggtattttggagcgaggctgatgaactcgcctactatggcacttagtagtagcagcagcagtagtatgtttttgtttcccatttattcacccccggtgtttttgaatggaaacttgtatcctagtgatttcttcagagcagctgttaactgctctggccgattctttttttttttgtttccatttatgtttttgttctgattcttttacttgctagttgctacttgcgaatgtcttgcaatgagtaatgggatttaaaaaaaaatccgttctcagagaaccaagcgatgtactgatgtgctgctgaatgccaagaagtggctgaattctgttta

SEQ ID NO: 132052 - DNA, 1287 bp, Zea Mays
ctctgttcttgctttcttccttgagctgaaccgcgtcatgtaacacgcatcaaaactggccgcaccaaattataaattggattaggattgaggcaatcctgaggagtagatcctgtgatgggcaaaggctaatccgtttcacgggacgcgacgctatgcaagggtttccgcaaggttcatgctgacagatgggagtttgctcacgaagatttcctgcgagatagcaagcatctattgaagaggattgtcaggcgcaggtcctccccaacaaaacaaagcagcgttcagcctggctcttcttctggagagtccagcttggaccctgagctccacacgctgaggagagagaagaacgcgctgcttgaagaagtagcaaggttgaaacaggaacaccgccagacaattgagcaaatgagcacgctgaatcacaggctggaatctgcagaggaccggcagaggcagatggtctctttcctggccaagctccttcagaacccgagtttcgtgaggaagctgaagctgcacagggagaagaaggagatcgactccaccagggtgaaaagaaagtttctcaaacatgttcctcatggcagcgtagagtcaggtgaatccagctcacagcacgccggagagaatggttcgtatttcgctgtgagttcccccatggctacaactacaagcgtgcatgacgacatcacggagcttcagaactttcttttggaagatgatgacctcaacttcggcatggattcagaaaacaccgggcttgaaggcaccgaggcaacagatgatattggagaactgattcaggggttcgacacacaagaggaacttgacctcggcagtggagctgagctacaggagatgcctccagcttctggccctcttgctcgagatcccacaatcggcaggttcaagggaaagaatgtgctgtgtccaggactggacgctacctcctccgaaggcgactgcctcagtccattgcctgacaacatggggctgctttcaggcaccatgctagggacggcaggcagcatgatggccgctgacgatgagcaaatatggggcgttgatgcttcggcagccctgcaaagctcttgcagtggcactagccaacaagctttcggtagccatgctagtgatccctatctgatggacatcgccaacaggcctgagagattctgggagcttgatttccaggcactggatgaggctgatctgcagctggacaagtgtgctatcgatgaccctgctcttcagcagcagccaagcatgaagaagctgtag

SEQ ID NO: 132053 - DNA, 2474 bp, Zea Mays
ccagaaataaaaatcgccgtggaggcgagtcgccgccggcaccgcccggcacggccttcttctccggcgaaggcggagctcgttacggggattccacatccgttaatcggtcccaccggatccctcgccgcctcccacgggccgggccgcgccgtggcgcgcgcgcaggccgagatgcggaagaggatggagagcgacgacgatctgatcgaggaggcaaaactgcgcaccgtctggtgggcgctctgcatcttcgccgtctcctacttcctcacgcgtcaatggctgcttgtcctactccgacaaggtctcggatggtttctacttcatccaggggatggatcccttcatatggacgctctgcaacgatttgcacgacggaggccgcgtccccactattgagtccctcaaggctgtcaatcccaccgattctgccatcgaggtggtcatcgtagataaagtggcggactatgacctgaggcagctgataagcatggccattgacgtttctctgaaccgtaccgactccaaggagatcgccactcgactcgctgccgttgtgtccacgaagatggggtgagtaatgcaactgcatttctcatttgtgtgctcgctatcttacgtgaacgtttccgtcgaaggggatcggtagcagctaccgaggaacacgagttgggtccccggtggagagactctgttgggttcctgaagattagctcagggtctgttgtacttcccatcggaaagttatcagttggcttttgttgccaccgagcattactgttcaagaccctggcggattccatcaatctgccctgtcgcattgtgaagggatgcaagtactgcaaagctggtgctgccacttcttgcttggtgcgctttggtcatgacagggaatgtctaattgatttaattgggaacccgggattcttatctgaacctgactccctcttgaatggactatcatccatctctgtttcttcaccattgcgcccaccaaaacatgactcagctgataattctgataatttcaagttgtttgccaagaaatatttccttgattgtcagtcgttaaatctcatgttcagtgatccagcagctggaacggttatcgacttagatgaggttatgggatcaaatctaggtctaaactcatcacatgcaacaaacagtgattgtcaagctacctttactcatcttaaggctggtactcgacgcagtagtcaagatgggagttttataatgcagaggagttcccaagaggatactcaatctggactaagtgatccctttagcgatatgtcccttgagatagaagacttgattatcccatggagtgagcttgttctgaaagagaaaattggtgcaggttcttttggtactgtgcaccgtgcggattggaatggttcggatgtcgcagtaaaaattctaatggagcaggacttccatccagagcgtctcaaagaatttttgagagaggttgcaattatgagaagtttgcgacatccgaacattgttcttcttatgggtgctgtcactcagccacctaacctttcaattgtgactgaatacctatcaagaggtagcttatacagacttttacacaggcatgctgcaagggaaaatctggaggagcgccgccgcttgagtatggctttcgacgtggcaaaagggatgaactatcttcataagcgtaatcctccaatagtccaccgggatcttaagtcaccaaacctgttggttgacaaaaagtacactgtgaaagtctgtgactttggtctctccagattgaaggcaaacacatttctgtcttccaagactgcagcagggactcctgagtggatggcaccagaagttctacgagacgagccctcaaatgagaagtctgatgtttacagcttcggtgtaatcttatgggagcttatgacattgcagcagccatggagtaatttaaatccagctcaggtcgttgcagcggttggtttcaagggacaaaggcttgagatcccaagcagcgttgatccgaaagtggcggcagtaatcgagtcctgctgggtcagggagccctggagacgaccctcttttgccagtatcatggaatccctgaaacttctcatcaagacattaccacccaatcagctcctcgaagaaaattagttaccacccaagcaacttgcaaattatgtcacctctagagttttctcgatttgtttagatccgatatgcgccaggcctctcaaaccattcgtcttcggcgccacgtattccctgatgagaaatattcaaaactacacctgtcacaaaaggggaaaaactatggttggacaataagattcatgaaaaaaatatgtgatccaaattaagtgtacatctcttttatcaaggaaccaaatgtaagttggtcaaatatatacatataagtactaatatttatggaatatatacttttacaataaaattattaaagatataaa

SEQ ID NO: 132054 - DNA, 1388 bp, Zea Mays
aataacccagaaataaaaatcgccgtggaggcgagtcgccgccggcaccgcccggcacggccttcttctccggcgaaggcggagctcgttacggggattccacatccgttaatcggtcccaccggatccctcgccgcctcccacgggccgggccgcgccgtggcgcgcgcgcaggccgagatgcggaagaggatggagagcgacgacgatctgatcgaggaggcaaaactgcgcaccgtctggtgggcgctctgcatcttcgccgtctcctacttcctcacgcgttcttttggtactgtgcaccgtgcggattggaatggttcggatgtcgcagtaaaaattctaatggagcaggacttccatccagagcgtctcaaagaatttttgagagaggttgcaattatgagaagtttgcgacatccgaacattgttcttcttatgggtgctgtcactcagccacctaacctttcaattgtgactgaatacctatcaagaggtagcttatacagacttttacacaggcatgctgcaagggaaaatctggaggagcgccgccgcttgagtatggctttcgacgtggcaaaagggatgaactatcttcataagcgtaatcctccaatagtccaccgggatcttaagtcaccaaacctgttggttgacaaaaagtacactgtgaaagtctgtgactttggtctctccagattgaaggcaaacacatttctgtcttccaagactgcagcagggactcctgagtggatggcaccagaagttctacgagacgagccctcaaatgagaagtctgatgtttacagcttcggtgtaatcttatgggagcttatgacattgcagcagccatggagtaatttaaatccagctcaggtcgttgcagcggttggtttcaagggacaaaggcttgagatcccaagcagcgttgatccgaaagtggcggcagtaatcgagtcctgctgggtcagggagccctggagacgaccctcttttgccagtatcatggaatccctgaaacttctcatcaagacattaccacccaatcagctcctcgaagaaaattagttaccacccaagcaacttgcaaattatgtcacctctagagttttctcgatttgtttagatccgatatgcgccaggcctctcaaaccattcgtcttcggcgccacgtattccctgatgagaaatattcaaaactacacctgtcacaaaaggggaaaaactatggttggacaataagattcatgaaaaaaatatgtgatccaaattaagtgtacatctcttttatcaaggaaccaaatgtaagttggtcaaatatatacatataagtactaatatttatggaatatatacttttacaataaaattattaaagatataaa

SEQ ID NO: 132055 - DNA, 2787 bp, Zea Mays
gtgccgtgtgccgtgcgcgctgcacccggcactggcagacacccgctcttcgacgcgactccccagtccccactgggccaccagtcctccgtccatcactccatccacgagtcagcgtccgcgtccgcgtcggcgtgtccctctccttcagatgcgaggcctccaagggcgaactagtagttgcttggagacttgcagtgaaaagggcacgcagaaaagcgagcgtctggccgcccgcacgccaggagcgatcgacagatcggctgatgcggagttagcacttagcagtcgcccgccgcgacctcaacctgcaccggcgccgcacgccaagggcggagacgccagatgatgaaggatgcgaagtggcctcacgcggtgtcgagcgccggtggaaggcgaggcccccctgcctcatcatccaacgcgggggcgtcgtacaccctcctcgcgtcctccccgcccagcagcgtcagaaacgacggctgctcgccgcactaccctcccgcccctgcgtccgacgacgacgggctctcctcgttcgacgcgtccgtcgctgccgcgaagctgccgttccagcagctgcacaggaacaggccccaactcggcgtcgcggactggctgccgctgcagcgccaatctagcggtagcagcgtcgggggcgacgacggcgaggtatcctccaccgtttccttcaccatcgccaacgccgcggaatataggtacaagggcgacgcggaccgcgcaccgagcagcagcagcaagagctgggcgcagcaggcggaggaggcctacaacctccagctcgccctcgcgctccgcctctgctccgaggcctccgccgctgcggaccccaacttcctcgactcctccatcgctgccgccgaccacctccagcccattgcatcgcctcaatccctctcccaccgcttctgggtcaatggctgcttgtcctactccgacaaggtctcggatggtttctacttcatccaggggatggatcccttcatatggacgctctgcaacgatttgcacgacggaggccgcgtccccactattgagtccctcaaggctgtcaatcccaccgattctgccatcgaggtggtcatcgtagataaagtggcggactatgacctgaggcagctgataagcatggccattgacgtttctctgaaccgtaccgactccaaggagatcgccactcgactcgctgccgttgtgtccacgaagatggggggatcggtagcagctaccgaggaacacgagttgggtccccggtggagagactctgttgggttcctgaagattagctcagggtctgttgtacttcccatcggaaagttatcagttggcttttgttgccaccgagcattactgttcaagaccctggcggattccatcaatctgccctgtcgcattgtgaagggatgcaagtactgcaaagctggtgctgccacttcttgcttggtgcgctttggtcatgacagggaatgtctaattgatttaattgggaacccgggattcttatctgaacctgactccctcttgaatggactatcatccatctctgtttcttcaccattgcgcccaccaaaacatgactcagctgataattctgataatttcaagttgtttgccaagaaatatttccttgattgtcagtcgttaaatctcatgttcagtgatccagcagctggaacggttatcgacttagatgaggttatgggatcaaatctaggtctaaactcatcacatgcaacaaacagtgattgtcaagctacctttactcatcttaaggctggtactcgacgcagtagtcaagatgggagttttataatgcagaggagttcccaagaggatactcaatctggactaagtgatccctttagcgatatgtcccttgagatagaagacttgattatcccatggagtgagcttgttctgaaagagaaaattggtgcaggttcttttggtactgtgcaccgtgcggattggaatggttcggatgtcgcagtaaaaattctaatggagcaggacttccatccagagcgtctcaaagaatttttgagagaggttgcaattatgagaagtttgcgacatccgaacattgttcttcttatgggtgctgtcactcagccacctaacctttcaattgtgactgaatacctatcaagaggtagcttatacagacttttacacaggcatgctgcaagggaaaatctggaggagcgccgccgcttgagtatggctttcgacgtggcaaaagggatgaactatcttcataagcgtaatcctccaatagtccaccgggatcttaagtcaccaaacctgttggttgacaaaaagtacactgtgaaagtctgtgactttggtctctccagattgaaggcaaacacatttctgtcttccaagactgcagcagggactcctgagtggatggcaccagaagttctacgagacgagccctcaaatgagaagtctgatgtttacagcttcggtgtaatcttatgggagcttatgacattgcagcagccatggagtaatttaaatccagctcaggtcgttgcagcggttggtttcaagggacaaaggcttgagatcccaagcagcgttgatccgaaagtggcggcagtaatcgagtcctgctgggtcagggagccctggagacgaccctcttttgccagtatcatggaatccctgaaacttctcatcaagacattaccacccaatcagctcctcgaagaaaattagttaccacccaagcaacttgcaaattatgtcacctctaga

SEQ ID NO: 132056 - DNA, 1331 bp, Zea Mays
aataacccagaaataaaaatcgccgtggaggcgagtcgccgccggcaccgcccggcacggccttcttctccggcgaaggcggagctcgttacggggattccacatccgttaatcggtcccaccggatccctcgccgcctcccacgggccgggccgcgccgtggcgcgcgcgcaggccgagatgcggaagaggatggagagcgacgacgatctgatcgaggaggcaaaactgcgcaccgtctggtgggcgctctgcatcttcgccgtctcctacttcctcacgcaccctggcggattccatcaatctgccctgtcgcattgtgaagggatgcaagtactgcaaagctggtgctgccacttcttgcttggtgcgctttggtcatgacagggaatgtctaattgatttaattgggaacccgggattcttatctgaacctgactccctcttgaatggactatcatccatctctgtttcttcaccattgcgcccaccaaaacatgactcagctgataattctgataatttcaagttgtttgccaagaaatatttccttgattgtcagtcgttaaatctcatgttcagtgatccagcagctggaacggttatcgacttagatgaggttatgggatcaaatctaggtctaaactcatcacatgcaacaaacagtgattgtcaagctacctttactcatcttaaggctggtactcgacgcagtagtcaagatgggagttttataatgcagaggagttcccaagaggatactcaatctggactaagtgatccctttagcgatatgtcccttgagatagaagacttgattatcccatggagtgagcttgttctgaaagagaaaattggtgcaggttcttttggtactgtgcaccgtgcggattggaatggttcggatgtcgcagtaaaaattctaatggagcaggacttccatccagagcgtctcaaagaatttttgagagaggttgcaattatgagaagtttgcgacatccgaacattgttcttcttatgggtgctgtcactcagccacctaacctttcaattgtgactgaatacctatcaagaggtagcttatacagacttttacacaggcatgctgcaagggaaaatctggaggagcgccgccgcttgagtatggctttcgacgtggcaaaagggatgaactatcttcataagcgtaatcctccaatagtccaccgggatcttaagtcaccaaacctgttggttgacaaaaagtacactgtgaaagtatgaaatttccgatattgcttttactttcattaggaaaaagcttgccttcagtgacttaacgatatcacag

SEQ ID NO: 132057 - DNA, 405 bp, Zea Mays
atgggggtgggaggtggaggcggaggcggaggggaggccgcggcggtgtcggcgccggcgccggcggaggaggcggggaaggacgcggaggatggcaatgactggaccttgaaggcgaagctgatcgccgtagcggtgctgggggccacggcgctcggggtgttcctgcactcctacttccgccacgcggctgcgcaaggcggaggagggctcgtcagcatgtgcgaggagcgcgcgcgcatgctgcaggaccagttcgccgtctccgtcaaccacgtccacgccctcgccaccctcgtcgccaccttccactacgagaagcacccgcccgcgctggaccacatccacctgtgcgcagctgcacgacaccttcatagcgcggggggccagagctggagggagtaa

SEQ ID NO: 132058 - DNA, 109 bp, Zea Mays
cagattcaaatttccaaattccaaatgtcaatcatctccctaatgaaaataaaacatctactattaatattttttttcttgtcactcatttagaggaggaataagtggg

SEQ ID NO: 132059 - DNA, 478 bp, Zea Mays
ttctgcagaaagtcatagatgactacatgaaaaagatcgaatccatccagaagcagaaggaacaagaactgatgaaaatttagacctcaagctgactgtatggctggtgaggaataatcgcctccgtgaagcatggacccctgcatatgttggtgaattcacaatgtagtgatgtgatgttttctgaagcaatttgtttggttcatggttttggcgtctcggcgctacgccagggatgcacgttttgaatcaggcgctttgctggaacttttgggtgcacacaagttgagacaatgctgctgttgtgtgtgtgtgtgttttgagattaagacaacgctgctgtgttttttctttgagattaagacaatgctgttgcgtatgttcttctcgttttctgtaatgttcgtaaatagtctcgtcttcgccgtgttgtctgactgctacattgtcaatgtttctaaacatacatctctgaatc

SEQ ID NO: 132060 - DNA, 1629 bp, Zea Mays
atgacctcctcctccagctctccctgctaccgcgtgacgaaaccgcccatacaacaaccgtgctgccgctacaacctcactctgcatagcgcgaactatgactccatcaagccgaccatggacgaggaggaagagcgcgagatcgggcctgggcagcacggacatcacgtgttccaagtgcgcgacggcgagggacctgctctgctccaaccgggtcatcgcgtcgtcctagacatgtccctcaggccgcgaatgcttgctagggtagcagaggcgcggttgggtttgctaatcgctattctgatgctgattccaggactgccaaagatggacagagcgcaaaatttgtccaggatcgatgaggcaaaggggatcattgataagatgaaggttaagttcccagataaaattgagggatggaaggaggtgaaggaagtgggcgagctaaggggcgcgcgagaggacgtcagggccttttgctttactattctcctctttatgatccagcatcagccactattttattggaactttctgcagacttcaaaacaaggaggcttccccaatattcagtctacgcaacatgttcccagtacaagcatttcatcgggtcttcctctcccacaacaattgcctgtatactctcagccaactctgccccttgggccttttaccagcctggttggctatccatatttgcctcagaactattacttaccttcatcgccattccagcaagcgtactcaagtaatgggcctttccatcaatctgctgctcctgccatgcctggagctggtatgaagtatccgatgccacaatacaagagcagccctcctgcttcgaccctaccacaaccatcatcactctctggttacggagggttcggaagtgcaaataatatccctagaaatttcagccaaaatcagggtgctgccgctgcacccacaactttgggattcgatgaagctttaggcacacaattcaaacaccccaatcattatgcagcactacagcagagtgataattcagcaatgtggcttcatggaggcgctggttcaagaacaatttctgcagttccgcctggtaacttctatggtttccagggccaaagtaagcatggtggcttccgccaggcacatcatccatctcagtacggtggtcttgggtacccaagcttctaccagtcgcagaccagtctgccacaggagcacccccagagccccactgagggaagcttgaacaatccctacggggtaccatcccagccttcacaccagctctggcagcacatatactaaaccttatgtgctctcctgggagatgcctctacgctgccaggctacctgcaagtcttcttggcacgcagcgccgtgaagagagcagactagctaaacccaacagcaatgaagtgtgttgtttttctttctttctttttttctccagctgtgtgttctggaactaaattaggctgtcgtggtttttactttatagtgagtggtgttgcagtcttgcagaggtgctatcttgtaacggtaaagtcctaactcatctaacatatctgcttttcatacccctgtaatgtgacattttgttcttgatgcctagaagcttctacgtgttgtagctac

SEQ ID NO: 132061 - DNA, 829 bp, Zea Mays
atgcctgctgatcttgagttgtcacctactgacaagcatatctttattgaggagataatgtcaaatttactgtattattatggcatgggtaatgtcgtgaaggatattttgttgcaacgctactttggaaagggagtacgtggaggctcagttgaacctgaatcagatattgtgcaggcttgtagaagctttctaaatcaacggcagtgcattaatgtgtggcgatttatccaaactatcaatgagagaaaagacttgacagagaacctgaagcagctacagtgcaggacacttatttttgttggtgagaattcccagttccatgctgaagctgtgcacatgactgcaaagcttgataggcgatatagcgctcttgtggaggtacaagcttgtggctcggttgtgacagaggagcaaccacacgcaatgctgataccaatggagtactttctcatgggatatggactgtacaggccaagccagataaactgtagccctcgtagccctctgaatccgttttgtatatcaccagagctcctctctcctgagagcatgggggttaagctaaagccaatcaagacacgagccaaccttaaagcataggaataggtgatgagaatgcgtaggaactgatgcgcatcccttgatttttttgtgctgaagtgacatagctgttgtttccgtgatgtacataagacaagaggttagtcgggttagggttcggtgggtcgtcgattccattgatttctagactttaaaacagttgtacattgtcacagatttatttgttgaagggagaagaaataataaggggagatgagatgttgcc

SEQ ID NO: 132062 - DNA, 743 bp, Zea Mays
aacttgtactttgagaccaaatatatattgcatacttgatattatactattatttgagcttgtcttattgtactcttatctgttcttatgaaggttagaggaatgtgtttggggtgagtaatttttttgtgttgtttcctctatccatggccatggaggagcaaaggaggccacctagctcgaagatagcgccagtgtccatgaaggcgtcctctgcaaatgcgacgcttcaaggcatgaagaacagaagccattttcgaagggacaggaaaactgcgctgcaacaagacgtgtggacaagctgaggaagaagttgtggcacgagaagaacgtccactaagctctaaagcaggcgttctcgaggccgctctgcctcgcctccctattgtctcaagtcaatgtccttctttgcttttcgatcaatttcacaagcaagaagcaacctaaccaataatctattgcccttccgaaggactcgatacactttctgatttctgcctcttctgaattgttcctagacattggagcttctggccccgttgtaagtggaaaatccttgtacttaaaggttgcaatgtagtggccccgttgtaacgcacgggcactcacctagtgtcaataagaagtacaagctcttgtctgctggtaaaagaaaaacatcttgactggacagtgacattaatataataaaaacggtgtttggctgctatggaaaaatgccagccgactttcttttaaaaaaa

SEQ ID NO: 132063 - DNA, 552 bp, Zea Mays
aatagaagtcgttttctggggggagctccatcgtcgggaagaggggtcatggctcaccacggacaaaagcacttcttttgacccgaatacatgaagccatgaaagtaatggttgaggggagggggaagcaagtacctgatgatcttttgggtcaatacgggtagtttatgatcaagctggtgtgggaggctcaccacggacaaaagacggcacactgagcttgcacagtcaggattttgacagctgttgtcaacgaaggcgagaatggtgtactctaagctcagcaatttccagaaaaaatcgttaacttgcaagttagtttcaatatttctagcatattccaatcacagcatcgtccagcgcacacccatccaatttaggggcttcttgttgtgctctcaggccccagtaagaactccaatccctagatctcttttcgtgtgttaagttgtgcttaagaactgctgatgcagacattaggttagggcaaggattttggttaattggaataaggcagcgctttaaccttagttcctcagtttcagctttaac

SEQ ID NO: 132064 - DNA, 252 bp, Zea Mays
atgccctcaccccgcaacgcgcgccctgcccccgcaacgcgcgcccgcgcaagccatcccgcaacgcccgcgcccccgcccgcgttcctcacccgcgcgcgtcgccctcaccgccgattattcctcgcctcgattgcatcccgcggcatccatctccacctcaccgcggcagatccccatttctcgcgccccctccctcgcgcctgcgacatccatgccaccctcgccctcccgctaatctcgccgcgatga

SEQ ID NO: 132065 - DNA, 681 bp, Zea Mays
atgtcagattccaagggcggcgccggcggcatgggcatgaacatggtgaccacggtgatggccttctcggtcagcgccttcttcgtgctcttcgtcttcaccaggctgctctgcgcgcgcctccacctgtccagggccgccgccgccgcccagggctacaacgtgaggcgccctcccgacccggcccacccggccgtgctctgtacctatctatccttccgtgctcttcgatggcgaccgtgcaccaggggttttgtatggcaacgaacgggaatcagaatcgttttcgtgtgggcgtgcaggtgcaccgtgtgcctggaggagtacgaggccaaggacgtggtgcgcgtgctgcccgcctgcggccacgccttccacgcgacctgcatcgacgcctggctgaggcagcaccccacctgccccgtctgccgcgcctccctgcgcgccaggaacggctgccgcgccacgccggtcgactacagcctcctcgtcgccggcgccgacgccgcagccaccgtccagcatgttcccgcgtcctcgtccggcgcgtcaccgcaggcagtcggacgccagcgacagaccgacgacactgggcgggcggatggcttgctggagatcgtctccgaagagcccgcctcctcgcgagatccgagccctgctgttgctgctgctggttggtaa

SEQ ID NO: 132066 - DNA, 928 bp, Zea Mays
ctactaccaatttctttacacggcttagggcgcaagaggcctctcctgctctacacactgccctagcttagctagccgtttggagggcagtgttggcagctagcagcgacgacagatggagtgcagcggcaaggaggagcagcagatgcagatcgtgtgcgtgcgcagcgcgtcgacgggcggcggcgaggaggtgggggagtgggcggagcagtcgtcgcggtcggcgctgtcgctgttcaaggagaaggaggaggagatcgagcgcaagaaggtggaggtgcgggacaaggtgttctccatgctgggccgggtggaggaggagaccaaacgactggccttcatccgccaggagctggagctcatggccgaccccacgcgccgggaggtcgacgccatccgcaagcgcatcgacaaggtcaacaggcagctcaagccgctcggcaagacgtgcctcaaaaaggagaaggagtacaagatgtgcctcgaggcctacaacgagaagaacaacgagaaagccacgctggtcaataggctgttggagctcgtaagcgagagcgagaggctgcggatgaagaagctggaggagctcaacaagacgatagaatccctctactagatctgatctcatggaagaagaggatgacgatggtggtaaggtagtcgtggtattccggcccataagagaaatcgaactagcaatgactgaagctcaacgtgcaattttttttcctgcgacgtacttgatgattggatttgtgtatttgtacacatgatttgtaaccgatggttcactatccttggcttgtaatcgttgctctgcggcaccattggtcctaaacgtatttgaaataccaatatcagaatcagataccaaatggttcttagatttatcgttatgtaaatagaactacgagctcactttatc

SEQ ID NO: 132067 - DNA, 2745 bp, Zea Mays
gtagccctgcagtcacccagagcagacccggatttcgctcttgcggtcgctggggttttagcattggctgatcagttcgatccgatccggctgcgaaggcgagatggcgttcgcggtttctggggcggtgctcggtggggccgtaagggctccccgactcaccggcggcggggagggtagtctagtcttccggcacaccggcctcttcttaactcggggtgctcgagttggatgttcggggacgcacggggccatgcgcgcggcggccgcggccaggaaggcggtcatggttcctgagggcgagaatgatggcctcgcatcaagggctgactcggctcaattccagtcggatgaactggaggtaccagacatttctgaagagacaacgtgcggtgctggtgtggctgatgctcaagccttgaacagagttcgagtggtccccccaccaagcgatggacaaaaaatattccagattgaccccatgttgcaaggctataagtaccatcttgagtatcggtacagcctctatagaagaatccgttcagacattgatgaacatgaaggaggcttggaagccttctcccgtagttatgagaagtttggatttaatcgcagcgcggaaggtatcacatatcgagaatgggctcctggagcattttctgcagcattggtgggtgacttcaacaactgggatccaaatgcagatcgtatgagcaaaaatgagtttggtgtttgggaaatttttctgcctaacaatgcagatggtacatcacctattcctcatggatctcgtgtaaaggtgagaatggatactccatcagggataaaggattcaattccagcctggatcaagtactcagtgcaggccccaggagaaataccatatgatgggatttattatgatcctcctgaagaggtaaagtatgtgttcaggcatgcgcaacctaaacgaccaaaatcattgcggatatatgaaacacatgtcggaatgagtagcccggaaccgaagataaacacatatgtaaactttagggatgaagtcctcccaagaataaaaaaacttggatacaatgcagtgcaaataatggcaatccaagagcactcatattatggaagctttggataccatgtaactaatttttttgcgccaagtagtcgttttggtaccccagaagaattgaagtctttgattgatagagcacatgagcttggtttgctagttctcatggatgtggttcatagtcatgcgtcaagtaatactctggatgggttgaatggttttgatggtacagatacacattactttcacagtggtccacgtggccatcactggatgtgggattctcgcctatttaactatgggaactgggaagttttaagatttcttctctccaatgctagatggtggctcgaggaatataagtttgatggtttccgttttgatggtgtgacctccatgatgtacactcatcacggattacaagtaacatttacggggaacttcaatgagtattttggctttgccaccgatgtagatgcagtggtttacttgatgctggtaaatgatctaattcatggactttatcctgaggctgtaaccattggtgaagatgttagtggaatgcctacatttgcccttcctgttcacgatggtggggtaggttttgactatcggatgcatatggctgtggctgacaaatggattgaccttctcaagcaaagtgatgaaacttggaagatgggtgatattgtgcacacactgacaaataggaggtggttagagaagtgtgtaacttatgctgaaagtcatgatcaagcattagtcggcgacaagactattgcgttttggttgatggacaaggatatgtatgatttcatggccctcgatagaccttcaactcctaccattgatcgtgggatagcattacataagatgattagacttatcacaatgggtttaggaggagagggctatcttaatttcatgggaaatgagtttggacatcctgaatggatagattttccaagaggtccgcaaagacttccaagtggtaagtttattccagggaataacaacagttatgacaaatgtcgtcgaagatttgacctgggtgatgcagactatcttaggtatcatggtatgcaagagtttgatcaggcaatgcaacatcttgagcaaaaatatgaattcatgacatctgatcaccagtatatttcccggaaacatgaggaggataaggtgattgtgttcgaaaagggagatttggtatttgtgttcaacttccactgcaacaacagctattttgactaccgtattggttgtcgaaagcctggggtgtataaggtggtcttggactccgacgctggactatttggtggatttagcaggatccatcacgcagccgagcacttcaccgccgactgttcgcatgataataggccatattcattctcggtttatacaccaagcagaacatgtgtcgtctatgctccagtggagtgatagcggggtactcgttgctgcgcggcatgtgtggggctgtcgatgtgaggaaaaaccttcttccaaaaccggcagatgcatgcatgcatgctacaataaggttctgatactttaatcgatgctggaaagcccatgcatctcgctgcgttgtcctctctatatatttaagaccttcaaggtgtcaattaaacatagagttttcgtttttcgctttcctaatgcttgatggctgattgtttgca

SEQ ID NO: 132068 - DNA, 2129 bp, Zea Mays
tcaacagccgacagcccattgtccagactcataagagagacgaagcccataaagaaaagggattcaccggctcaccgctcacataaacacacaccccgcttcctctttcccctattcccgacaccactcacacggtcacaccctcgcatcctgcgatcccatatcaattcccgtccccactcgccgtcgacgcaggtcgcactccagctccagcgcgccgcgcggtgctgctctccccgcccatgtgacgcgagtcgcgccccgccccccacagtcagcagtccgagaccccaatccgcggcgccgggcggggggaaccaggagtgggcaataaaaaaccgaggattccgtcctctgtggcggggatgggccaggaggggatggggtacaacagcaaggggggaggaggaggcggcggcggcgggggagggctgccgatgacggcgccgcggccgcggggcgcgtcgccgctccaccacagccggtcgcgcaagatccaccgcactttcaacaacctcaagattaccgtgctctgcggcctcgtcaccatcctcgtcctccggggcaccatcggcctcaacctctccctcccctcgcagccctccgacgccgaagcgctcgcggacgccaaggccgtcgaggacatcgaccgcatcctccgcgagatccgctccgactccggccccgaccccgacgacgagggcgacttcggcgccgcctctggcttcaacgccaccgcgctcagcgccaccgaggccgccgccgcgtacgcggccgcggtcggcaaatacgcgctcgggcccaagatctccgactgggacgcgcagcgccgacggtggctggcccagaaccctggcttcccggccacccttgccgggggcaagcccaggattatgctcgtaaccggctcgcagccggggccctgcgacaacccgctcggcgaccactacctgctcaagactaccaagaataagatcgattactgccgcctccatggcatcgagatcgtccacaacctcgcgcaccttgacaacgagctcgccggatactgggccaaattgccgctgctccgccgcctcatgctctcccacccggaggtcgagtggatctggtggatggacagcgacgcgctcttcaccgacatgtcgttcgagctgcccctgtcacgctacgacggccacaacctcatcatccacggctaccaggacctcctcttcgagaagcactcctggattgcactcaacaccggcagcttcctcttcaggaattgccagtggtcgcttgacctcctggacgcgtgggcgcccatgggacccaaggggttcatccgcgatcaggcgggcaaggtactcacggcaaacctcaagggccggccagcatttgaggccgacgaccagtcggcactgatttacctcttgctctcgcaaaaggacaagtggatggacaaggtgttcattgagaattcctactacttgcatggcttctgggctgggttggtggataagtatgaggagatgatggagaatcaccacccaggcctcggcgacgagcggtggcctttcgtgactcactttgttgggtgcaagccatgtgggagctatggggattacccagtggagcgctgcctcaggagcatggagcgagcgtttaattttgccgacaaccaggtgcttcggctatatggtttctcacacaaggggctggaaagccccaagatcaagagattcagggatcagacaactagaccaattaatgatgtggagaacttagatatgaaggccaaaatatctacaatttcctgaaagttcagatgagagttggtggtttggcaattgcatacttgctttggctatcaacaaggtcagagcattttgtgatatgggggacatggttgttctagtttccactctcttgctctctctctttttctttttcgttcaccaatctttattgttatgtgacagctagagattgcaagctttgtttattatcgtggttgaacatgatagaagctcaaatctgatggaaatagtctcgcttttgtactctatgccatttcattttttgttctaggttcttgtggaacatgcattactgatatgtggagtttgtgcatatgttagtagact

SEQ ID NO: 132069 - DNA, 2578 bp, Zea Mays
ttgtctcaatgcgtgggccttggctggcatgggctggaggcccagaaatagatgaccgcatcgtaagaaaaacaaggagtggagaggagagcccaactaaaataaaccttatccccgtcgtcctcctgtccactccattcagaccctcgtgacgtctccgatcgcagcgattcagcctccaatggcgcttcctcctcctcctcactcgctgccgcgcgcttccagcttcacgagcagcgccgtcacccccgagtccccacgcaggggcagccacagacccaataatacgttcgtcccaaacgcctccaccactgccgccgccgcggcgcagctctcgctgctccgcgcccacgcccgcgccggccggatgcagcccgcgcgggaggtgttcgacgcaatgccggatcgagggaggtccctcgtcgcctggaccacgctcatgtccgggtacgccacccacggcccagcctccgaggcgctcgagctgctcctctgcatgctcggccttctcgtcagaccagacgccttcgtcttctccgtcgcgctgcgcgcctgcgccgccgtggggagcctccggctcggcaggcagctccacggcgccgtcgccaagctcgggtacgtgggcgttgacctcttcgtggccaacggcctcgtcaccatgtactcgagctgccagtccctcccctgcgccgagaaggtcttcggcagtatcgcctctcctgacctggtctcgtggacctccatgctcagtgcgtacaccgagaacggacgtgacgccgaagcactggtgctgttcatggagatggcccgtggtggcgtcgcttgcgacgcttttacgctgtcggtggcgctaagggcagcttcgagtctgggtcacgtgggagtggggctgggccatcagctacactgctgcatgatcaagatggggttggtcggcaaggagttcctggataactgtctgattgggttctacggacggtcaggtgaactgcagctgatgaggaacgtgttcgatgagatgaatggcaaagatttggtttcttggaacaccgtaatccagtgctatgcggaaaacctgtgccacgaagaagcctcagctcattttcgtgctatgatgtttgaattcgcagagtgcgacgagtttacgctcggcagcattcttcaggtcgtgaccagaactggtgcttttggtcatggtatggaaatacacggctacctcatcagagccggtttggactccgacaagcacgttatgagcgctctcatggatatgtacgtcaattgggcgagtcttggtaagacgcaccgggtgattcctctgagaatgctaaaatactatctgacaatccagggcaagctggatcagttcatcgtggcaagcagtctgaagtcatgtgcttctggcctagatctgctggcagggaggatgttgcacgcttgcattttgaaatctgatatgaatccagattcttttgttactagttcgctgctggacatgtacgctaagtgcggtgctctggaggaatcaaatctcctgttttcaagaaccaagaatccaggcacagctgagtggtctgccgccatctcagggaactgtctgaatggccagtacgggagagcagtgcagttgtttaggaggatgcagtcagagcatgtgcagcctaacgaattcacctacaccgctatacttacggcatgcatggcgcttggagatacggccagtggtgtggagatccacagcaactcgattcgaaatgggtatggaaccaacgcctctgtcctgaaaagtttgattgccttctacctaaggcagggtcggtaccaccaggctctgaaactgtgcttagcactctcaaaccgtgatgtttcttggggcacactggttgaatcactttctcaagttgaccatcatgttggaatagttaatctccttcatgttatccaacgctgtggggcgaacctggactgccatacagcacgtctcatcttgagctcgtgcgggaagctgggacttcttgaggaagggctgcaagcacatgcctacatgaccaagcgtggccttgcttcctcagcttgcaccaacagctacctcatcgacatgtattcaagtgttggtagcctgagacatgcgtccgatgccttcaactacatgcctgccaaggatgcgtcctcctgggcctcaatagtggcggcaaacgtcgagaacggctgcccagagaccgccattcgcctgttctcacagatggaggagaagtgccgtccgacgccggaggcgtttttatctgtgctcaaggcctgcgcgagaactggcctagtgagtgaagcgttcaggttttttgtgtccatgacggaggtttacaagatacagccctcggaggagcactattcccacatgattcaagtcttgagtcgtgcggggatgttcaaggaggcagagcatttcatcgacagtgttgttccttctgaatctggcacgtcggcgtggagcttgctttctgctgctgcgcaacagaacggaaatgataagacggtaaagcttgcaggagacagactagcaaggcttcctggtggcagctga

SEQ ID NO: 132070 - DNA, 2955 bp, Zea Mays
gcggtttcttctcgtccggtcgccatggtgcacgagacgagatcacgggtgcacgcagctgcccaggaagaaggcaagctcgcctcaaaaaagcagaaaccagataatgaaaccaaggaaaggggccagaatgtgccctccaagaacaagaagtctgccgacaacgaagggaaagacggggagccggaggcgccaacaaagagcaagaagctcaaagctgaggaatctgagccaaatgggagggaagctgctgcaagagagtttgcagagttttgcaaggccataggagaacgcctctccctcgaggacatgcgcaagatccttcaagccaatgagcaagatgcttctggatcggaggatgcggtcgttccaagatgtgaggatatgatgttctatgggcctctcgagaagtgcccagtatgtgagggtcagcttgaatttaaggagtggaaatacaagtgcactgggaactacagcgagtgggcacgctgtactttcagtactaacgacccttcaaggagaagcggttctatagaagttcctgatgacataaaagatgattttatccgcaagtggctgaagcaacaagaaggaaaggagttccctaaacgtgatcttgatgaagaggctcatatcttctctggcatgatgattgcattgtctggacggatgtcacgctcacatggttacttcaaggagcagatcatgaagcatggagggaaggtcaagaattctgtgcttggtgctacctgtgtcgtggcttctccggctgagagagacaaaggtggctctggaggatttgctgaagcattggagcgtggaactcctgttgttagtgagaattggataatcgatagcattgagaaaaaggaagctcagccttttgctgcctatgatattgttactgatgttgttccggaaggccgaggactcccgctaggccaacttgatccaagtgaggaggccattgagaccttagctgcagaggttaaacttgctggcaagagatctgtccacaaggattccaaactcgataaagacggtggatgtgtctttgagaaggatggcataatctacaactgcgcttttgctgtttgcgatctcggatgccagatgaacgagctatgcatcatgcagctggttatggtccctggaaatcgtttgcacctgttctacaagaaaggcccaattggtcatgaccagatggcggaggaacgggtggaggattttggtagccgtgtcaatgatgctattaaagaatttgttcggctatttgaggaggtcactggaaatgagtttgagccttgggaaaggcagaagaagttcgagaagaagagtatgaagatgtatcccttggacatggatgttggggttgatgtgcgtcacggaggtgcagcacttcgtcagctgggttctgcagcagcacattgcaagcttgatccttctgtttctttcctgctgaaacagttatgtggacaagagatctacaggtatgctctgatggagatggcccaggacctacctgaccttcccatagggatgcttaccgatctccatctgaagagaggggaggaaatgctgcttcagatgaggcgagacgcggagacggtggcagagtccggcccagaagcagacgcgttctggaccgacgccagcagcaaatggttcactctgttccccacaactcggccgtacacgatgaggggcttcgagcagatcgccgacaacgtagcatcaggtttcgagacagtgcgcgatataaacgacgcgtctcgtctcatcggggatgcgttccgctcgacactactggatgacccactctctgaatgctacaagaagctcggttgttgtatcagtgctgtcgccgagggctcggaagactacaagatggttctcaagtacctggagaagacgtacgagcctgtcgaggtggaggatgtggtctatggtgtgtctgtcgagaggatatatgctgttgaatccagcgcattccctttgtacgaggaaatcaggaacctgccaaacaaaatccttctctggtgtgggactagaagctcgaacttgcttaggcacctccacaaagggttcctgcctgccgtctgccatctgcctgtgccagggtacatgttcggcaaagccatagtgtgttccgacgcagcggcggaggcggctcgctacggcttcactgcagtggaccgtccggaagggtacctggtcctggcggtggcctctctgggagaagagatcgaggaagtcaccggaacaccaggggcagaggaggcacgagtcctggaagagaagaaggtgggcgtgaaaggcgtcgggaggaagacgaccgacgagtcggagcacttcagctggagggacggcgtcaaggtcccctgcggcaagctggtgccgtcggcgaacaaggacggcccgctcgagtacaacgagtacgccgtgtacgaccccaagcaggtgagcatctgcttcctggtcggggtgaagtacgaggagcagaacatggaggtggtgccgccggacgaccagtgaaggagtcgtctcgtggagtgtcctagggcagggcagggcaggccaggccaggaggtggtgggacccattttggttagtggagccggtagcggcgacgcgttggccgtcgggtggaatggaaacgtgaggggtgccagaacatcctgggctgcctgccgcctcctggttttgtgtcaattgccgtgtctgtggctgtgtgtactacttggtagttggtagcgtactttattagtagcgaaggtgctagtgaccctggctaggtacaagcccttgggaggctgcttgctttgtatgctaacagttcgttccgttccgttccagcggcccttttgggtgctgacagttcgttagcacggctctgagagagaacgtgttccgctctggtttagcactaaatgaaaaaaaaaacatgtttccttt

SEQ ID NO: 132071 - DNA, 1149 bp, Zea Mays
atgaatgagaccagtcgccctctgccccaggcaaagctgcagctgcagctgccacagcggtgaccacgcacgctgcaccgcaccgcaccgacgggtgagacctgctgtgtccaccaaccgtgagcccagcaggcgaccgacgacgctagcttagactaggaaccaacaatggccacgcgccacctgctcctcctcctgctcgccgcgctgctcccggcggcggccacggcggacccggacgcggtgcaggactactgcgtgccggacacgggcggcgggcgcgggcgcgggcgggccgtggatctagcgctgctcccgtcctacccgtgcaggagccccgccaacctgacggcggcggacttcgccttcgcgggcgtgcgcgccgcgggcaacttctccgcggacacggggttcgcgggggtgtcggtgacccccgcgcagttcccggcgctgcacaccctcggcgtgtccttcgcgcgcgccgacctgtccgcggcgggcggggtcaacccgccgcactaccacccgcgcgccaccgagacggcgctggtcctggccggccgcgtctacgcgggattcgtcgactcgggcggccgcgtcttcgccaaggtgctcgagaaaggggaggtcatggtgttcccgcgcgccatggtgcacttccagatgaacgtcggcgacgagccggccacggtgtacggcaccttcaacagcgagaaccccggcatcgtgcgcatcccggcgaccgtgttcgggtccgggatcaaggacgccgtcctcgagagggcgttcggcctcgagccggaggagctccgccggctccagaagaggttcgggcctcctcccaagaccaagacggcggagatggacgattgatcggaagatcaggcactcgcgatcaagggggacatgattaattgattagttatattaagagcagcagactttgtgatctctggaatatatctccttccatttgttaatgtctgtatgaattatttggcggtggacggtggttatcatggaccgataatgccggtacgtacagatgggatgggcatgtggggttaggtgtcacattcaagtgtctacgagatgtttatgggtttatatatattgttaataaagcaggccgactttatttgctctgga

SEQ ID NO: 132072 - DNA, 1411 bp, Zea Mays
aaaccctaaccgaccacctgcaatctccaggcggtggtggcggctagccatggcgcgcgcgggcgcggtggcgaggcaccaacggtcccgacggcgcgggtgccagccaaggcacggcggcctcgggcgcggcggcggcggcccggccgcatcctcggcgcgcgggctcgggtgcggccccggccccagcctcggcgcgcgggcgcaagcgcggcggcactgctacacgcggctgcccgacgcgggcgcgtcccctggcggtcttggctcaggcgcgtcgccccgggtgcggccatgacgtggcggcactggccccggcggcggtccggccacagcgcacggcgcgacgctgtcacctggccatggcgcgggcggcagggcacctggtgtcccagcccctgccaggcgctcgacctcggcgtggctccggccacccggcgcgggcggtccggctacggcggctcagcggcccctgcacgggcgcagtccctcggcggcgtgcggctccctggtcgtgcgcgggcccggcaagacgggcggccaccgacggcgcactgctgtcccggcggtgcaggcgagccccccggtgcgcgcgggcgcgggcgcgaggcacgcgggggcgcaaggcgcgacggctcagcgcggtctcgactgcccgtctacggcgcagccaccccgtggcgggcggctcccgacctcaacggctcgggcgcgggtccggctgctcggccatggcggcacaagtgcgcggccccctgagcgggcgagcgcgcagtcccgcggctctggcagtgcgggcgctaaccaggcgcagccagtgtgggttcgtcccggcgggcgcatggtaccggccatggtgccccgttgaggcgcgtgcgcgcacatggtattctcacggaggcaaccagacggtcgaacggatcatcatggtacagaacactccatgcataggagtgggcagaaaggtaaatctggttgttgaaacaaattaacatacgatctttgaaaacctgttgctgagtagagatcaactccttgtggccagactgccagactccagcgagatcatctccttccagtggtgtcgggttgttgtccagcgtccagccattagacatgtactagcctctgtagccatacctaagcagcgtctccatgaacttgtctttgaatcgcttttcgtccgacagacgccggatgcacggatgcatggacattgctgtcgacggtaaccgctcggtggagagcaaagtgctgataacgtgttgaatctcagtggagagagacagataatgacaaatgactgaactcattattgcagggaacatcctgatatatatacaggtgaagggttgcgttctcaagggggtgtcccttggaaataatctgtcgcaccccttggattgatcac

SEQ ID NO: 132073 - DNA, 1299 bp, Zea Mays
aaaccctaaccgaccacctgcaatctccaggcggtggtggcggctagccatggcgcgcgcgggcgcggtggcgaggcaccaacggtcccgacggcgcgggtgccagccaaggcacggcggcctcgggcgcggcggcggcggcccggccgcatcctcggcgcgcgggctcgggtgcggccccggccccagcctcggcgcgcgggcgcaagcgcggcggcactgctacacgcggctgcccgacgcgggcgcgtcccctggcggtcttggctcaggcgcgtcgccccgggtgcggccatgacgtggcggcactggccccggcggcggtccggccacagcgcacggcgcgacgctgtcacctggccatggcgcgggcggcagggcacctggtgtcccagcccctgccaggcgctcgacctcggcgtggctccggccacccggcgcgggcggtccggctacggcggctcagcggcccctgcacgggcgcagtccctcggcggcgtgcggctccctggtcgtgcgcgggcccggcaagacgggcggccaccgacggcgcactgctgtcccggcggtgcaggcgagccccccggtgcgcgcgggcgcgggcgcgaggcacgcgggggcgcaaggcgcgacggctcagcgcggtctcgactgcccgtctacggcgcagccaccccgtggcgggcggctcccgacctcaacggctcgggcgcgggtccggctgctcggccatggcggcacaagtgcgcggccccctgagcgggcgagcgcgcagtcccgcggctctggcagtgcgggcgctaaccaggcgcagccagtgtgggttcgtcccggcgggcgcatggtaccggccatggtgccccgttgaggcgcgtgcgcgcacatggtattctcacggaggcaaccagacggtcgaacggatcatcatggtacagaacactccatgcataggagtgggcagaaagactgccagactccagcgagatcatctccttccagtggtgtcgggttgttgtccagcgtccagccattagacatgtactagcctctgtagccatacctaagcagcgtctccatgaacttgtctttgaatcgcttttcgtccgacagacgccggatgcacggatgcatggacattgctgtcgacggtaaccgctcggtggagagcaaagtgctgataacgtgttgaatctcagtggagagagacagataatgacaaatgactgaactcattattgcagggaacatcctgatatatatacaggtgaagggttgcgttctcaagggggtgtcccttgg

SEQ ID NO: 132074 - DNA, 165 bp, Zea Mays
ctatagattgcagcagcagcagttggaatgattttaatccagtcgcagagaacagtgctaggaatagacgtactgttataaaaacttccaggtggaccaattcacgatgggaacctaacattttcttgcattaagctgaaacgtgtatctcctgcctgcgtttgt

SEQ ID NO: 132075 - DNA, 939 bp, Zea Mays
aatgttgcaaaatcgatgattgctgaattacctgtgaattaataagattgtcaatgatatgtactgatacaatgtggtcatttctagatatacgctggctccttttttgcaatacctttgtttagatggtttctgctacgcaagaccaacaatggcattaaaaagaggaataaggccagagaacagagagctcaggagctcgtgtcaccagattcttctctaagaagaaagttgctcagtgcacgtgatatggctgaacggaaagtaatcacgccagaggagattgtctatactactgaaaaggatctattggagcaggattatgaagtcaaggagtgggagaggagatttaaggagctcgagtcagagtgatggacatgaccgatatacttgacacttgcagtagctctacatggtcctcaccatacttgtcggtgatttttatccgcatccaacggagtggaagatggatctgactgaaccactcgagcaagcgaaactggatggtactggacctcactaattgtcgtgtcaccaccagcccaccactgaccacttcgctatggaagttttgtggaagctgttggtttaattggaaccgaccattatttgcaagatgatgttcgtatctgtgccattgacctgcatatatgtatagttccaatcacggatcaaattcagaatttgacacgaaaaagaaaaaaaacagggaatatggctaggatgctactcggtttgaatggagtccaatcaaaacatgtaaaaaggtcagcctgtgaacagggactcagactgtttgctgcggctttaatccactggctcctaacagtgctaggaatagacgtactgttataaaaacttccaggtggaccaattcacgatgggaacctaacattttcttgcattaagctgaaacgtgtatctcctgcctgcgtttgt

SEQ ID NO: 132076 - DNA, 817 bp, Zea Mays
aaggcgtaccgatccggtttaaaagatccgctactagtgtcaccggcaacgtgtcgacgcggtcgtgtgtgttcctggtgaggaagcgaaccctgcctgcttacttgccgggcaagaagtgagaacagcgtggggtgcggaagcgaccggaccggggatggctacaagaaggaccgtggcggcgagcgttactgcccagcggcctgcgtgggcggccgtggcgaggaggatggagggcgtgtcgcgctacttcagcgacaaggcctccggcaggctgctcagcgaggaggagcgcgccgccgagaacgtctacatacagaagatggagcgggagaagctggagaaactgaggaggaaggaggacaaggccaaggccgaggcggccaagagggccgccgccgccgccagaggcgacacgaagaatggtgaggaggctcatccgagctgattgatcatcgcaaaatcagaccggtgctcccgtgaatcctgtgatgctgtactactgatgacacgtagatgcaaatagacgccgtcgtactaggtactactctgcatggagaggaacgtttgctctcttttgcaactctgctcgtcgtgtcgtgtgtaatcccatccctgtcacggttgtgaacttcgcttgtagctagcgacggttttgccttgccttgtcccttgtcggtgcaactggagtggagtggaggcgtccttgagcctcttccatgtacataggttgtcaataataataatgaataaatgtagtcccctcgtcgaaaacaataaaaaaaggtcccagaagagtggatatctcgctttggca

SEQ ID NO: 132077 - DNA, 723 bp, Zea Mays
atggccgcgacggcgtgcgcctacgcctaccagggggcccgcccgccgcaggttctgctgccggccacgttcatcgacgtcgacggcgccgtccagcagtccgcaccaccgccgccgcccccactgccacgaccgtccttcctgtcgcaccacctcgacatctgcaccgagggcctcggctcagagagctccggcgacatcgatctcaccgacgacgtcgacgacaacgctgccgcctgcgtcgacgtcgggcaggcaccgacgtgcaagaggcagcatcgtgacggaggccacgaggaaacggggagggcgaggaacgccaggccagcgttcccgccgccgatctcgctgatcggggccggcgggaagccgtggctctacctccggccgctgcgggaggacggccgtctcgtgctgagggaggtcaggataccgttgcgggagctgctccaggcgcgccgggaggacggccggttcaagctccagttcgcccagccccagccggacgacaggtgccagtaggccgaggagggccaagatccagcagatgcaacttgcgccagataaaacggagagaaaacacgacagggcaacgagaagtgtagttcagggttttagacttcggctccaaccaattccacacgcctactgtttgtttttggccacttgcagagagatgtaaatacagcggaatttatgttcaatgccgcctcatcagtgttt

SEQ ID NO: 132078 - DNA, 1481 bp, Zea Mays
caacgaaggaaatcccgatgccgctgcccgctgtcgcgagatgcttcggctttccacatttgtcatgtacccgcggtaacgcagtaacggcgtagggcgtaacgtcccctcccccgtgaacggtgtacccgaccctcttcgccggccgtcgcctatccaaatccgtcacggacgcttccacgcgaccaagcagccacgcggcgctggtctggccggccatgtcctgcctcgcggcgccgccggctgcaccgccaaaggcgggggagcgcatgctccgcgccgccgctcctttgcgctcgccttcgccgtgccggggcctgcattacgcggtgcgggggactggagggcgagaagccgggtgcggccggcggcagctggcgctgctgcggtgctccccagctggcgagtccagggcgtccggggacggcggcctttccagcttctgtataattgaaggtccagagacgatcgaggactttgctcaaatgcaatcgcaggagattgaagacaacatcatgagccgacgcaacaaaattttccttctgatggaagaggttagacggttgcgagtgcagcagcgtatccgaacttctgaaagcaaagatgccaacactgaaggaaatgaaatgcctgagattccatcaactattccatttatgcctgatgcgtcaccaaagactatgaagcaactctatatgacatcgttctctgtcatatctgggataatcatttttggaggcttgatagccccagtacttgaactgaaactagggctgggtggcacatcttatgaagattttataaggaccttgcacttacctcttcaattgagtcaggtagatcctatagtggcatcattttcaggtggcgcagttggtgttatctcagctttaatgttggtcgaagtgagaaatgtcaggcagcaagagaagaaaagatgcacatattgccatgggactgggtacttgccatgtgctcgctgttctgctagtgggatgttattgaacacaaagcagttttcattattggggcataatatgtggtcaatgaaaggaaggtgtcagaattgttctggagctggaaaggtgatgtgtccgacgtgcttgtgcacaggaatggcgatggcaagtgagcatgatccacggattgacccttttgattagtttgatatgacaatacgctttttgtctgtttcgtggaaaatatgttgccgataacagcaataaactcatgtttgtatgtacgttatgtttgttactacgtgatcacttgagaggagttgagtgcaacccttgtccaaaagaggacactacaaatgtaggcttgtctgaaccacagaataaaaatcgtctgtctcacccgtatttttactttcttatgattttctctcctcctaagttctatctattcacttgtgatattactcaaagtataattcacatcttaaaagagcaattaagtgaagaggaccttttctctgt

SEQ ID NO: 132079 - DNA, 1454 bp, Zea Mays
cgcgtcaacgaaggaaatcccgatgccgctgcccgctgtcgcgagatgcttcggctttccacatttgtcatgtacccgcggtaacgcagtaacggcgtagggcgtaacgtcccctcccccgtgaacggtgtacccgaccctcttcgccggccgtcgcctatccaaatccgtcacggacgcttccacgcgaccaagcagccacgcggcgctggtctggccggccatgtcctgcctcgcggcgccgccggctgcaccgccaaaggcgggggagcgcatgctccgcgccgccgctcctttgcgctcgccttcgccgtgccggggcctgcattacgcggtgcgggggactggagggcgagaagccgggtgcggccggcggcagctggcgctgctgcggtgctccccagctggcgagtccagggcgtccggggacggcggcctttccagcttctgtataattgaaggtccagagacgatcgaggactttgctcaaatgcaatcgcaggagattgaagacaacatcatgagccgacgcaacaaaattttccttctgatggaagaggttagacggttgcgagtgcagcagcgtatccgaacttctgaaagcaaagatgccaacactgaaggaaatgaaatgcctgagattccatcaactattccatttatgcctgatgcgtcaccaaagactatgaagcaactctatatgacatcgttctctgtcatatctgggataatcatttttggaggcttgatagccccagtacttgaactgaaactagggctgggtggcacatcttatgaagattttataaggaccttgcacttacctcttcaattgaggtggcgcagttggtgttatctcagctttaatgttggtcgaagtgagaaatgtcaggcagcaagagaagaaaagatgcacatattgccatgggactgggtacttgccatgtgctcgctgttctgctagtgggatgttattgaacacaaagcagttttcattattggggcataatatgtggtcaatgaaaggaaggtgtcagaattgttctggagctggaaaggtgatgtgtccgacgtgcttgtgcacaggaatggcgatggcaagtgagcatgatccacggattgacccttttgattagtttgatatgacaatacgctttttgtctgtttcgtggaaaatatgttgccgataacagcaataaactcatgtttgtatgtacgttatgtttgttactacgtgatcacttgagaggagttgagtgcaacccttgtccaaaagaggacactacaaatgtaggcttgtctgaaccacagaataaaaatcgtctgtctcacccgtatttttactttcttatgattttctctcctcctaagttctatctattcacttgtgatattactcaaagtataattcacatcttaaaagagcaattaagtgaagaggaccttttctctgt

SEQ ID NO: 132080 - DNA, 1686 bp, Zea Mays
atgccgctgcccgctgtcgcgagatgcttcggctttccacatttgtcatgtacccgcggtaacgcagtaacggcgtagggcgtaacgtcccctcccccgtgaacggtgtacccgaccctcttcgccggccgtcgcctatccaaatccgtcacggacgcttccacgcgaccaagcagccacgcggcgctggtctggccggccatgtcctgcctcgcggcgccgccggctgcaccgccaaaggcgggggagcgcatgctccgcgccgccgctcctttgcgctcgccttcgccgtgccggggcctgcattacgcggtgcgggggactggagggcgagaagccgggtgcggccggcggcagctggcgctgctgcggtgctccccagctggcgagtccagggcgtccggggacggcggcctttccagcttctgtataattgaaggtccagagacgatcgaggactttgctcaaatgcaatcgcaggagattgaagacaacatcatgagccgacgcaacaaaattttccttctgatggaagaggttagacggttgcgagtgcagcagcgtatccgaacttctgaaagcaaagatgccaacactgaaggaaatgaaatgcctgagattccatcaactattccatttatgcctgatgcgtcaccaaagactatgaagcaactctatatgacatcgttctctgtcatatctgggataatcatttttggaggcttgatagccccagtacttgaactgaaactagggctgggtggcacatcttatgaagattttataaggaccttgcacttacctcttcaattgagtcaggtagatcctatagtggcatcattttcaggtggcgcagttggtgttatctcagctttaatgttggtcgaagtgagaaatgtcaggcagcaagagaagaaaagatgcacatattgccatgggactgggtacttgccatgtgctcgctgttctgctagtgggatgttattgaacacaaagcagttttcattattggggcataatatgtggtcaatgaaaggaaggtgtcagaattgttctggagctggaaaggtattctgtatattgcctttgtgtttcacaatagtcagtttgatccattctagaagatttgaacaatagaaaaggtttatcatacttggcgtaccgcctttaggttaaatgatgaggtgataccgcagatcaaatacgtcttaatgtttaaattcaatgctgcactcagatagtctgaatcttgatcgaactaaaaagtgttgcatggagtttttatggtagtgcatattgaaattcctggttgcagattaggaagagcaatccatatcatcttcctctagttacatgtttgcctccataaagtatggatttactttattgtttcatctccatgtttcccaggtgatgtgtccgacgtgcttgtgcacaggaatggcgatggcaagtgagcatgatccacggattgacccttttgattagtttgatatgacaatacgctttttgtctgtttcgtggaaaatatgttgccgataacagcaataaactcatgtttgtatgtacgttatgtttgttactacgtgatcacttgagaggagttgagtgcaacccttgtccaaaagaggacactacaaatgtaggcttgtctgaaccacagaataaaaatcgtctgtctcaccc

SEQ ID NO: 132081 - DNA, 770 bp, Zea Mays
cgcgtcaacgaaggaaatcccgatgccgctgcccgctgtcgcgagatgcttcggctttccacatttgtcatgtacccgcggtaacgcagtaacggcgtagggcgtaacgtcccctcccccgtgaacggtgtacccgaccctcttcgccggccgtcgcctatccaaatccgtcacggacgcttccacgcgaccaagcagccacgcggcgctggtctggccggccatgtcctgcctcgcggcgccgccggctgcaccgccaaaggcgggggagcgcatgctccgcgccgccgctcctttgcgctcgccttcgccgtgccggggcctgcattacgcggtgcgggggactggagggcgagaagccgggtgcggccggcggcagctggcgctgctgcggtgctccccagctggcgagtccagggcgtccggggacggcggcctttccagcttctgtataattgaaggtccagagacgatcgaggactttgctcaaatgcaatcgcaggagattgaagacaacatcatgagccgacgcaacaaaattttccttctgatggaagaggttagacggttgcgagtgcagcagcgtatccgaacttctgaaagcaaagatgccaacactgaaggaaatgaaatgcctgagattccatcaactattccatttatgcctgatgcggtgaccaacagcactcatctattttttgagaaattatcacattatcatctgtggttcttctagcttctattaacttgtccttttgtttccccaaaac

SEQ ID NO: 132082 - DNA, 1838 bp, Zea Mays
gcgggcgattgggtttcgggaagagggcaccggcaatgtcaacgacgacggaggcggcaaagagcggctcagccgcaccggtgcggtgccagcggatcggctgcgacgccatattcaccaacgatgacaaccgcgagggctcctgccaataccacccctccgtacctatgtttcatgacggcatgaaagaatggagctgctgcaagcaaagaagccatgatttcagcttatttttgcagatacctggatgcacaacaggaaagcatacaaccgaaaaaccaatcacaaaagctgtttcatctaaccgtacaaaggcaacaccgatccagtcctctaagcagggtgtgggagttgatgtgtgtgcaaggtgtcgtcaaggtttcttttgctccgatcatggatcacagcccaagccacaaaagccagctgctaccgacgatacaaacaaggaacctgttgagaaatcagctgttccaccgcccaagaaaaggatcgatgtaaatgagctgaggacatgtaaaaataaaggatgtggtaaatcctacaaggagaaggataaccatgattctgcatgtgactaccatccaggtcctgccgttttccatgacaggatgagagggtggaaatgctgtgatgttcatgtcaaggagtttgacgagtttatggagatacctacatgcacaaagggttggcataatgctgatgcggtgtgaattcacgccatgcttaaggctgttttcatgttgtatcgtcacctgccatgtaaacaccatttctgcagtttattgaggatttcatttggaagtgtgacaagagctttgaggatgggctccgggctgcgggctgcctaagctttgcgcacggtagctgtctggaaatcttacgtgattctccttgtactctggaccacatttggtgtctggattcaaattggggttttgtctgtttgaagccgaaggatgccaatattttaaccatgtctaagccagagaagttagcgcatgctgtggagcggtagaggtgccgtgtttcttgtgtgtgttccatggctgctggagaagtcctgtccgtgtactggtttgctcggtttgagcaggcaaaagcctggaccatgcatcactagtttgttctaccgctcctcactccccagaccagaaagttgttgccaatctacaatataatgaaaacttagctgcactcttggaaagagaaaagcacaatctcttgatttattggatgctgttttggcgtgcatacactagcattatcattatgtcatggatacatggacatgggattcaaatgtaagtagtactggtagtgctttggacacggcagcgttcaggttcaagggatgccgatgatcgggatgaacgggaagaagaagaagaagggaggcagtcctccaaaactgaagggcggcctgttgcctccacgggacggtggagtccacgccggcgtccgtgccgccggtggcgtcggccttagcgctggctccatcggggcgttaccaccctggtgttcacggtcggccatggtcgcagcgacagcggagccgccgctagccgcagcgcacctcgtgaagaaggcgaggcgggagcccagaacataggaggcggggtaggaggcggagccaggcccccgggccgggacgacgcgcgcgaccgtgagtccccacggcgcgcagagctgctccgtggcgccgaggaccctggccgcgcacggcgcgcccgaggctgacgcttctgctggcacggccacgtcgaagttgccgcgcccgtcggtctgcgctgcgtggaggcccgcgctgccgtcgccgtcgccggcgcatttcaccg

SEQ ID NO: 132083 - DNA, 1167 bp, Zea Mays
acggctcagtcaccaacccactcatcactcctcactcactcactcaaaacgaaagccagctcagctcatctgctcacacctcacaggctcacacccacaggccggccgccacagcaccgcggatagcagagcagagcggtgagctgcagagcagggtagccgaggtcgtcgtcgtcgtcgtcactcgtcagccatgagcaaggacaagcaccacaagcacgagcaccacctgcggcgttgctgcgggtgcatggcgtcgtgcctcctggcgctggtcctcatcgtggccttcgtctcgctggtggtgtacctggcgctgcgcccctcgaagccgtccttctacctgcaggacctgcagctgcgcaggcccatctcgctgggcgacccgtcgctgacggcgtcggcgcaggtgacgctggcctcccgcaaccccaacgaccgcgtgggcatcttctacaagcgcctggacgtgttcgtcacctaccgcgacgaggccgtgacggtgcccgtgtctctgccgccgcagtaccagggccaccgcgacttcaccgtctggtcccccgtgctgtcggccgagtccgtgcccgttgccgcctacgtcgccgacgccatgaagcaggacgtcgccgcgggcttcgtcgcgctgcaggtcaaggtggacggccgcgtcaagtggaaggtcggcagctgggtctccggcagctaccacctcttcgtcagctgccccgccgtgctctccgcgggctaccccggcgtcaacaacaccgtgacgtcgctcaagttcgcccagcccacaggatgcagcgtcgaggtgtgagtttgtgaccaaacaagtgccctccctgtcctgccccctacgtattgttgcgtgctactcaaatttcatctctgggtgcgccggccgccgttaactgggttcttttaattttgttcatgtctcgttgtcaattctcattctcttgtgggccgggggaataaattatttgctttcgccagatggctgtccagaaacttcaactcagttgtaccatgacgtgtattaattatttgatttcgtccttttattatcctcaaatgtttttacaaccaaacgcagctacgcattgcattactagctaggaacggcactatggtttttactaacaggatgatgtcaatgttatactg

SEQ ID NO: 132084 - DNA, 364 bp, Zea Mays
gatccccagccggtggccgcaactccatgacctcgacgcgcggtggcggaggttcctcgatccggagtagtggcggcggttcccaggtcggtggcggcggctccctgatccagaggacgagcgacagcggggccctttgtgcgggcaagcggcgtcatccccgaggtcccgaggaggcggcacttccaaggccggcgagcaagcgacgcccgtcgacgtgcgagtagcgacggcgacgtatgaggcgcgatgttcgagcgagcggcgtcacggaaggcccgagatgcgcgcaacgatgatcgcgcgtgacatcctccgatccggcgcagttttcttttcgattattgtgttttatgcctaccac

SEQ ID NO: 132085 - DNA, 1814 bp, Zea Mays
acccgaatcacgcctccctttcctttctcctccctcactactcacacccctcacttttggcggcgccgactgggcacccgcgtcgaccttcgccaggtcttcgtcggccctttggctggaaacaagcatccaccaggaacaacgcaagggatgctcgattggctctagttacttagcagaaccaaaagaggaaggccatcaaagatacgagggctttttctcgccatgtctcggtcgccacacctcccaccccgctgcccacccctgggtcctcagatcactcgaagggatgacagcatgttcacgcagagctgcaggtttccatctggggatacgttctttagtgagccaccgtgctggctcgatgatctccttgcagattccgggaaagctcccaagcttcctcctctcagaagggcctgtagcgattctgatgccatcttggatgctctgtcaacatttgaaagcccaatttgtcgaattgaggaaggcaatcaaatctctggtggtgaagctgatgacttgttggatgctggcgaaggtggtgaaagcggttctgtggtcgaggctagctgtgtttatggtccgaattcaccaagacagaagagtaggctgacaacttcagagagttccatggtaaatgctgtgcttgagaatgtacccagcaaccccttgcagtacttgagcatcgatgcctccagcggtatgaatggtaatgtggccaatggaactgctgatacctgtgatgcttttggccaccctgatcaagacaagtcatttaaaaggcgttcaggccaaagatctagggtccggaaacttcaatacattgctgaacttgaaagaactgttgactcacttcagaacattggtgctgatttggctgtcagagtgtcatcacttttccagcttcataatgctctatctatggaaaacaagcagctgaggatacagatttctagtcttcagcgtgcaaaactgattaaggatggtcagacgcaggccctaaagaacgaagccgaaaggttgaagcggatgtccgcccgccggagcagaagcgccacggcctcctgttacgacccgggctcgttctcgttcggagcagatgcttcgtcagtcagctggcagatgcctgacatggcaaggctcagcctgaacggcggctccccaagaggcagctatggcctgtgacagcggccggccctaacccccacccccaccgtcagaagaaaggccgaggcgttaccctagataacttttcgctaaccttacccaggcacagattttgaggggcccatctttgagtaggagagagtagggtgtttcggtctttcgctttcgcgggaattttaccgaggttgtcagcttattagtagttacaagtagagtggtgaagtggagggtgtgtttggtttggcttttggctttggcttttgcctcctaaaagccaaaagccaaaccaaagtactggatccagaaagcagctttttctaaaagctgactttttcgcagtgcaaaactaaaagcacctctggacctgcttttagtggctttcagatgaaactgtgaaaacatatatcgaagaacttttaacggcttttagtggtttccaccaaacgatttttagctttttaacagctcacagcccacagcagattttttcacagctcacagcagcttttttcacagcccaaccaaacagactctgctgtgtagcggcgtgtttggtggctttgctgtgtagcggcgtgcggtctactcgtttgtttgacgctccatcataattgcagtgaagttgcagaccataccatcaccca

SEQ ID NO: 132086 - DNA, 1397 bp, Zea Mays
aatcgagcacaccaaacccttcccaaaccctaatgcaggctattttacattcggatctgacccaaagctgctgtttttccatatgaaaggaacaacgcaagggatgctcgattggctctagttacttagcagaaccaaaagaggaaggccatcaaagatacgagggctttttctcgccatgtctcggtcgccacacctcccaccccgctgcccacccctgggtcctcagatcactcgaagggatgacagcatgttcacgcagagctgcaggtttccatctggggatacgttctttagtgagccaccgtgctggctcgatgatctccttgcagattccgggaaagctcccaagcttcctcctctcagaagggcctgtagcgattctgatgccatcttggatgctctgtcaacatttgaaagcccaatttgtcgaattgaggaaggcaatcaaatctctggtggtgaagctgatgacttgttggatgctggcgaaggtggtgaaagcggttctgtggtcgaggctagctgtgtttatggtccgaattcaccaagacagaagagtaggctgacaacttcagagagttccatggtaaatgctgtgcttgagaatgtacccagcaaccccttgcagtacttgagcatcgatgcctccagcggtatgaatggtaatgtggccaatggaactgctgatacctgtgatgcttttggccaccctgatcaagacaagtcatttaaaaggcgttcaggccaaagatctagggtccggaaacttcaatacattgctgaacttgaaagaactgttgactcacttcagaacattggtgctgatttggctgtcagagtgtcatcacttttccagcttcataatgctctatctatggaaaacaagcagctgaggatacagatttctagtcttcagcgtgcaaaactgattaaggatggtcagacgcaggccctaaagaacgaagccgaaaggttgaagcggatgtccgcccgccggagcagaagcgccacggcctcctgttacgacccgggctcgttctcgttcggagcagatgcttcgtcagtcagctggcagatgcctgacatggcaaggctcagcctgaacggcggctccccaagaggcagctatggcctgtgacagcggccggccctaacccccacccccaccgtcagaagaaaggccgaggcgttaccctagataacttttcgctaaccttacccaggcacagattttgaggggcccatctttgagtaggagagagtagggtgtttcggtctttcgctttcgcgggaattttaccgaggttgtcagcttattagtagttacaagtagagtggtgaagtggagggtgtgtttggtttggcttttggctttggcttttgcctcctaaaag

SEQ ID NO: 132087 - DNA, 1414 bp, Zea Mays
gagcagttccacagcagcggcatggccatggagctagcctcgtcgtattcggcggcggagatcccccactacttcctctgcccgatctcgctggaggtcatgcgcgacccggtcacgctcgccaccggcatcacctacgaccgcgccagcatcgagcgctggctcttcaccgacggccacgccacctgccccgtcacgcgccgcgcgctggcgcccgccgagatggacgccacgcccaaccacacgctgcgccgcctcatccaggcctggtgcgccgcgcaccaggtcgagcgcttccccacgccgcgccagccgctcgactcctgccgcgtcgccgcgctcctcgaccaggggcgccacggcggggcggccgccgcgctcagggagatcaaggccgtcatcgccgagagcgagcgcaacaggcgctgcgtcgaggccacgccaggcgccgtcgacttcctcgcctcactagtcgccaaggactcctcggccgataggtctccatccaagcgtgccagcagccagcaagatgccgacgacggtgactccctgggggaggaggtgctggattctccgaccttcatgagctcgccggcggaggacgcgctcggcgtcctctactcgctcaagccgtctgagcggagccttgcccagatcatggaacgggaaggaaacttcctcgacacgctggcgtctgtcctgcgccgcccgagctaccggacgcgcgcctatggcatccttctcctcaaggcgatgacggaggtcatgacgccggcgcagttcatgatggtgagcgccgacctggtgcaggaggtggtgctcgtggtctcggaccgggtgtcctccaaggctgtcagggcggcgctgcacgtgctgtgccgcctctgtccgtggggccggaaccgcgtgaaggccgtccaggccggcgcggtggccgcgctggtcgagctgctcctcgatgagggcggcagccgcgtcaccgagctagccgtggtggccatcgaccacctatgcggctgcgcggagggccggtcggacctggtcgcgcacccggcggggctggccgtcctgtccaagaaggtcatgcgggtgtccgcagccgccaccgagagcgccgtgcgcgccctccacgcagtggccaggcactcgccgacgccctcggtgcggcaggagatgctcgccgtcggtgtggtggcaaaactgctgcttgtgctgcagaccaatgccggcgagagggctggtctcagggtaaaggagatgctaaagacacacgctagggtttggaaggactcgccatgcctccaaacacaccggggttcttacccttgttgatacacaatatacaatgtagtatcatgcatgtacattacattgatatttgtagccaagaggagcacacatttgattctccttt

SEQ ID NO: 132088 - DNA, 820 bp, Zea Mays
tacatcatgggatataataacgtcagtcgatttgtgggaagatggtggctcagatgatggatatgtacttgttaagcaggaggatgttgttgatgggatgacttcctttatggctgcatgcttggtgtcaattaaaaagaccaaggacctgctccctgatcaacttcaaaaagctcttaggaaggcgatttcagttgaaaagaagaaaagtaaaatctggaaggcatgggatgaaactaaagtcatttataatgttgcttcatgggggcgccactgctgttggggtctacaataatcgagcattacctacggtcgcaactataacgtttcagacttcctgccgtgtgataaccaaattcctttgaatattgtgtcaactactagggcatgttagaattgcttgcgtgtgtgcttttccattgtttaggcaacataaagcttgagaccatttgtttagtctatgctgatgagtttgactgctaattagcagcgcctcccagtcaaaagcagcatgtgtattgtataactgtaaatattgccttgatttgaataaacttgttttttgagctagaactttatttcacgaacttcatatgatagaccctactgtagagtatttctttctcttctcatttcccattattgttatcacttctctttcaacaagaattttctttcttattttattttattttatgtagaagtgtagaaccatatagtctctttggctaatttaatgtggttttgttatctggaaatctggactaatatatttatcccatctttaaaagttgatattttgatatttctagatatatat

SEQ ID NO: 132089 - DNA, 449 bp, Zea Mays
ccatcgtccctgctagcgagacaggaggtcccagtggagcggctaaagccgagggtcgaggcacaggagagagggaactaggctctcaagtaaaagtacccgatcggactaaacccccaagagaaggtgaagctggagaaggagcacatgtggctattcatggacgacagcatcaaggacctcgccaacatttccatggagtagatcaacgccaccgagctcaccaagaacgatgtcgacatccggttcaagtgtacatccactctgcgcctgctgcaatgctgatttaattgttgctcttaacacaaccatttgcgattcagattttgacaactctgatatttagtccttgatgcactattagatgactgtgccgtggtatttgagatatgtgagcctcatgatgcagtatagttgcaggaacctactaacacagcttcacttctaac

SEQ ID NO: 132090 - DNA, 330 bp, Zea Mays
atggcgaaggcatacaccattcttgtagcccttagcatggtagctctgttatcctgcaatgatgtggagggtgaagcatacatgatgcatgaagcgctttctcgcaaaggtctaagggaagacatcaagctaggcactaatggtgccgtgaatccttctgctatcagtttgtctggacaggcatctagcatcaccactggcgtgaacagcaacactgaaagcagcacaagcattgagatctcaggcgctgctgcagcctctacctcgatgaccgctactaccgcagatacccaccgtgggtaccctatcacccgtgacccaaaacactaa

SEQ ID NO: 132091 - DNA, 1435 bp, Zea Mays
accgaagcgcccagccaaaccaacaaattggtacggtggcgcggttttcaaaagaagccgaaaaccatctgcacccaccgactagtaggcccttggatcctccccgattaagtcctagccaataggagcccagaaccacccataacgcggatcgtccctacgcttccacctcatcggcgccgtccatctccatccaacaaatacccatcctccgaaaaaattctcggctcgcgctccgcacctactacaaatacccatcccatcacgacgcatcgcatcactgccaaatcccccagaaagtcaactcctccccaattccacgctgccaccaactcgccgtcctccgcgccaagcaccaaagctccgatggcccgcacgaagcagacggcgcgcaagtcaacgggcggcaaggcgccccgcaagcagctggcgaccaaggcggcgcgcaagtctgcgccggccaccggcggcgtgaagaagccccaccgcttccgccccggcaccgtcgcgctccgggagattcgtaagtaccagaagagcacggagctgctcatccgcaagttgcccttccagcgcctcgtccgtgagatcgcgcaggacttcaagaccgatctccgcttccagtcctccgccgtctctgcgctgcaggaggccgccgaggcctacctcgtggggctctttgaggacactaacctgtgcgccatccacgccaagcgcgtcaccatcatgcccaaggacatccagctcgcgcgccgcatcaggggagagagggcctgagcgaggcgagctcctctcaccgcaggcggcgtcgttgttgcttcgggcctgcttgtaggacttgtgcttctcttggtttcctttctggtggcagtggcatcttcgtaccattgtgcttgttcttagaatcttagggatagagagttgttcagttgctgggtaacctgattgtttatcttgcattcctgcctctgtaatggttgtctgctgtcttaatggaaatgatatttgcttttttaattcccagtttcatcaatatgttcaatctgtggttaatttttctgtggacaacattgtacccagtcagtttcatctataatataattccttatgttttagttggcgtatcagctagggatcacatcctcatggtggacacattaggtaggagactttctcgtgatcattgtgtaatcttgtggtacatatttctctttcagatcaatttctttgatgagattgttgctgatgcatttggggaaaatatcctatgcaatcacttatcctgttgcaagcatacaatcaagtgatctggtgcatccgatctagatctaatggtaactgttattttacatttaacccattccacctgaaacctagtgtctattttacatttaaccactgttgaataattagacaaattccaaattaagttctg

SEQ ID NO: 132092 - DNA, 1015 bp, Zea Mays
aagacacctatgcaagttcacgccaagccttaccgttggctgcaatcttgctgcccgccttagcctatatatactgcttccagttcagcacggctgaaacttactcttacgagtcgcggagctagagttacagcgctcgctggccttgaattttgtagacgagagaacagatttgatttcacctgggattgtgatttgggaagaaagagtcggcgtcagaggagaggatcacaagttgacgagtgaagacacagttaaagcaggcatgcaagaagggtacgtgtactcgcggagggcgctgctgctgactcctctgcacagctacggggagaatgcggcggcgagccaggtggtggccgggcaggaagctccggcgggcgacggtgtcaggagcagcagcagcagcagcttcgacgcgaacgtggtcatgatcctggccgtgctgctgtgcgcgctcatctgcgcgctggggctcaactccatcgtgcggtgcgcgctccggtgctccagccggacgtcgcccggcggggcgcagcgccagccgggcgcgggggcgggggcgggggagccggtggcgcggcttgcgcaggctggggcgcggaggaaggcgctgcgcgcgatgccgacgctggtctactcggcggggctgctgccgctgcaggcagcaggcggcggagggcccgtgtgcgccatctgcctggccgagctggagcccggggagcgcgtgcgggtgctgcccaagtgcaaccacggcttccacgtccgctgcgtcgaccgctggctgctggcgcggtccacgtgcccgacgtgccggcagccgctgttcggcgcgccgcacaagggctccggctgcgccgacgatgccggcgccggcgccgagcctccggtgcgggcgttcctcgtgccgctccggccggaaggtttcatgacgccgtacgatttttagactaagatagtcgtgtaacctttgatttgtagagagtatacaagcaaagcaatacacgcatgggcaccg

SEQ ID NO: 132093 - DNA, 1922 bp, Zea Mays
gcgagacggctcgcgagccggacccgtcaggccgtcactgcaccacatgacaaacccggaccgaacacggacgcctcccagcaagtggtgacccgtttctccattctcgccgtccgattataaatgcgtccgcaaatgccgccagtccgctctctctcgctgcgcctccgcccccaaatctgcgcaaaggcctcccactcaaattcctcgcggcgaccgatatggttgggagcgtgggcaacgggctggccgatctgggtgcaagagccgtctccatgaacggggcggggaaggcgctgcgtcctgccgaagcggcggcggcggccgccgccgcggagacgctcccgatggagctggatccgtcggaggccttagtggccgctgcggtggaggcgaagggcgagaaggctgccaacgggaggagggagatcgtgatggggaggaacgtacacacctcctgcttcgccgtgaaggagcccgacgcggacgacgaggaaaccggcgagcgggaggcaaccatggctagcgttctcgcgctctaccgccgctcgctcgtcgaacgcaccaagcaccacctcggttacccatacaatctggactttgattatggtgcactgacccagctgcagcacttctcgattaacaaccttggtgatcccttcatcgagagcaactatggtgttcattcccggcagtttgaggttggagtgctggattggtttgctcgtctctgggagttagaaaaggatgagtactggggatatattactaactgtggtacagaaggaaatctgcatgggattcttgttgggagggaggtgttccctgatggaatattgtatgcgtctcgtgagtcccattattcagtattcaaagcagcaagaatgtacagaatggattgtgtcaaagttgacacccttatgtctggggaaatagattgtgctgatttccagagaaagttattgcagaaccgagacaaacctgccatcattaatgttaacattggaacaactgtgaagggggctgttgatgatctagacttggttatcaaaacccttgaggaaaacggctttaaaggtcggttttatattcattgtgatggtgccctttttggattgatgataccatttgttaagaaggcacctcaagtgacatttaaaaagcctattgggagtgtcagcgtctctgggcacaagtttgtcggatgccccatgccatgtggtgtccagataacaaggttggagcacataaatgccctttctagcaatgtggagtatctggcgtcaagggatgcaacaatcatgggaagcaggaatggccatgcccctatcttcctctggtacaccctcaacaggaagggctacagaggcttccagaaagaagtccaaaagtgcttgagaaacgcacactacctaaaagatcgcctcaaggaagcaggaatcggagcgatgcttaacgagctcagtagcacggtcgtgtttgaaaggccaaaggatgaagaatttgtccgaaggtggcagctggcttgtgaagggaatatagctcacgttgtggtgatgcccagtgtcaacattgacaagctagactatttcctgaatgagttagttgagaaacgggcgacttggtaccaggacgggataagccagccaccctgcattgccagagacgtaggtgttgagagctgtctctgtggccttcacaagtagcgagccttttgctttgcaagtgggttcattcttgagtcgagttaaaagtgttatgttgtactgtgttcattcttgagttgagttaaaaagtgttatgttgtactgtgttcgtgcgttctgcttctgtgtttctccacagtgtagcttatttgttgccatgggaataaaattccttctattaaattgattgatggaagttgcatcacggttggcttt

SEQ ID NO: 132094 - DNA, 1663 bp, Zea Mays
cccccttccctgttttcctcaacgctttcactttcttctccgttccatcgcctcctcccacttctctctgccgccccccacaccccagccgcgccattgcccactgcattgcagactgtaagccgggaatccacttggattgcatcgatccatcggaaggcgccagatgaacacccggctgtcggcagagtaccagggcctggaggtgaaggtgcccagcctcttccggtgccccatctcgctggacgtgatgcgctcgcccgtgagcctctgcaccggcgtcacctacgagcgcgcctccatccagcgctggctcgactccggaaacaccacgtgcccggccaccatgctctcgctcccctccaccgacctcgtccccaacctcaccctgcgccgcctcatcgcgctctgggcgtccacggccgcgccctcctctccctcctcctcctcatcgcccgccgtcggccccacgccggccgccgcggcggccgagctcctccgccgggtcgctgaccccgccgcggacccctgccccccgctccggaagctcgcggctttcctctccgacgacgacgtggacgagttcgacaagaacgcgctggctcgggccggcggggccgccgagaccgtggcgtccgtgctgcggcgagcgggcagggagcccgcggaggccgccgtgcgggtgctcgcggccatcgcggcgtccgactgcatcgaggaggagagcaagaggcgcgtggccgcggcgctggccgccgacgcgccgtccacggctgcggccctggcgcgcgtgctgcggagcgccacctcgctcgaggcgcgtgtggacgcggcgaggctggtggagtcgctgctccgcaatgcggcgccgggcgcgcgggcgacggtggcggactccgaggagctgctcggcgagctcatccgcctcgtgggccccgcggacgacaagggcggcctcgacaggcaggccgtggcggcggggctgtcgtgcctggcggccatcgcggcgacgcggcgggcccgcgccgagatggtccgcctgggcgccgtgcccgccgcggtgcgcatcctggaggccgacgccggttccccgagccaggcgctccgcgtgctggaggcggcggtcgggtgcgccgagggccgcgccgcggtttgcgagtccgcggggtcggcggtgcccgtggtggtgtccaagatgatgaagggcgggatggccggcgcggaggcggcggtgtcggtgctgtgggcggtgtgccaccggtaccgtgaccggcgcgcggtggcggcggcggcggcgtgcgagagcgggctcaccaagctgctgctgctcatgcagagcggctgctcgccggcggtgcggcagatgacgtcggagctgctcaagatcttcagggtcaacggcaagagctgcgtcgcagggtacgactccaagaccagccacatcatgcccttctgatcctcactgctatcggtgatacaacagtggaaccagcatttgtctgttacccttttccagtttcgaattttttttgattcgttggaagtgcatacagtagggaaaaaaaaaagaaagaatgagttctcttgtagcaacacaaaacttgtatatgagtagaggattttggtagaaagaaatcaatggatgaaacaaattcagcttctc

SEQ ID NO: 132095 - DNA, 102 bp, Zea Mays
atggtcggaaaagaatttggtctggtagatgacgaagaagaggaaccagaagcgggacgtgaagaggaggaagatgaggatgagattgaggagtacggttag

SEQ ID NO: 132096 - DNA, 327 bp, Zea Mays
gaagtggaaaacttggatgcaatgaatggtgggtggtgtggcggcggcattctggccgagagtatggcgcgcgaaggcgcgacggtgaccggtctggatatgggctttgagccattgcaggtggcaaaactgcacgcactggaaagcggcattcaggtggattacgtgcaggaaaccgtggaagagcacgcggcaaaacatgccgggcagtatgatgtggtgacctgcatggagatgctggagcacgtccccgatccgcagtcagtggtcagagcctgtgcgcaactggtgaaaccaggctgcgatgtctttttctcgacacttaac

SEQ ID NO: 132097 - DNA, 558 bp, Zea Mays
taaacaacgcctccacccaccttttcttctccaaaaaaaaaacaaaaacaaaacaatagcctcatgtacatcatatcctacagagaagaaacgtgcctcttctcctccaagtatacatgctagtgctgctgcgtgctacaactaaccaaccactacgagagcctagctacgaccgacaaggaagcaaggattcaatttaatccacgtacgatgatgcatgcgacgcgaactacgtatctatcttcgagatcttactctacaatatatcttttctcgaccagcctctctctctctctctccaaacatttggtacgacgacgacggtcgacggcgcgccggtatacgtacgtcatcgtcagggatggctctggtcctgcgctccgatggagttgtgctgccgcgaggggccggacggcggcacggggcccctggggaagaaccccaggaaacggttggcgctgcctggctccagcagcggcctgccccggaacggctgcatgcctcgcgctcgcgccgtcgcctggcagcagctcggcaccaccagcatcaggatcaaaa

SEQ ID NO: 132098 - DNA, 253 bp, Zea Mays
gttaaactaatgtctcaattacttatcgaatactccatccgttttaaaatagtatttgttttagctcttgcagcttgttcgctgcggcttgctgcggctgcaatccggctgcggctgcggcttctacagtatttttctctctatggattgcagctgcagcagtccaaacagctgcaacagtgtcggcttgtagccagccgaacacgcccttgatttttatgtttatattcatctaaatgatgattaatccact

SEQ ID NO: 132099 - DNA, 1719 bp, Zea Mays
caaagcgagcgaccctctcaatcatagagcagtggccagcatttagagcgagacggttgggttgggttgggctgggctgggctagccagcctagcccgtcgacttttcggtacccgtcggccgtcgtcaacagcacacatggagaccggctcctcgctctcttcctcctcgcgttgaaccattccacccgcctctctcccctcctccgccgggccgcagctacaaagcccgtacggcttgcgtcctctagctccggctcgccgtctcctcccgctcccctcagctgccgcccgcctgctgcaaaccccgcacatggatgcgtcctcgggcgaccgctcgtcgccgcggagccggcagctgcagggcccgcgcccgccgcggctcgccgtcagcaaggactcgcacaaggtcaggaagccgcccgtcgcgccgcagcggcagcagcaccagcaccagcagccggccgcgcagctgcagcagcagcagcaccagtaccaccagcagcagcagcagcaggggcggcagccggtcatcatctacgacgcctcgcccaaggtgatccacaccaagccgggggacttcatggcgctggtccagcgcctcaccggcccgggctccacctcgcaggcccaattcgacgccgccgccgccgcggcggggccctcgcacccggcggcgatggagttcgagccgcgggagttcctcctctcgcccaccgccgcgctgtcccctgcagcgcggctggccgccatcgagaggtccgtccgcccgctgccgccgcaccacgcgccggcggccgttcctccctacttcggcgccaccaacgacgacggcttcttcctgcccggttcggcggacatggacagcctctccgcggccctcggcccgcccgccggccgccccggcatcctctcgcccgcggcgctccctccggcggcctccacggggctgttctcgccgatgccgttcgacccgagctgcctgtcgtggctgagcgagctgagcccgttcctcccctccgccggcacccgcgccgccgcggccgggctgctggaccaggcgccgttcgcccccagcccgcgcagcagcttgctgctgtccacgcccaccatgccgtcgccggccaccttctccgtgctggagttcttcagcagccccaacttcccggacctgtaaatctctagattattgacctcacaacaattcaattctactgatcggttccattccattacgacacttcgccgttgccgtccggacgtgcagtgctgtgcgtgcaagcaactcgagaaatcatccgtgcctcaccgagcaacacccggttaagttttactgcaatctcatcgcttgtgggtcagttgttttttcttctaataacaaatcgtagtgtattattagagtttttttttccgcgtcgtgtttcgtcattcgtgctggcttgtgggtcagttgcgagagggcaaacaagttggcatccgccactggtaggctggtagctactgattcattaattaattgattggttagagtatgaattttccttcttttaaacaaacctttctccgtttgcattcgtcaaatgtacgtgggtaggtaggaggctgctaatgttttgtgcctctttttatttctatcgtttttcattattgttactagtagtattaggtgataatatatgttactggcaagcgaaggtggtgatgactgattgtatgcata

SEQ ID NO: 132100 - DNA, 269 bp, Zea Mays
ccccaggcacatttcttgagcgagcgacgagaaaaactgaagaacacatttcatcgtcaacatatctccactggagggcgtttcagagaccatttatatcacttctcaggtcagaacatttagattgccggcggagcagtagctggacatgataggcagcaaaccgcaagtgcatcgcttttcaacaaaaccaggcactcttgtctaccacattacaaagtaggatcaggtcattacacggaaaagggcagcacccgcagcaccacacg

SEQ ID NO: 132101 - DNA, 821 bp, Zea Mays
ttatagaaaagacagcttgattgcacggagtacctccaagagaaataaaacaacagtaaaatccagccatgcacatcctgaccgcggcacaaacggagcaagacagcaaccaagctgcctgctatgaatctcgcgccattaaagcgtatttcgccatgaaaaaaccccgagagagacgaaaagaacaaagaatcacaacactatgccccatttttcaggcagaggtatcagcagcagcagcaagcttgctttcctcagaacttggggcatcagcagcagcagcaaccttgctttcctcagaacttggggcatcagcagcaacagcagcttggattgattcaggatccatccgcttctcttcttccgccgcatgcgcgtcgccaccactcggaagaccatccttgagttcttcggccgtgtcgtcctgctcggttgcgaccgaggcctgcactgttgcttgcggtgaccccatcgtttccccggcagcggcagcactcgctggctccccagccacgaccttctccgcctcctggtcgacctcctcctccccgtcactgccctcggcgtcccgtttaagcaggtcgctgagggacctccggcggctgacatcggcctggtcgacctcggcagcggcggccacggggacctcggcggccttcgccttctcgtcggcagccgccagtggcgccgcggcgtcctccgcgaccagaggcgcctcgcccttgaccttgaggtcacccggcttcgtcgcgcatgcccccatggccaagagagatgtagcaacactcgctacgctagagccggttaatctaccgctttga

SEQ ID NO: 132102 - DNA, 1508 bp, Zea Mays
gttgttgttgtgcaggctttgctttgtgctcacctagctcttgacctcttgtgctctggcgtggagggtgctggtggtgccccgttgggctttaggctttggctttttagctgccctgccctccaccctccctctgcagtctgcacctgcacctgcgcctgcacccgcacccagtgtccattgcactgcactgctcggcttggctgctccccacgccatcgtgttcctcttccttcttcaacaacgctctcaaaggcttggctactaccgctccactagcttcaccactcgcaattgcagccgagccgactgaggagggaagaagaaacggcatgggtgctgcgacgccgccgctctgcaccgccgcgcgcgcgcggtgctccagcgcatgcaccttcctcgcgctgctgctctgcttccagctcctgcacacgtcgcatgccttcaagctgcgcggcgtcggcggcggctacgaggacaagaaggtcccgctggccgtcatcgtgccggcggacccgtcgccggaactgtccggccagctgtccccgctcgccgcgccgccgccggtccacggcggcggcggcgacgacatgcggcccaagctgccgacggagcggtggcgccggggcaggggggaggtccggcgcgccgcgcacccgccggccgcggccgcgcacgaggctcccgcgcccactgcggctggccccgccgccggggcgccggcgcccgactccgggagcggcggcggcacggccttcatcaagagcagccccgccgtgccggtcccgcgcggcgtcacggacacggccaccgtcctgcccttgcccgcgcccggagaaaagcgccaggtggtcggagccgccacttcggctgaagccgactgtgtagtagtgccgctgctgctggggctcatggtgatgatggtgtcttttggggtttattaagctctctagtctagatgcacgcggtttaaaagtagcagtagctggagaggataaaagcttgctcctttctctgctttgtttctttctgtgccgggcggcgcccccaggccccagaccctagacctggaagtggatttggataatccaaaatcaaaatgggttttacccgttatagtttagtttgatggatgtttcctggatatgcggatatccccaagtgatcaaagcatgccaagtaccacaaaatcgagtagagagttattcttagccattgctttgtgagatattgagctatagtgcacttgagtgatctgagttgaagtgttctcttgtgatctttgactttggtgcaagccacccactgtgggttttaaaggctagcaagaacacccaaccccaagcttgtggagcgctttatagagacttcagtctttccattgagttgagaaaagagaaaggactcgcgtttgatctttggaatcacttgaaagggttgaaataaacccgatcctttagaacacctcaacaaaaacatatgttttatttggaaaccgaatttcgata

SEQ ID NO: 132103 - DNA, 518 bp, Zea Mays
atatcaatcgccacccagcagagaaactaaacttgcatcgatcgctcgctcgtcagttctttctgatcatcggtcgcctctctagctagctagctacctgatcggccatggctgaggagaagaagcaccaccacctgttccaccgccacaaggacggcggcgaggaggaggcgagcgccggcggcgaggtggactacgacaagaaggagaagcaccacaagcacctggggcagctcggcgggctcggcgccatcgccgccggtgcatacgcaattcacgagaagcacaaggcgaagaaggaccccgagaacgcgcacggccacaaggtgaaggaggaggtggcggcggtggcggctctgggcgcggccgggttcgcgttccacgagcaccaccagaagaaggacgccaagaagcagggccagagctgatcgagcctctctctgtgtgtgtgccgcttattattgtggcgtttatagatacttactacttaataaatcgcctcgtccatgttgcctgcc

SEQ ID NO: 132104 - DNA, 3570 bp, Zea Mays
atgagtatagaagaggctgcaaagaagacagaaattgatggtaatggttcaggagggattacaaagagtgagatgatgagcaaaatgagaagtatgatccaggagctcatggggttagggctgattggtgctaaggccaatacaggtacatctaagttgaagttggaacttgtgcctaatgatgtgaagttagaaggtagtaagaattatctaagctagtccagaagagtgcgtgtactcctaggaggtaagggagtggagcattatttggaggagacatgtgttgagccgatcgataagctcggcacagaatggagaatatggcatgcgacaaactctgtgatagttgcatggttattggcatccatgtctcccactgttagcaagagggtggaagccatgcgcactgcatcgcaaatatggaagaccttgagtaatatatactctcgaaaggggaatgtgatgatgatgatggaaattcagagcaaggcagatgcagtgaagcagatggggagaccagtggaacaatatgcttgtgagctccagtacttatggggagagttggatcattatgctcctctccaaatggtgtgcccacaagatgcacagatggctcataagtgggtagaggataggagagtgacccactttctaaagaatctggattctgagtttgagagcaggagagcggccttttgtcaccaggagagtcttcctaccatggatgaggccgtgtctgccatgatagatgaagagagcagactttgagtgatgaatagtgataaccatgtgaagccagcatacgttgcaattgaggatagggagtgctacaattatggggaaaggggacatctgagttacaattgtccaaaccctagaggaaatggtggccagggaggatctcgtggaggacgagggggtactcatgggagctatggaagaggtcgaggaggtcgtggtggaggtcgtggtagaggccgtggtggctccagggccaacatagctaccactgaagagagtctctctgttactctgtctggggaacaagctaagcaatgggagcagtggcagaagggcaagtctttcgagtgcctcacttcacctgatgggcaagccaccaactccttcggtaactttgccaactacgcccacatgggagaaggtactcaggcacaagtctttgcatcctcatataggcatcacatagattgggtcatagattcaggagcatcaaagcatgtgactggcatgtccacccctttcaaaacatacattccttatacacattctgagtcagttcaaattgctgatggtacatctcaacaaatccgtggtataggatctattgagtgtacaccatcccttaccttgtcatcagttctgcatgttccatcttttccagtcaatcttctttctgtaagttcaatcattgaccaattcaagtgcacaataatatttgatgaaaattcttgtatctttcaggagaagagtactgggagaaagattgggactggagtcaggcataatgggttgtggttcatcagtcatgaggagttagcattgaaagcagctgttgagggggatggcaaggagattctactacatcatcatcggttaggacatatatcttttgagaacttaagttggttgtaccccatgatgtttaagggagtggacaaaagtatacttgtatgtgatgcatgtgaacttggcaagcatactagatctacctaccctagtgttggtcttcgtagttgtgaaccatttattctaatacattcagatgtttggggtccttgttcaatcacttctgtgaatggtgcaaagtggtacgtcacctttattgattgttacactcgtatgacttggatctatatacttaagcataaaaatgaggtgttacagtgctttcaagacttccataaactggttgcaaatcagtttaatgcaagaattcgagttatcaggactgataatggaacagagtatgtgaataatgaatttagatcatatctgttaggtcaaggaattattcaccaaacaacttgtcctggaactccacctcagaatggtgtagcagagagaaaaaatcgtcatttgttagaagtagcaagatctctcatgtttcagatgaatgtgcctaagtatctatggagtgaggcagtaatgacggccacatacctcatcaaccggatgccctcaaaaatacttaatatgaaatcacctgcagaacttctattgggaaagtgtgactttcgtgttccacccaaggtctttggttgtgtctgttttgtaaaagatcatcgacctatggtgagcaagttggatcctcaagcagtcaagtgcatctttgtgggttatacatctactcagaaaggatacaagtgttgggaccctattggtaagagactgttagtgagtatggatgtaacatttcgagaggaagacccatactatagaaagaaagttgatccagatcaaatcctagaggacttctctccggtcgatggaggagaccgtagagagggggaggatgacagtggtcgagctggtgatgaggctagtggtgatgaggctagtggagcttcaggaggggtgattgttggaggtatgattccaccagaagtggagaaagggataactacgcaggtattgagtaatgatgaaagtagtggggatcatggtgatccaactattaatattcaggaggagacagatgatgatgaggcagtgattgttggatcaatcccatgtcctactacagggaatttgaatgagaaacagagggagcaacatgattgttccattagggtaaaggtgaatgacaaatagggggagcaacctatagtatactatcgaaagcggacgaagaagcagggggagcaaccacaacctgaacgtgttgaagctccagtcccatatctctcctcagacttctctccagatccaactggtaatgtctctccaatccctgtttcttcgatttctaaacatgaagaattacctcttgcacaaagaagagttcctagagtaaatgctggaaaacctccatctcgttattgttatgaacatgatattgctaagtatgtctcatactctagtgtctctcctgcatatagaacgttcattgcatctctacaaacaatatctattccaaaagattggaggtatgccaaacaggatccaaagtggaaggatgccatgaaggaagagctgcttgcccttaaaaagaacaagacatgggaacttgttcacctaccagaaggaaagaaggcggtggggtgcaagtgggtcttcacagtaaagcagactcctgaaggaaagattgacaggtacaaagcaagattggtggcgaagggatatagtcagacatatgggattgactatgatgagacctttgcacccgtggcaaaaatgggcacggtgaggaccttaatctcatgtgcggccaactttggttggcctcttcatcagcttgatgtgaagaatgcattcctccatggtgacctgaaggaagaggtctatatggaaatcccacctggatttgcaaataaacagactattgggaaa

SEQ ID NO: 132105 - DNA, 1424 bp, Zea Mays
agctcccgtcccgtctctccaaaacttcattcgggagatatggcaaagccgaagccgaagaggcccgcgcccccgccccggcgttgggcagcatgcggtctctggcgacgacccgccttcgcgtcgggcggcctgccgctggccgccgccgcgtacgtgggcgtcgactacatgcagcacctgtcccccgtctggcacgggcggctgcggccggcgctctgggcggcgctggcgctcgccaccgccgcgcgcgcgccgttctaccggcgctggggcgccgaggtccgcgccgccccgcggttcttcgccgccatggcgttcatgctcgccgcgctgctctgcgaggccatctccgtccgcttcgtcagcaccgtcctcggcctgcagtggcaccgatctaccgctcctcttcctgacactggccagtggatgctcctagcattgagcgggaaacttcctcgaacagtggtcgatctactgaaagctcgcatcatcacccttcatcattacctgatgatgttcatcatgttggcgttttcggcactgttcgactgcatcagaggtcctggactcggaataggctcgaggtatatgttcactatggcagtcggacgtttgctccggacagcaacatttcttgccacgatccttccgtctgctcgaccttggtgcgccgaagctcggtatcagatacctgaccatccacacccgtgggcacagaaatattacgctccttatgcttcagatccagacatgatctcgagggtcatggaggaggatatgccatacgctactcttcaagattaccccgacgagtacagacctgactggggactgatgagtttcttagtagacattttgaggccaagcaccggagaggggccctcatggtatcatctgctgaggaaatcaagcggtggctgtaatgatcttatgtacagtggacatatgtttgttgccgttctaactgctatggcatgggcggaagcgtatgggggatggagctccgttgtgatatggttcctcgtcatccacagcgctcagcgggaggtacgggagcgccaccattacagcgttgactgcgttgtagcaatctacatcgggatcctcttgtggaggatgactgcgttcctgtggtccacgatggaaagcaaccgatccagaaggctttccaagctggatgaggttcagaagaggctattccgcgctgcaaaggattccgacgtcttggagataaggagcctgctaaatgaagttgagctggctggtcaagaaaagaagggcttttcgcagcatgtcatcttctccttcgctgcagctctgattgtttttaccttcttgtttgttctcctggcattcactctaaccaacgacggatgatctctcgatgtcccggcgattttgatattcagattcagcttaga

SEQ ID NO: 132106 - DNA, 464 bp, Zea Mays
caacacctcgcctcgcctcccctgcccacggtccgcccgccccgcccctgcctctgtatccatccacgtctgcttccatgccctcgccccggcgcccctcctccttcccggtcccgcacgcgatgccccgccgtgacagccgctgccccatcaacggcctcaccctccttcctccaccgtcccgctcgcacgaatctcgttcgtagcgacgctatcgcgggcctatggtgcaaggagaccgccacgctcgctgtcggggcttccgcgctctcctcctggcatgatggtggtactcgtctaatggggctcgcaccgtcagggcctccgcgctctcctcccggtgatgccatatgccgtcgttaagggcaagttttctgtattccagttgctccgactgagaagaaagagtagatgtatatcatttatgtatgctgggaaaatacattgttctggtcgccgtgaaa

SEQ ID NO: 132107 - DNA, 1664 bp, Zea Mays
tcggccggtctcctccctccaccgcacctgcagtcagcagcagcctcctctccacccaccaagggcaccaacccaccaccaccactcactcaaccacctctcgtctctctccagcgcgagctagctgctagtgctagttcgctcgtcggccaagatccaagacagcagcagggcttgtaatgccggggagcgtgccgctgggtctgtgcctggacacggcgggggtgcaggtgccgtggtacttcaggtgccccatctccctggagctgatgcgcgaccccgtgacggtgtcgacggggcagacctacgaccgcgccagcatcgagtcctgggtagccacgggcaacaccacctgccccgtgacccgcacggcgctcgccgacttcacgctcatccccaaccacaccctccgccggctgatccaggagtggtgcgtggcgcaccggtccatgggcgtggagcgcatccccacaccgaagcagcccgccgacccggacctggtgcggtccctcgtggcgcagggcccggggctccccgcgctgcggaggctcagggcgctggccagggagtcggacaagaacaggctggtgatggccacgcacgagacgagggccgcgctggtggaggccgccttcgggtccgggtccgggtccggggcggcgagcgaggagctcgagaccgaggccatggcggtgctcgcgctggtggggctcggggaggccgaggccgcggaggtggtcgggagggaggagcgggtggccaggctcggcaaggtcctcggcggcggcgggccgctggaggcgagggtgaacgcgggcgccgtggtggaggccgtggcgtcggcgtcgggggccgaggcccgggctgcgctgggcggcgccgagggcgtgatggacgggctggtggcgctggcggaggaggagaaggccaacaacgcccgcgccgtgcgcgtcggggtccgggccctgttcgcgctgtgcctggcgaaggagaaccgcgcgcgcgcggtggcggcgggggccgcggcggcgctggcgcggcgcgtggcggagggcggcgccggggagcccgagcgcgcgctggcggccgtggagcggctgtgccgcgccgagggcgggcgcgacgccgtggtggccggcgcgggcggcgggcccgcggccgtggcggcgctagtgcgcgccatgtccgggcgcggcgcggagcacgcggcgggcgcgctggcggccgtggtggtgggcgcgggcgggtcggaggcgctgcaggcggaggcggtccgggcgggggccatggggcggctgctgctgatggtgcagggcgggtgctcggagcgcgccaagcgcaaggcgcagcacctgctgaagctgctccgctccgcctggccgagcgccgactgcgtcgccaactccgacgacttcctccaacactaccactactgatcgtaatcgtcctacctagcattcgcgttctgttccctaaggccgcggaaagatcactcgctcgcttgctcaggggggcaagtgcaaaggctgccggcggcgtgtatgtatgccgggtccgggaccgggacggcagcaggacggagaaaatctctaatgttttgtacgtaacgtaacgttggcagggaggaggaggaggatggatggattcgtggttctggatcaatg

SEQ ID NO: 132108 - DNA, 1328 bp, Zea Mays
ctgcaacacagttcatttccagcccactacacctgtcgaaggtcgaccacgcttccgtcttccagatctcggcaatctccatccccgctacgccatggctgctgcctcctccccaaccttcccgccgccggcgaccgacgtcgccgctccaggcgtccccgatctctcgatcccctacgacctggccacccgcgggcagtggcaggcgctcttctcccacctctcccatccggcccacacgccccatccgcaccaccgcctcctcctctccgctctctccgccctctgcctggccaagctccgacgcttccccgacgccgctgcgcttctagcttccctccacccggatccggcctgcccgccgccacccttcctcatccgcctcctccatgctctcctcccactcttcctccccgaccgccccctcgcgctcgaccgcctctacacgctcctctcctccgtccgcgcacgccccaacgccgggcaccccgagtggcgccgccgcgacgcgctcgtcgcgtccgtcctcgccgccgaccacctcgcccaccgcgagttcgacgtcgcactcgcgctcctcgccgacatcgccggccgctacccgggcgacccggtgctcctctcgcgcctcgcctacgcgcacctccagatcggcaacctcggcgcggcctcggctgccttccgccacgtggagtccgtggccgccgcgtccgaggacccgacgcggcatgccaacctcctggcccgcaaccgcgcgctggagtgcatcgtgggcaaggactacgcggcggcggtgcgggagtacgagcgctgcatcgaggcggaccccgcggacgccgtggccctcaacaacaaggcgctgtgcctcatgtactcgcgggacctcggcgacgccatcaaggtgctggagggtgccctcgagagggtccccacggcggcgctcaacgagacggtggtggtcaacctgtgcagcatgtacgagctcgccttcgtcaaccacggcgaggtcaagaggagccttgctgagtggatcgccagggttgcgcccgacgacttcgacacctcctgcacgcgcatgtaggaggtactctgcctttttgcaattcagcattgtagccagccatgtgtatggctgttatgtcaacatgctgaaatgtgattatctctgtttagatagcattccaattcaaccaatttctgtttatgtgcatggaaattgtgacatgattggtatacatgattgaaaacaagagtgaattggagacagacatgctgttgtgatcatacatgcgaagaatgatgaatcccagtttttctcctcttgtcat

SEQ ID NO: 132109 - DNA, 2421 bp, Zea Mays
gcctccgctcggtttactataaatacgccttcacaaccagctgatctttttttcccctctttccgcgttcccaccctgccgtcgttgctactcgcatcgagatttgcgcggccgtgtcttgctcgcgcctgctgctctgttgccccccttccttccaaggtcgcgtcagcgcccagatctctcgctcgctcgccggcgccccggctagatctgggcggagctcggaggcggagccgtgcgccagtgtccaagtttggtaagacccaaagcggtgaggaggcgagggaagacgcgcggacgccatggagctggctgtcggcggcgggatgcggcggtcggcgtcgcacacctcgctgtcggagtcggatgacttcgagctcacgcggctgctcagcaagccgcggatcaacgtcgagcgccagcgctccttcgacgaccgctcgcttagcgacgtctcgcactcgggcgggtacggcaggggaggcttcgacggcatgtactcgcctgggggcggcctgcgctccctcgtcggcacgccggcctcctccgggctgcactccttcgagccccaccccatcgtcggcgacgcctgggaggcgctccgccgctccctcgtcttgttccgcggccagccccttggcaccgttgccgccgtcgaccacgcgtccgaggaagtcctcaactacgaccaagtgtttgtgagggatttcgtgccgagcgcgctggcgtttctgatgaatggcgagccagatatcgtcaagaacttccttctgaagaccctgctgctgcagggctgggagaagaaagtcgaccggttcaagctcggggagggtgccatgccggctagcttcaaggttatgcatgacgccaagaagggggtcgagaccctacatgctgattttggggagagcgccattgggagggttgcgcctgtggattcggggttctggtggatcatactcctccgggcctacacaaaaaccaccggtgatttgacgctggcagagacgccggagtgccagaaagggatgaggctcatactcagcctgtgcttatccgaggggttcgataccttcccgacattgttatgtgctgatggttgctgtatgatagatcgcagaatgggtgtatatggctaccctattgagattcaggcccttttctttatggcactaaggtgtgctcttcaaatgcttaagcatgataatgaagggaaggagtttgtagagaagattgctactcgccttcacgctttaagttatcacatgcggagttatttttggctcgatttccaacagctaaatgacatctatcgttacaagacagaagaatattcccacactgctgtcaacaaattcaatgtcattcctgattcaattccggattggctatttgactttatgccttgtcagggtgggtttttcattggtaatgtcagtcctgccaggatggacttccgatggttcgcacttggaaacatgattgctatactttcttcccttgcaacacctgagcaatctgttgctataatggatcttattgaggagcgttgggaagagctcattggtgaaatgcctctgaagatatgttatcctgctattgagaaccatgaatggcgaattgtgacgggctgtgatccaaaaaacactagatggagttatcataatggaggatcgtggccagtacttctgtggctgctgactgcagcctgcatcaaaactggacggccacaaatcgcaagaagggcaattgacctagcagaaaggaggctgttgaaggatggatggcctgagtactatgatgggaagcttggtcggtatgttggcaagcaggcgaggaaattccagacctggtccatcgcggggtatttggtcgccaagatgatgttggaagatccttcacatctcggcatgatctccctggaagaggatagggcaatgttgaagcctgttttgaagcggtctgcgtcatggacaaactgagatggccacaaaaatttttagggaagcaaaggctgctgaaaacacgagttcttgggggtagcatctccttgtctgctgatccgtttcctttgacttccaaacatggatggtttgtgtcttctggattttccttggttgtacaatatatcagctcgttttctgagttgaaagaaaaagaagcaactgcagaaatgggcattttgttttcttctttcgcaatctctgtaagaagatactctgattcttgcttgggtcatcctataagttgtggatccttttggttagagtcaactttgttgtgccagtggattatacggatgagtaagctgattccagcttccctgtgaagcataagtgctctttctaacgaatgaataaagctcctttctctgtgttgctggatgcctgtgtttctattgcgtttacttgactgcctgtc

SEQ ID NO: 132110 - DNA, 2063 bp, Zea Mays
cgctaacacgggtgcccagccgccgcagtctttcgaactgaggaaccctaggcccagcactcggcgacggcggcgcgccaccggcgacgggatcagcggcatcactcccctccttccccggcgcggcggcgccccgcacctaggccctagcactgcagcactcgacaacaggatcagcggtcgcgcccccctcctccttccccggcgcggcggcgccctgtagctgcagatctgccactgtccgcctgccggtcatggagcacctccggtggcgccccacagtgaacgagcgcgacttcattgagtgtgcgctccagtctgacctccgtgttgacggccgccactcctttgacttccgcaagctcaagatcaccttcggcagggaggatggctcgtcagaggtgcagctcggggagacacacgtgatgggctacgtgaccgtgcagctggtgcagccataccgtgacaggccgaatgaggggacgctggccatattcaccgagttctcacccatggccgacccctcctttgagcctgggcgtcctggggaattagcaattgagcttggccgagttattgaccgtggcctcagggagagtcgagctgttgacatggagtccttgtgtgttgttgctgggaagcatgtctggtctgtgcgtgtggaccttcacatcttggataacggagggaatctcattgatgcagctaatatcgctgcattggcagctttatctactttccggaggcctgaatgcacggttggtggggacgatggtcagcaagttacagtgcatgatcctgaggttagggatccacttcctcttacgatacaccatatgcccatagctgtaacatttgcatattttggtgaaggtaacatcgtggttcttgatcccacatacaaggaagaagcagtaatgggagggaggatgactgctatagttaactcaaatggggatgtttgtgccattcagaaagctggtggagagggtgtcatgtcaagtgttatcatgcagtgtttaagaattgcttcggtaaaggctgctgatataacaagcaaaataaagaaagcagtagactcatacaccaccgagaaagccctaaagaaagtaaaacgtttgccaacctcggttcctcagaaaattaatgtcactaatgtaactatggacggcaaaggtgatggtgaattggaaaagcaatctgtgcagatgcatagtgatgttcagcagataagcaaaggtgatgagaaccagcaaagtataaaaaggaattcacccttgactagggaccgaattgcaaaacacaaacaaacatccacattcattggtggcccatcaaattggtagtgattggtctgatgttttgtttcccaatttctagatatttagcataaacatttgctcgacacaagttttttttgccaactggtccttttttttttgccatgtagggacccatattctaaaggagttacattaagatccctcaaaatttctgatttgccggatccaccaactatggtcaaggccagcagccgtgaggatgcccaaccaatgactgaatcatctaatgctgaggtgaacacatcaagtgctgtggctgctggagagtctgagtcccatgaaattggatcgccgaagagtctaaaagatgctatcaaaccaaaacataaaagaaagaagaagaaaagtgacaggagttagtttagttgcaagcctgtaattttgtatgccccagataaatcaacgacagtctacaacacctcaaactcctgattgattaggtttcatccggggtgccatacatgggttttttgtgtgttttcaatcgtgactggtgctagtagtgacaggcaaattttgtacaagctgtagaattgtattttaggaatggttcagttaagctttcagtcaactttgcagctagttctgtgatgcgtgatgtcccagcactcttacatttcattgtactgctcaccgttaatcttccattgtccaaacggtcgtaaggattgccatatttgttccaacagtcttcagttgtggtctactggtcttagcttg

SEQ ID NO: 132111 - DNA, 1955 bp, Zea Mays
cgctaacacgggtgcccagccgccgcagtctttcgaactgaggaaccctaggcccagcactcggcgacggcggcgcgccaccggcgacgggatcagcggcatcactcccctccttccccggcgcggcggcgccccgcacctaggccctagcactgcagcactcgacaacaggatcagcggtcgcgcccccctcctccttccccggcgcggcggcgccctgtagctgcagatctgccactgtccgcctgccggtcatggagcacctccggtggcgccccacagtgaacgagcgcgacttcattgagtgtgcgctccagtctgacctccgtgttgacggccgccactcctttgacttccgcaagctcaagatcaccttcggcagggaggatggctcgtcagaggtgcagctcggggagacacacgtgatgggctacgtgaccgtgcagctggtgcagccataccgtgacaggccgaatgaggggacgctggccatattcaccgagttctcacccatggccgacccctcctttgagcctgggcgtcctggggaattagcaattgagcttggccgagttattgaccgtggcctcagggagagtcgagctgttgacatggagtccttgtgtgttgttgctgggaagcatgtctggtctgtgcgtgtggaccttcacatcttggataacggagggaatctcattgatgcagctaatatcgctgcattggcagctttatctactttccggaggcctgaatgcacggttggtggggacgatggtcagcaagttacagtgcatgatcctgaggttagggatccacttcctcttacgatacaccatatgcccatagctgtaacatttgcatattttggtgaaggtaacatcgtggttcttgatcccacatacaaggaagaagcagtaatgggagggaggatgactgctatagttaactcaaatggggatgtttgtgccattcagaaagctggtggagagggtgtcatgtcaagtgttatcatgcagtgtttaagaattgcttcggtaaaggctgctgatataacaagcaaaataaagaaagcagtagactcatacaccaccgagaaagccctaaagaaagtaaaacgtttgccaacctcggttcctcagaaaattaatgtcactaatgtaactatggacggcaaaggtgatggtgaattggaaaagcaatctgtgcagatgcatagtgatgttcagcagataagcaaaggtgatgagaaccagcaaagtataaaaaggaattcacccttgactagggaccgaattgcaaaacacaaacaaacatccacattcattggtggcccatcaaattgggacccatattctaaaggagttacattaagatccctcaaaatttctgatttgccggatccaccaactatggtcaaggccagcagccgtgaggatgcccaaccaatgactgaatcatctaatgctgaggtgaacacatcaagtgctgtggctgctggagagtctgagtcccatgaaattggatcgccgaagagtctaaaagatgctatcaaaccaaaacataaaagaaagaagaagaaaagtgacaggagttagtttagttgcaagcctgtaattttgtatgccccagataaatcaacgacagtctacaacacctcaaactcctgattgattaggtttcatccggggtgccatacatgggttttttgtgtgttttcaatcgtgactggtgctagtagtgacaggcaaattttgtacaagctgtagaattgtattttaggaatggttcagttaagctttcagtcaactttgcagctagttctgtgatgcgtgatgtcccagcactcttacatttcattgtactgctcaccgttaatcttccattgtccaaacggtcgtaaggattgccatatttgttccaacagtcttcagttgtggtctactggtcttagcttg

SEQ ID NO: 132112 - DNA, 1796 bp, Zea Mays
cgctaacacgggtgcccagccgccgcagtctttcgaactgaggaaccctaggcccagcactcggcgacggcggcgcgccaccggcgacgggatcagcggcatcactcccctccttccccggcgcggcggcgccccgcacctaggccctagcactgcagcactcgacaacaggatcagcggtcgcgcccccctcctccttccccggcgcggcggcgccctgtagctgcagatctgccactgtccgcctgccggtcatggagcacctccggtggcgccccacagtgaacgagcgcgacttcattgagtgtgcgctccagtctgacctccgtgttgacggccgccactcctttgacttccgcaagctcaagatcaccttcggcagggaggatggctcgtcagaggtgcagctcggggagacacacgtgatgggctacgtgaccgtgcagctggtgcagccataccgtgacaggccgaatgaggggacgctggccatattcaccgagttctcacccatggccgacccctcctttgagcctgggcgtcctggggaattagcaattgagcttggccgagttattgaccgtggcctcagggagagtcgagctgttgacatggagtccttgtgtgttgttgctgggaagcatgtctggtctgtgcgtgtggaccttcacatcttggataacggagggaatctcattgatgcagctaatatcgctgcattggcagctttatctactttccggaggcctgaatgcacggttggtggggacgatggtcagcaagttacagtgcatgatcctgaggttagggatccacttcctcttacgatacaccatatgcccatagctgtaacatttgcatattttggtgaaggtaacatcgtggttcttgatcccacatacaaggaagaagcagtaatgggagggaggatgactgctatagttaactcaaatggggatgtttgtgccattcagaaagctggtggagagggtgtcatgtcaagtgttatcatgcagtgtttaagaattgcttcggtaaaggctgctgatataacaagcaaaataaagaaagcagtagactcatacaccaccgagaaagccctaaagaaagtaaaacgtttgccaacctcggttcctcagaaaattaatgtcactaatgtaactatggacggcaaaggtgatggtgaattggaaaagcaatctgtgcagatgcatagtgatgttcagcagataagcaaagatccaccaactatggtcaaggccagcagccgtgaggatgcccaaccaatgactgaatcatctaatgctgaggtgaacacatcaagtgctgtggctgctggagagtctgagtcccatgaaattggatcgccgaagagtctaaaagatgctatcaaaccaaaacataaaagaaagaagaagaaaagtgacaggagttagtttagttgcaagcctgtaattttgtatgccccagataaatcaacgacagtctacaacacctcaaactcctgattgattaggtttcatccggggtgccatacatgggttttttgtgtgttttcaatcgtgactggtgctagtagtgacaggcaaattttgtacaagctgtagaattgtattttaggaatggttcagttaagctttcagtcaactttgcagctagttctgtgatgcgtgatgtcccagcactcttacatttcattgtactgctcaccgttaatcttccattgtccaaacggtcgtaaggattgccatatttgttccaacagtcttcagttgtggtctactggtcttagcttg

SEQ ID NO: 132113 - DNA, 1806 bp, Zea Mays
cgctaacacgggtgcccagccgccgcagtctttcgaactgaggaaccctaggcccagcactcggcgacggcggcgcgccaccggcgacgggatcagcggcatcactcccctccttccccggcgcggcggcgccccgcacctaggccctagcactgcagcactcgacaacaggatcagcggtcgcgcccccctcctccttccccggcgcggcggcgccctgtagctgcagatctgccactgtccgcctgccggtcatggagcacctccggtggcgccccacagtgaacgagcgcgacttcattgagtgtgcgctccagtctgacctccgtgttgacggccgccactcctttgacttccgcaagctcaagatcaccttcggcagggaggatggctcgtcagaggtgcagctcggggagacacacgtgatgggctacgtgaccgtgcagctggtgcagccataccgtgacaggccgaatgaggggacgctggccatattcaccgagttctcacccatggccgacccctcctttgagcctgggcgtcctggggaattagcaattgagcttggccgagttattgaccgtggcctcagggagagtcgagctgttgacatggagtccttgtgtgttgttgctgggaagcatgtctggtctgtgcgtgtggaccttcacatcttggataacggagggaatctcattgatgcagctaatatcgctgcattggcagctttatctactttccggaggcctgaatgcacggttggtggggacgatggtcagcaagttacagtgcatgatcctgaggttagggatccacttcctcttacgatacaccatatgcccatagctgtaacatttgcatattttggtgaaggtaacatcgtggttcttgatcccacatacaaggaagaagcagtaatgggagggaggatgactgctatagttaactcaaatggggatgtttgtgccattcagaaagctggtggagagggtgtcatgtcaagtgttatcatgcagtgtttaagaattgcttcggtaaaggctgctgatataacaagcaaaataaagaaagcagtagactcatacaccaccgagaaagccctaaagaaagtaaaacgtttgccaacctcggttcctcagaaaattaatgtcactaatgtaactatggacggcaaaggtgatggtgaattggaaaagcaatctgtgcagatgcatagtgatgttcagcagataagcaaaggtgatgagaaccagcaaagtataaaaaggaattcacccttgactagggaccgaattgcaaaacacaaacaaacatccacattcattggtggcccatcaaattgggacccatattctaaaggagttacattaagatccctcaaaatttctgatttgccggatccaccaactatggtcaaggccagcagccgtgaggatgcccaaccaatgactgaatcatctaatgctgaggtgaacacatcaagtgctgtggctgctggagagtctgagtcccatgaaattggatcgccgaagagtctaaaagatgctatcaaaccaaaacataaaagaaagaagaagaaaagtgacaggagttagtttagttgcaagcctgtaattttgtatgccccaggtgagtgtttatttgtgctgttgttctgtatttttttgggcgttcttattggtacaagtttttactactatttggtagtgttgaatgttaatttgattctcgtgaatgattgcgcatgctacaactgtatgttacgactattagaatgatgattttgcattcccctaaaagaagaca
